United States Patent Application Publication US 2024/0398993 A1 - sequence listing, part 3

SEQ ID NO: 6788 - protein, 1001 aa, Homo sapiens
MQSTDLGNKESGKIWHRKPSPATRDGIIVNIIHNTSDYHPKVLRFLNVAFDGTGDCLIAGDHQGNIYVFDLHGNRFNLVQRTAQACTALAFNLRRKSEFLVALADYSIKCFDTVTKELVSWMRGHESSVFSISVHASGKYAITTSSDTAQLWDLDTFQRKRKLNIRQSVGIQKVFFLPLSNTILSCFKDNSIFAWECDTLFCKYQLPAPPESSSILYKVFAVTRDGRILAAGGKSNHLHLWCLEARQLFRIIQMPTKVRAIRHLEFLPDSFDAGSNQVLGVLSQDGIMRFINMQTCKLLFEIGSLDEGISSSAISPHGRYIASIMENGSLNIYSVQALTQEINKPPPPLVKVIEDLPKNKLSSSDLKMKVTSGRVQQPAKSRESKMQTRILKQDLTGDFESKKNELPDGLNKKRLQILLKGYGEYPTKYRMFIWRSLLQLPENHTAFSTLIDKGTHVAFLNLQKKYPIKSRKLLRVLQRTLSALAHWSVIFSDTPYLPLLAFPFVKLFQNNQLICFEVIATLIINWCQHWFEYFPNPPINILSMIENVLAFHDKELLQHFIDHDITSQLYAWPLLETVFSEVLTREEWLKLFDNIFSNHPSFLLMTVVAYNICSRTPLLSCNLKDDFEFFFHHRNNLDINVVIRQVYHLMETTPTDIHPDSMLNVFVALTKGQYPVFNQYPKFIVDYQTQERERIRNDELDYLRERQTVEDMQAKVDQQRVEDEAWYQKQELLRKAEETRREMLLQEEEKMIQQRQRLAAVKRELKVKEMHLQDAARRRFLKLQQDQQEMELRRLDDEIGRKVYMRDREIAATARDLEMRQLELESQKRLYEKNLTENQEALAKEMRADADAYRRKVDLEEHMFHKLIEAGETQSQKTQKWKEAEGKEFRLRSAKKASALSDASRKWFLKQEINAAVEHAENPCHKEEPRFQNEQDSSCLPRTSQLNDSSEMDPSTQISLNRRAVEWDTTGQNLIKKVRNLRQRLTARARHRCQTPHLLAA

SEQ ID NO: 6789 - protein, 970 aa, Homo sapiens
MQSTDLGNKESGKIWHRKPSPATRDGIIVNIIHNTSDYHPKVLRFLNVAFDGTGDCLIAGDHQGNIYVFDLHGNRFNLVQRTAQACTALAFNLRRKSEFLVALADYSIKCFDTVTKELVSWMRGHESSVFSISVHASGKYAITTSSDTAQLWDLDTFQRKRKLNIRQSVGIQKVFFLPLSNTILSCFKDNSIFAWECDTLFCKYQLPAPPESSSILYKVFAVTRDGRILAAGGKSNHLHLWCLEARQLFRIIQMPTKVRAIRHLEFLPDSFDAGSNQVLGVLSQDGIMRFINMQTCKLLFEIGSLDEGISSSAISPHGRYIASIMENGSLNIYSVQALTQEINKPPPPLVKVIEDLPKNKLSSSDLKMKVTSGRVQQPAKSRESKMQTRILKQDLTGDFESKKNELPDGLNKKRLQILLKGYGEYPTKYRMFIWRSLLQLPENHTAFSTLIDKGTHVAFLNLQKKYPIKSRKLLRVLQRTLSALAHWSVIFSDTPYLPLLAFPFVKLFQNNQLICFEVIATLIINWCQHWFEYFPNPPINILSMIENVLAFHDKELLQHFIDHDITSQLYAWPLLETVFSEVLTREEWLKLFDNIFSNHPSFLLMTVVAYNICSRTPLLSCNLKDDFEFFFHHRNNLDINVVIRQVYHLMETTPTDIHPDSMLNVFVALTKGQYPVFNQYPKFIVDYQTQERERIRNDELDYLRERQTVEDMQAKVDQQRVEDEAWYQKQELLRKAEETRREMLLQEEEKMIQQRQRLAAVKRELKVKEMHLQDAARRRFLKLQQDQQEMELRRLDDEIGRKNLTENQEALAKEMRADADAYRRKVDLEEHMFHKLIEAGETQSQKTQKWKEAEGKEFRLRSAKKASALSDASRKWFLKQEINAAVEHAENPCHKEEPRFQNEQDSSCLPRTSQLNDSSEMDPSTQISLNRRAVEWDTTGQNLIKKVRNLRQRLTARARHRCQTPHLLAA

SEQ ID NO: 6790 - protein, 273 aa, Homo sapiens
MERREHLTLTFHSPEVPKIKGNRKYQRPTVPAKKHPSASMSCQRQQQLMDQAHIYIRTLCGSLCSFSLLMLIAMSPLNWVQFLVIKNGLELYAGLWTLCNHELCWSHTPKPPYYLQYSRAFFLISVFTILTGLGWLFSSWILNRGSMTTNLDLKVSMLSFISATCLLLCLNLFVAQVHWHTRDAMESDLLWTYYLNWCSDIFYMFAGIISLLNYLTSRSPACDENVTVIPTERSRLGVGPVTTVSPAKDEGPRSEMESLSVREKNLPKSGLWW

SEQ ID NO: 6791 - protein, 1266 aa, Homo sapiens
MWVNPEEVLLANALWITERANPYFILQRRKGHAGDGGGGGGLAGLLVGTLDVVLDSSARVAPYRILYQTPDSLVYWTIACGGSRKEITEHWEWLEQNLLQTLSIFENENDITTFVRGKIQGIIAEYNKINDVKEDDDTEKFKEAIVKFHRLFGMPEEEKLVNYYSCSYWKGKVPRQGWMYLSINHLCFYSFLMGREAKLVIRWVDITQLEKNATLLLPDVIKVSTRSSEHFFSVFLNINETFKLMEQLANIAMRQLLDNEGFEQDRSLPKLKRKSPKKVSALKRDLDARAKSERYRALFRLPKDEKLDGHTDCTLWTPFNKMHILGQMFVSTNYICFTSKEENLCSLIIPLREVTIVEKADSSSVLPSPLSISTRNRMTFLFANLKDRDFLVQRISDFLQQTTSKIYSDKEFAGSYNSSDDEVYSRPSSLVSSSPQRSTSSDADGERQFNLNGNSVPTATQTLMTMYRRRSPEEFNPKLAKEFLKEQAWKIHFAEYGQGICMYRTEKTRELVLKGIPESMRGELWLLLSGAINEKATHPGYYEDLVEKSMGKYNLATEEIERDLHRSLPEHPAFQNEMGIAALRRVLTAYAFRNPNIGYCQAMNIVTSVLLLYAKEEEAFWLLVALCERMLPDYYNTRVVGALVDQGVFEELARDYVPQLYDCMQDLGVISTISLSWFLTLFLSVMPFESAVVVVDCFFYEGIKVIFQLALAVLDANVDKLLNCKDDGEAMTVLGRYLDSVTNKDSTLPPIPHLHSLLSDDVEPYPEVDIFRLIRTSYEKFGTIRADLIEQMRFKQRLKVIQTLEDTTKRNVVRTIVTETSFTIDELEELYALFKAEHLTSCYWGGSSNALDRHDPSLPYLEQYRIDFEQFKGMFALLFPWACGTHSDVLASRLFQLLDENGDSLINFREFVSGLSAACHGDLTEKLKLLYKMHVLPEPSSDQDEPDSAFEATQYFFEDITPECTHVVGLDSRSKQGADDGFVTVSLKPDKGKRANSQENRNYLRLWTPENKSKSKNAKDLPKLNQGQFIELCKTMYNMFSEDPNEQELYHATAAVTSLLLEIGEVGKLFVAQPAKEGGSGGSGPSCHQGIPGVLFPKKGPGQPYVVESVEPLPASLAPDSEEHSLGGQMEDIKLEDSSPRDNGACSSMLISDDDTKDDSSMSSYSVLSAGSHEEDKLHCEDIGEDTVLVRSGQGTAALPRSTSLDRDWAITFEQFLASLLTEPALVKYFDKPVCMMARITSAKNIRMMGKPLTSASDYEISAMSG

SEQ ID NO: 6792 - protein, 301 aa, Homo sapiens
MLEPQENGVIDLPDYEHVEDETFPPFPPPASPERQDGEGTEPDEESGNGAPVRVPPKRTVKRNIPKLDAQRLISERGLPALRHVFDKAKFKGKGHEAEDLKMLIRHMEHWAHRLFPKLQFEDFIDRVEYLGSKKEVQTCLKRIRLDLPILHEDFVSNNDEVAENNEHDVTSTELDPFLTNLSESEMFASELSRSLTEEQQQRIERNKQLALERRQAKLLSNSQTLGNDMLMNTPRAHTVEEVNTDEDQKEESNGLNEDILDNPCNDAIANTLNEEETLLDQSFKNVQQQLDATSRNITEAR

SEQ ID NO: 6793 - protein, 488 aa, Homo sapiens
MTSPVLVDIREEVTCPICLELLTEPLSIDCGHSFCQACITPNGRESVIGQEGERSCPVCQTSYQPGNLRPNRHLANIVRRLREVVLGPGKQLKAVLCADHGEKLQLFCQEDGKVICWLCERSQEHRGHHTFLVEEVAQEYQEKFQESLKKLKNEEQEAEKLTAFIREKKTSWKNQMEPERCRIQTEFNQLRNILDRVEQRELKKLEQEEKKGLRIIEEAENDLVHQTQSLRELISDLERRCQGSTMELLQDVSDVTERSEFWTLRKPEALPTKLRSMFRAPDLKRMLRVCRELTDVQSYWVDVTLNPHTANLNLVLAKNRRQVRFVGAKVSGPSCLEKHYDCSVLGSQHFSSGKHYWEVDVAKKTAWILGVCSNSLGPTFSFNHFAQNHSAYSRYQPQSGYWVIGLQHNHEYRAYEDSSPSLLLSMTVPPRRVGVFLDYEAGTVSFYNVTNHGFPIYTFSKYYFPTTLCPYFNPCNCVIPMTLRRPSS

SEQ ID NO: 6794 - protein, 516 aa, Homo sapiens
MCGSERILQAGNILEIRVGQAGARRVATMTSPVLVDIREEVTCPICLELLTEPLSIDCGHSFCQACITPNGRESVIGQEGERSCPVCQTSYQPGNLRPNRHLANIVRRLREVVLGPGKQLKAVLCADHGEKLQLFCQEDGKVICWLCERSQEHRGHHTFLVEEVAQEYQEKFQESLKKLKNEEQEAEKLTAFIREKKTSWKNQMEPERCRIQTEFNQLRNILDRVEQRELKKLEQEEKKGLRIIEEAENDLVHQTQSLRELISDLERRCQGSTMELLQDVSDVTERSEFWTLRKPEALPTKLRSMFRAPDLKRMLRVCRELTDVQSYWVDVTLNPHTANLNLVLAKNRRQVRFVGAKVSGPSCLEKHYDCSVLGSQHFSSGKHYWEVDVAKKTAWILGVCSNSLGPTFSFNHFAQNHSAYSRYQPQSGYWVIGLQHNHEYRAYEDSSPSLLLSMTVPPRRVGVFLDYEAGTVSFYNVTNHGFPIYTFSKYYFPTTLCPYFNPCNCVIPMTLRRPSS

SEQ ID NO: 6795 - protein, 313 aa, Homo sapiens
MEPERCRIQTEFNQLRNILDRVEQRELKKLEQEEKKGLRIIEEAENDLVHQTQSLRELISDLERRCQGSTMELLQDVSDVTERSEFWTLRKPEALPTKLRSMFRAPDLKRMLRVCRELTDVQSYWVDVTLNPHTANLNLVLAKNRRQVRFVGAKVSGPSCLEKHYDCSVLGSQHFSSGKHYWEVDVAKKTAWILGVCSNSLGPTFSFNHFAQNHSAYSRYQPQSGYWVIGLQHNHEYRAYEDSSPSLLLSMTVPPRRVGVFLDYEAGTVSFYNVTNHGFPIYTFSKYYFPTTLCPYFNPCNCVIPMTLRRPSS

SEQ ID NO: 6796 - protein, 229 aa, Homo sapiens
MRLNIAIFFGALFGALGVLLFLVAFGSDYWLLATEVGRCSGEKNIENVTFHHEGFFWRCWFNGIVEENDSNIWKFWYTNQPPSKNCTHAYLSPYPFMRGEHNSTSYDSAVIYRGFWAVLMLLGVVAVVIASFLIICAAPFASHFLYKAGGGSYIAAGILFSLVVMLYVIWVQAVADMESYRNMKMKDCLDFTPSVLYGWSFFLAPAGIFFSLLAGLLFLVVGWHIQIHH

SEQ ID NO: 6797 - protein, 133 aa, Homo sapiens
MRGEHNSTSYDSAVIYRGFWAVLMLLGVVAVVIASFLIICAAPFASHFLYKAGGGSYIAAGILFSLVVMLYVIWVQAVADMESYRNMKMKDCLDFTPSVLYGWSFFLAPAGIFFSLLAGLLFLVVGWHIQIHH

SEQ ID NO: 6798 - protein, 110 aa, Homo sapiens
MLLGVVAVVIASFLIICAAPFASHFLYKAGGGSYIAAGILFSLVVMLYVIWVQAVADMESYRNMKMKDCLDFTPSVLYGWSFFLAPAGIFFSLLAGLLFLVVGWHIQIHH

SEQ ID NO: 6799 - protein, 256 aa, Homo sapiens
MPPAQGYEFAAAKGPRDELGPSFPMASPPGLELKTLSNGPQAPRRSAPLGPVAPTREGVENACFSSEEHETHFQNPGNTRLGSSPSPPGGVSSLPRSQRDDLSLHSEEGPALEPVSRPVDYGFVSALVFLVSGILLVVTAYAIPREARVNPDTVTAREMERLEMYYARLGSHLDRCIIAGLGLLTVGGMLLSVLLMVSLCKGELYRRRTFVPGKGSRKTYGSINLRMRQLNGDGGQALVENEVVQVSETSHTLQRS

SEQ ID NO: 6800 - protein, 421 aa, Homo sapiens
MMYRTVGFGTRSRNLKPWMIAVLIVLSLTVVAVTIGLLVHFLVFDQKKEYYHGSFKILDPQINNNFGQSNTYQLKDLRETTENLVSQVDEIFIDSAWKKNYIKNQVVRLTPEEDGVKVDVIMVFQFPSTEQRAVREKKIQSILNQKIRNLRALPINASSVQVNAMSSSTGELTVQASCGKRVVPLNVNRIASGVIAPKAAWPWQASLQYDNIHQCGATLISNTWLVTAAHCFQKYKNPHQWTVSFGTKINPPLMKRNVRRFIIHEKYRSAAREYDIAVVQVSSRVTFSDDIRRICLPEASASFQPNLTVHITGFGALYYGGESQNDLREARVKIISDDVCKQPQVYGNDIKPGMFCAGYMEGIYDACRGDSGGPLVTRDLKDTWYLIGIVSWGDNCGQKDKPGVYTQVTYYRNWIASKTGI

SEQ ID NO: 6801 - protein, 418 aa, Homo sapiens [sequence omitted]

SEQ ID NO: 6802 - protein, 234 aa, Homo sapiens
MDPGLQQALNGMAPPGDTAMHVPAGSVASHLGTTSRSYFYLTTATLALCLVFTVATIMVLVVQRTDSIPNSPDNVPLKGGNCSEDLLCILKRAPFKKSWAYLQVAKHLNKTKLSWNKDGILHGVRYQDGNLVIQFPGLYFIICQLQFLVQCPNNSVDLKLELLINKHIKKQALVTVCESGMQTKHVYQNLSQFLLDYLQVNTTISVNVDTFQYIDTSTFPLENVLSIFLYSNSD

SEQ ID NO: 6803 - protein, 487 aa, Homo sapiens
MAWQVSLLELEDWLQCPICLEVFKEPLMLQCGHSYCKGCLVSLSCHLDAELRCPVCRQAVDGSSSLPNVSLARVIEALRLPGDPEPKVCVHHRNPLSLFCEKDQELICGLCGLLGSHQHHPVTPVSTVYSRMKEELAALISELKQEQKKVDELIAKLVNNRTRIVNESDVFSWVIRREFQELHHLVDEEKARCLEGIGGHTRGLVASLDMQLEQAQGTRERLAQAECVLEQFGNEDHHKFIRKFHSMASRAEMPQARPLEGAFSPISFKPGLHQADIKLTVWKRLFRKVLPAPEPLKLDPATAHPLLELSKGNTVVQCGLLAQRRASQPERFDYSTCVLASRGFSCGRHYWEVVVGSKSDWRLGVIKGTASRKGKLNRSPEHGVWLIGLKEGRVYEAFACPRVPLPVAGHPHRIGLYLHYEQGELTFFDADRPDDLRPLYTFQADFQGKLYPILDTCWHERGSNSLPMVLPPPSGPGPLSPEQPTKL

SEQ ID NO: 6804 - protein, 486 aa, Homo sapiens [sequence omitted]

SEQ ID NO: 6805 - protein, 240 aa, Homo sapiens
MVSPVTVVKSEGPKLVPFFKATCVYFVLWLPSSSPSWVSTLIKCLPIFCLWLFLLAHGLGFLLAHPSATRIFVGLVFSAVGDAFLIWQDQGYFVHGLLMFAVTHMFYASAFGMQPLALRTGLVMAALSGLCYALLYPCLSGAFTYLVGVYVALIGFMGWRAMAGLRLAGADWRWTELAAGSGALFFIISDLTIALNKFCFPVPYSRALIMSTYYVAQMLVALSAVESREPVEHYRLTKAN

SEQ ID NO: 6806 - protein, 755 aa, Homo sapiens
MVSHGSSPSLLEALSSDFLACKICLEQLRAPKTLPCLHTYCQDCLAQLADGGRVRCPECRETVPVPPEGVASFKTNFFVNGLLDLVKARACGDLRAGKPACALCPLVGGTSTGGPATARCLDCADDLCQACADGHRCTRQTHTHRVVDLVGYRAGWYDEEARERQAAQCPQHPGEALRFLCQPCSQLLCRECRLDPHLDHPCLPLAEAVRARRPGLEGLLAGVDNNLVELEAARRVEKEALARLREQAARVGTQVEEAAEGVLRALLAQKQEVLGQLRAHVEAAEEAARERLAELEGREQVARAAAAFARRVLSLGREAEILSLEGAIAQRLRQLQGCPWAPGPAPCLLPQLELHPGLLDKNCHLLRLSFEEQQPQKDGGKDGAGTQGGEESQSRREDEPKTERQGGVQPQAGDGAQTPKEEKAQTTREEGAQTLEEDRAQTPHEDGGPQPHRGGRPNKKKKFKGRLKSISREPSPALGPNLDGSGLLPRPIFYCSFPTRMPGDKRSPRITGLCPFGPREILVADEQNRALKRFSLNGDYKGTVPVPEGCSPCSVAALQSAVAFSASARLYLINPNGEVQWRRALSLSQASHAVAALPSGDRVAVSVAGHVEVYNMEGSLATRFIPGGKASRGLRALVFLTTSPQGHFVGSDWQQNSVVICDGLGQVVGEYKGPGLHGCQPGSVSVDKKGYIFLTLREVNKVVILDPKGSLLGDFLTAYHGLEKPRVTTMVDGRYLVVSLSNGTIHIFRVRSPDS

SEQ ID NO: 6807 - protein, 308 aa, Homo sapiens
MVSHGSSPSLLEALSSDFLACKICLEQLRAPKTLPCLHTYCQDCLAQLADGGRVRCPECRETVPVPPEGVASFKTNFFVNGLLDLVKARACGDLRAGKPACALCPLVGGTSTGGPATARCLDCADDLCQACADGHRCTRQTHTHRVVDLVGYRAGWYDEEARERQAAQCPQHPGEALRFLCQPCSQLLCRECRLDPHLDHPCLPLAEAVRARRPGLEGLLAGVDNNLVELEAARRVEKEALARLREQAARVGTQVEEAAEGVLRALLAQKQENHLNPGGGSCSELRSHHCTPAWVTRMKLHLKKKKKK

SEQ ID NO: 6808 - protein, 269 aa, Homo sapiens
MVSHGSSPSLLEALSSDFLACKICLEQLRAPKTLPCLHTYCQDCLAQLADGGRVRCPECRETVPVPPEGVASFKTNFFVNGLLDLVKARACGDLRAGKPACALCPLVGGTSTGGPATARCLDCADDLCQACADGHRCTRQTHTHRVVDLVGYRAGWYDEEARERQAAQCPQHPGEALRFLCQPCSQLLCRECRLDPHLDHPCLPLAEAVRARRPGLEGLLAGVDNNLVELEAARRVEKEALARLREQAARVGTQVEEACLLRTESCKAE

SEQ ID NO: 6809 - protein, 1166 aa, Homo sapiens
MSGRRCAGGGAACASAAAEAVEPAARELFEACRNGDVERVKRLVTPEKVNSRDTAGRKSTPLHFAAGFGRKDVVEYLLQNGANVQARDDGGLIPLHNACSFGHAEVVNLLLRHGADPNARDNWNYTPLHEAAIKGKIDVCIVLLQHGAEPTIRNTDGRTALDLADPSAKAVLTGEYKKDELLESARSGNEEKMMALLTPLNVNCHASDGRKSTPLHLAAGYNRVKIVQLLLQHGADVHAKDKGDLVPLHNACSYGHYEVTELLVKHGACVNAMDLWQFTPLHEAASKNRVEVCSLLLSYGADPTLLNCHNKSAIDLAPTPQLKERLAYEFKGHSLLQAAREADVTRIKKHLSLEMVNFKHPQTHETALHCAAASPYPKRKQICELLLRKGANINEKTKEFLTPLHVASEKAHNDVVEVVVKHEAKVNALDNLGQTSLHRAAYCGHLQTCRLLLSYGCDPNIISLQGFTALQMGNENVQQLLQEGISLGNSEADRQLLEAAKAGDVETVKKLCTVQSVNCRDIEGRQSTPLHFAAGYNRVSVVEYLLQHGADVHAKDKGGLVPLHNACSYGHYEVAELLVKHGAVVNVADLWKFTPLHEAAAKGKYEICKLLLQHGADPTKKNRDGNTPLDLVKDGDTDIQDLLRGDAALLDAAKKGCLARVKKLSSPDNVNCRDTQGRHSTPLHLAAGYNNLEVAEYLLQHGADVNAQDKGGLIPLHNAASYGHVDVAALLIKYNACVNATDKWAFTPLHEAAQKGRTQLCALLLAHGADPTLKNQEGQTPLDLVSADDVSALLTAAMPPSALPSCYKPQVLNGVRSPGATADALSSGPSSPSSLSAASSLDNLSGSFSELSSVVSSSGTEGASSLEKKEVPGVDFSITQFVRNLGLEHLMDIFEREQITLDVLVEMGHKELKEIGINAYGHRHKLIKGVERLISGQQGLNPYLTLNTSGSGTILIDLSPDDKEFQSVEEEMQSTVREHRDGGHAGGIFNRYNILKIQKVCNKKLWERYTHRRKEVSEENHNHANERMLFHGSPFVNAIIHKGFDERHAYIGGMFGAGIYFAENSSKSNQYVYGIGGGTGCPVHKDRSCYICHRQLLFCRVTLGKSFLQFSAMKMAHSPPGHHSVTGRPSVNGLALAEYVIYRGEQAYPEYLITYQIMRPEGMVDG

SEQ ID NO: 6810 - protein, 786 aa, Homo sapiens
MTSIFHFAIIFMLILQIRIQLSEESEFLVDRSKNGLIHVPKDLSQKTTILNISQNYISELWTSDILSLSKLRILIISHNRIQYLDISVFKFNQELEYLDLSHNKLVKISCHPTVNLKHLDLSFNAFDALPICKEFGNMSQLKFLGLSTTHLEKSSVLPIAHLNISKVLLVLGETYGEKEDPEGLQDFNTESLHIVFPTNKEFHFILDVSVKTVANLELSNIKCVLEDNKCSYFLSILAKLQTNPKLSNLTLNNIETTWNSFIRILQLVWHTTVWYFSISNVKLQGQLDFRDFDYSGTSLKALSIHQVVSDVFGFPQSYIYEIFSNMNIKNFTVSGTRMVHMLCPSKISPFLHLDFSNNLLTDTVFENCGHLTELETLILQMNQLKELSKIAEMTTQMKSLQQLDISQNSVSYDEKKGDCSWTKSLLSLNMSSNILTDTIFRCLPPRIKVLDLHSNKIKSIPKQVVKLEALQELNVAFNSLTDLPGCGSFSSLSVLIIDHNSVSHPSADFFQSCQKMRSIKAGDNPFQCTCELGEFVKNIDQVSSEVLEGWPDSYKCDYPESYRGTLLKDFHMSELSCNITLLIVTIVATMLVLAVTVTSLCSYLDLPWYLRMVCQWTQTRRRARNIPLEELQRNLQFHAFISYSGHDSFWVKNELLPNLEKEGMQICLHERNFVPGKSIVENIITCIEKSYKSIFVLSPNFVQSEWCHYELYFAHHNLFHEGSNSLILILLEPIPQYSIPSSYHKLKSLMARRTYLEWPKEKSKRGLFWANLRAAINIKLTEQAKK

SEQ ID NO: 6811 - protein, 455 aa, Homo sapiens
MGLSTVPDLLLPLVLLELLVGIYPSGVIGLVPHLGDREKRDSVCPQGKYIHPQNNSICCTKCHKGTYLYNDCPGPGQDTDCRECESGSFTASENHLRHCLSCSKCRKEMGQVEISSCTVDRDTVCGCRKNQYRHYWSENLFQCFNCSLCLNGTVHLSCQEKQNTVCTCHAGFFLRENECVSCSNCKKSLECTKLCLPQIENVKGTEDSGTTVLLPLVIFFGLCLLSLLFIGLMYRYQRWKSKLYSIVCGKSTPEKEGELEGTTTKPLAPNPSFSPTPGFTPTLGFSPVPSSTFTSSSTYTPGDCPNFAAPRREVAPPYQGADPILATALASDPIPNPLQKWEDSAHKPQSLDTDDPATLYAVVENVPPLRWKEFVRRLGLSDHEIDRLELQNGRCLREAQYSMLATWRRRTPRREATLELLGRVLRDMDLLGCLEDIEEALCGPAALPPAPSLLR

SEQ ID NO: 6812 - protein, 347 aa, Homo sapiens
MGQVEISSCTVDRDTVCGCRKNQYRHYWSENLFQCFNCSLCLNGTVHLSCQEKQNTVCTCHAGFFLRENECVSCSNCKKSLECTKLCLPQIENVKGTEDSGTTVLLPLVIFFGLCLLSLLFIGLMYRYQRWKSKLYSIVCGKSTPEKEGELEGTTTKPLAPNPSFSPTPGFTPTLGFSPVPSSTFTSSSTYTPGDCPNFAAPRREVAPPYQGADPILATALASDPIPNPLQKWEDSAHKPQSLDTDDPATLYAVVENVPPLRWKEFVRRLGLSDHEIDRLELQNGRCLREAQYSMLATWRRRTPRREATLELLGRVLRDMDLLGCLEDIEEALCGPAALPPAPSLLR

SEQ ID NO: 6813 - protein, 228 aa, Homo sapiens
MGLSTVPDLLLPLVLLELLVGIYPSGVIGLVPHLGDREKRDSVCPQGKYIHPQNNSICCTKCHKGTYLYNDCPGPGQDTDCRECESGSFTASENHLRHCLSCSKCRKEMGQVEISSCTVDRDTVCGCRKNQYRHYWSENLFQCFNCSLCLNGTVHLSCQEKQNTVCTCHAGFFLRENECVSCSKHHSAVAPGHFLWSLPFIPPLHWFNVSLPTVEVQALLHCLWEIDT

SEQ ID NO: 6814 - protein, 223 aa, Homo sapiens
MYRYQRWKSKLYSIVCGKSTPEKEGELEGTTTKPLAPNPSFSPTPGFTPTLGFSPVPSSTFTSSSTYTPGDCPNFAAPRREVAPPYQGADPILATALASDPIPNPLQKWEDSAHKPQSLDTDDPATLYAVVENVPPLRWKEFVRRLGLSDHEIDRLELQNGRCLREAQYSMLATWRRRTPRREATLELLGRVLRDMDLLGCLEDIEEALCGPAALPPAPSLLR

SEQ ID NO: 6815 - protein, 218 aa, Homo sapiens
MGLSTVPDLLLPLVLLELLVGIYPSGVIGLVPHLGDREKRDSVCPQGKYIHPQNNSICCTKCHKGTYLYNDCPGPGQDTDCRECESGSFTASENHLRHCLSCSKCRKEMGQVEISSCTVDRDTVCGCRKNQYRHYWSENLFQCFNCSLCLNGTVHLSCQEKQNTVCTCHAGFFLRENECVSCSKVLLCRPGWNAVARSRLTATSASQIQAILLLQPPK

SEQ ID NO: 6816 - protein, 415 aa, Homo sapiens
MSPFLYLVLLVLGLHATIHCASPEGKVTACHSSQPNATLYKMSSINADFAFNLYRRFTVETPDKNIFFSPVSISAALVMLSFGACCSTQTEIVETLGFNLTDTPMVEIQHGFQHLICSLNFPKKELELQIGNALFIGKHLKPLAKFLNDVKTLYETEVFSTDFSNISAAKQEINSHVEMQTKGKVVGLIQDLKPNTIMVLVNYIHFKAQWANPFDPSKTEDSSSFLIDKTTTVQVPMMHQMEQYYHLVDMELNCTVLQMDYSKNALALFVLPKEGQMESVEAAMSSKTLKKWNRLLQKGWVDLFVPKFSISATYDLGATLLKMGIQHAYSENADFSGLTEDNGLKLSNAAHKAVLHIGEKGTEAAAVPEVELSDQPENTFLHPIIQIDRSFMLLILERSTRSILFLGKVVNPTEA

SEQ ID NO: 6817 - protein, 283 aa, Homo sapiens
MEPPGDWGPPPWRSTPKTDVLRLVLYLTFLGAPCYAPALPSCKEDEYPVGSECCPKCSPGYRVKEACGELTGTVCEPCPPGTYIAHLNGLSKCLQCQMCDPAMGLRASRNCSRTENAVCGCSPGHFCIVQDGDHCAACRAYATSSPGQRVQKGGTESQDTLCQNCPPGTFSPNGTLEECQHQTKCSWLVTKAGAGTSSSHWVWWFLSGSLVIVIVCSTVGLIICVKRRKPRGDVVKVIVSVQRKRQEAEGEATVIEALQAPPDVTTVAVEETIPSFTGRSPNH

SEQ ID NO: 6818 - protein, 199 aa, Homo sapiens
MVSRPPRTPLSPSSWTPAMGLRASRNCSRTENAVCGCSPGHFCIVQDGDHCAACRAYATSSPGQRVQKGGTESQDTLCQNCPPGTFSPNGTLEECQHQTKCSWLVTKAGAGTSSSHWVWWFLSGSLVIVIVCSTVGLIICVKRRKPRGDVVKVIVSVQRKRQEAEGEATVIEALQAPPDVTTVAVEETIPSFTGRSPNH

SEQ ID NO: 6819 - protein, 616 aa, Homo sapiens
MAPRARRRRPLFALLLLCALLARLQVALQIAPPCTSEKHYEHLGRCCNKCEPGKYMSSKCTTTSDSVCLPCGPDEYLDSWNEEDKCLLHKVCDTGKALVAVVAGNSTTPRRCACTAGYHWSQDCECCRRNTECAPGLGAQHPLQLNKDTVCKPCLAGYFSDAFSSTDKCRPWTNCTFLGKRVEHHGTEKSDAVCSSSLPARKPPNEPHVYLPGLIILLLFASVALVAAIIFGVCYRKKGKALTANLWHWINEACGRLSGDKESSGDSCVSTHTANFGQQGACEGVLLLTLEEKTFPEDMCYPDQGGVCQGTCVGGGPYAQGEDARMLSLVSKTEIEEDSFRQMPTEDEYMDRPSQPTDQLLFLTEPGSKSTPPFSEPLEVGENDSLSQCFTGTQSTVGSESCNCTEPLCRTDWTPMSSENYLQKEVDSGHCPHWAASPSPNWADVCTGCRNPPGEDCEPLVGSPKRGPLPQCAYGMGLPPEEEASRTEARDQPEDGADGRLPSSARAGAGSGSSPGGQSPASGNVTGNSNSTFISSGQVMNFKGDIIVVYVSQTSQEGAAAAAEPMGRPVQEETLARRDSFAGNGPRFPDPCGGPEGLREPEKASRPVQEQGGAKA

SEQ ID NO: 6820 - protein, 299 aa, Homo sapiens
MAPRARRRRPLFALLLLCALLARLQVALQIAPPCTSEKHYEHLGRCCNKCEPGKYMSSKCTTTSDSVCLPCGPDEYLDSWNEEDKCLLHKVCDTGKALVAVVAGNSTTPRRCACTAGYHWSQDCECCRRNTECAPGLGAQHPLQLNKDTVCKPCLAGYFSDAFSSTDKCRPWTNCTFLGKRVEHHGTEKSDAVCSSSLPARKPPNGNVTGNSNSTFISSGQVMNFKGDIIVVYVSQTSQEGAAAAAEPMGRPVQEETLARRDSFAGNGPRFPDPCGGPEGLREPEKASRPVQEQGGAKA

SEQ ID NO: 6821 - protein, 337 aa, Homo sapiens
MAPRARRRRPLFALLLLCALLARLQVALQIAPPCTSEKHYEHLGRCCNKCEPGKYMSSKCTTTSDSVCLPCGPDEYLDSWNEEDKCLLHKVCDTGKALVAVVAGNSTTPRRCACTAGYHWSQDCECCRRNTECAPGLGAQHPLQLNKDTVCKPCLAGYFSDAFSSTDKCRPWTNCTFLGKRVEHHGTEKSDAVCSSSLPARKPPNEPHVYLPGLIILLLFASVALVAAIIFGVCYRKKGKALTGNVTGNSNSTFISSGQVMNFKGDIIVVYVSQTSQEGAAAAAEPMGRPVQEETLARRDSFAGNGPRFPDPCGGPEGLREPEKASRPVQEQGGAKA

SEQ ID NO: 6822 - protein, 263 aa, Homo sapiens
MAPRARRRRPLFALLLLCALLARLQVALQIAPPCTSEKHYEHLGRCCNKCEPGKYMSSKCTTTSDSVCLPCGPDEYLDSWNEEDKCLLHKVCDTGKALVAVVAGNSTTPRRCACTAGYHWSQDCECCRRNTECAPGLGAQHPLQLNKDTVCKPCLAGYFSDAFSSTDKCRPWTNCTFLGKRVEHHGTEKSDAVCSSSLPARKPPNEPHVYLPGLIILLLFASVALVAAIIFGVCYRKKGKALTANLWHWINEACGRLSGDKEM

SEQ ID NO: 6823 - protein, 523 aa, Homo sapiens
MAPRARRRRPLFALLLLCALLARLQVALQIAPPCTSEKHYEHLGRCCNKCEPGKYMSSKCTTTSDSVCLPCGPDEYLDSWNEEDKCLLHKVCDTGKALVAVVAGNSTTPRRCACTAGYHWSQDCECCRRNTECAPGLGAQHPLQLNKDTVCKPCLAGYFSDAFSSTDKCRPWTNCTFLGKRVEHHGTEKSDAVCSSSLPARKPPNEPHVYLPGLIILLLFASVALVAAIIFGVCYRKKGKALTANLWHWINEACGRLSGDKESSGDSCVSTHTANFGQQGACEGVLLLTLEEKTFPEDMCYPDQGGVCQGTCVGGGPYAQGEDARMLSLVSKTEIEEDSFRQMPTEDEYMDRPSQPTDQLLFLTEPGSKSTPPFSEPLEVGENDSLSQCFTGTQSTVGSESCNCTEPLCRTDWTPMSSENYLQKEVDSGHCPHWAASPSPNWADVCTGCRNPPGEDCEPLVGSPKRGPLPQCAYGMGLPPEEEASRTEARDQPEDGADGRLPSSARAGAGSGSSPGGQSPASD

SEQ ID NO: 6824 - protein, 602 aa, Homo sapiens
MAPRARRRRPLFALLLLCALLARLQVALQIAPPCTSEKHYEHLGRCCNKCEPGKYMSSKCTTTSDSVCLPCGPDEYLDSWNEEDKCLLHKVCDTGKALVAVVAGNSTTPRRCACTAGYHWSQDCECCRRNTECAPGLGAQHPCYFSDAFSSTDKCRPWTNCTFLGKRVEHHGTEKSDAVCSSSLPARKPPNEPHVYLPGLIILLLFASVALVAAIIFGVCYRKKGKALTANLWHWINEACGRLSGDKESSGDSCVSTHTANFGQQGACEGVLLLTLEEKTFPEDMCYPDQGGVCQGTCVGGGPYAQGEDARMLSLVSKTEIEEDSFRQMPTEDEYMDRPSQPTDQLLFLTEPGSKSTPPFSEPLEVGENDSLSQCFTGTQSTVGSESCNCTEPLCRTDWTPMSSENYLQKEVDSGHCPHWAASPSPNWADVCTGCRNPPGEDCEPLVGSPKRGPLPQCAYGMGLPPEEEASRTEARDQPEDGADGRLPSSARAGAGSGSSPGGQSPASGNVTGNSNSTFISSGQVMNFKGDIIVVYVSQTSQEGAAAAAEPMGRPVQEETLARRDSFAGNGPRFPDPCGGPEGLREPEKASRPVQEQGGAKA

SEQ ID NO: 6825 - protein, 452 aa, Homo sapiens
MNSGILQVFQRELICPICMNYFIDPVTIDCGHSFCRPCFYLNWKDSPFLVQCSECTKSTGQINLKTNIHFKKMASLARKVSLWLFLSSEEQMCGTHRETKKMFCEVDRSLLCLLCSSSQEHRDHRHCPIESAAEEHQEKLLQKMQSLWEKACENHRNLNVETTRTRCWKDYVNLRLEAIRAEYQKMPAFHHEEEKHNLEMLKKKGKDIFHRLHLSKAKMAHRREILRGMYEELNEMCHKPDVELLQAFGDILHRSESVLLHMPQPLNPELSAGPITGLRDRLNQFRVHITLHHEEANSDIFLCEILRSMCIGCDHQDVPYFTATPRSFLAWGAQTFTSGKYYWEVHVGDSWNWAFGVCNMYWKEKNQNEKIDGEDGLFLLGCVKNDIQRSLFTTSPLLLQYIPRPTSRVGLFLDCEAKTVSFVDVNQSSLIYTIPNCSFSPPLRPIFCCIHF

SEQ ID NO: 6826 - protein, 562 aa, Homo sapiens
MDAMKRGLCCVLLLCGAVFVSPSQEIHARFRRGARSYQVICRDEKTQMIYQQHQSWLRPVLRSNRVEYCWCNSGRAQCHSVPVKSCSEPRCFNGGTCQQALYFSDFVCQCPEGFAGKCCEIDTRATCYEDQGISYRGTWSTAESGAECTNWNSSALAQKPYSGRRPDAIRLGLGNHNYCRNPDRDSKPWCYVFKAGKYSSEFCSTPACSEGNSDCYFGNGSAYRGTHSLTESGASCLPWNSMILIGKVYTAQNPSAQALGLGKHNYCRNPDGDAKPWCHVLKNRRLTWEYCDVPSCSTCGLRQYSQPQFRIKGGLFADIASHPWQAAIFAKHRRSPGERFLCGGILISSCWILSAAHCFQERFPPHHLTVILGRTYRVVPGEEEQKFEVEKYIVHKEFDDDTYDNDIALLQLKSDSSRCAQESSVVRTVCLPPADLQLPDWTECELSGYGKHEALSPFYSERLKEAHVRLYPSSRCTSQHLLNRTVTDNMLCAGDTRSGGPQANLHDACQGDSGGPLVCLNDGRMTLVGIISWGLGCGQKDVPGVYTKVTNYLDWIRDNMRP

SEQ ID NO: 6827 - protein, 291 aa, Homo sapiens
MDAMKRGLCCVLLLCGAVFVSPSQEIHARFRRGARSYQVICRDEKTQMIYQQHQSWLRPVLRSNRVEYCWCNSGRAQCHSVPVKSCSEPRCFNGGTCQQALYFSDFVCQCPEGFAGKCCEIDTRATCYEDQGISYRGTWSTAESGAECTNWNSSALAQKPYSGRRPDAIRLGLGNHNYCRNPDRDSKPWCYVFKAGKYSSEFCSTPACSEGNSDCYFGNGSAYRGTHSLTESGASCLPWNSMILIGKVYTAQNPSAQALGLGKHNYCRTGRSVSSPATASMRPCPLSIRSG

SEQ ID NO: 6828 - protein, 516 aa, Homo sapiens
MDAMKRGLCCVLLLCGAVFVSPSQEIHARFRRGARSYQGCSEPRCFNGGTCQQALYFSDFVCQCPEGFAGKCCEIDTRATCYEDQGISYRGTWSTAESGAECTNWNSSALAQKPYSGRRPDAIRLGLGNHNYCRNPDRDSKPWCYVFKAGKYSSEFCSTPACSEGNSDCYFGNGSAYRGTHSLTESGASCLPWNSMILIGKVYTAQNPSAQALGLGKHNYCRNPDGDAKPWCHVLKNRRLTWEYCDVPSCSTCGLRQYSQPQFRIKGGLFADIASHPWQAAIFAKHRRSPGERFLCGGILISSCWILSAAHCFQERFPPHHLTVILGRTYRVVPGEEEQKFEVEKYIVHKEFDDDTYDNDIALLQLKSDSSRCAQESSVVRTVCLPPADLQLPDWTECELSGYGKHEALSPFYSERLKEAHVRLYPSSRCTSQHLLNRTVTDNMLCAGDTRSGGPQANLHDACQGDSGGPLVCLNDGRMTLVGIISWGLGCGQKDVPGVYTKVTNYLDWIRDNMRP

SEQ ID NO: 6829 - protein, 395 aa, Homo sapiens
MASCRDEKTQMIYQQHQSWLRPVLRSNRVEYCWCNSGRAQCSEGNSDCYFGNGSAYRGTHSLTESGASCLPWNSMILIGKVYTAQNPSAQALGLGKHNYCRNPDGDAKPWCHVLKNRRLTWEYCDVPSCSTCGLRQYSQPQFRIKGGLFADIASHPWQAAIFAKHRRSPGERFLCGGILISSCWILSAAHCFQERFPPHHLTVILGRTYRVVPGEEEQKFEVEKYIVHKEFDDDTYDNDIALLQLKSDSSRCAQESSVVRTVCLPPADLQLPDWTECELSGYGKHEALSPFYSERLKEAHVRLYPSSRCTSQHLLNRTVTDNMLCAGDTRSGGPQANLHDACQGDSGGPLVCLNDGRMTLVGIISWGLGCGQKDVPGVYTKVTNYLDWIRDNMRP

SEQ ID NO: 6830 - protein, 589 aa, Homo sapiens
MRPLPGALGVAAAAALWLLLLLLPRTRADEHEHTYQDKEEVVLWMNTVGPYHNRQETYKYFSLPFCVGSKKSISHYHETLGEALQGVELEFSGLDIKFKDDVMPATYCEIDLDKEKRDAFVYAIKNHYWYQMYIDDLPIWGIVGEADENGEDYYLWTYKKLEIGFNGNRIVDVNLTSEGKVKLVPNTKIQMSYSVKWKKSDVKFEDRFDKYLDPSFFQHRIHWFSIFNSFMMVIFLVGLVSMILMRTLRKDYARYSKEEEMDDMDRDLGDEYGWKQVHGDVFRPSSHPLIFSSLIGSGCQIFAVSLIVIIVAMIEDLYTERGSMLSTAIFVYAATSPVNGYFGGSLYARQGGRRWIKQMFIGAFLIPAMVCGTAFFINFIAIYYHASRAIPFGTMVAVCCICFFVILPLNLVGTILGRNLSGQPNFPCRVNAVPRPIPEKKWFMEPAVIVCLGGILPFGSIFIEMYFIFTSFWAYKIYYVYGFMMLVLVILCIVTVCVTIVCTYFLLNAEDYRWQWTSFLSAASTAIYVYMYSFYYYFFKTKMYGLFQTSFYFGYMAVFSTALGIMCGAIGYMGTSAFVRKIYTNVKID

SEQ ID NO: 6831 - protein, 282 aa, Homo sapiens
MGSPGMVLGLLVQIWALQEASSLSVQQGPNLLQVRQGSQATLVCQVDQATAWERLRVKWTKDGAILCQPYITNGSLSLGVCGPQGRLSWQAPSHLTLQLDPVSLNHSGAYVCWAAVEIPELEEAEGNITRLFVDPDDPTQNRNRIASFPGFLFVLLGVGSMGVAAIVWGAWFWGRRSCQQRDSGNSPGNAFYSNVLYRPRGAPKKSEDCSGEGKDQRGQSIYSTSFPQPAPRQPHLASRPCPSPRPCPSPRPGHPVSMVRVSPRPSPTQQPRPKGFPKVGEE

SEQ ID NO: 6832 - protein, 278 aa, Homo sapiens
MGSPGMVLGLLVQIWALQEASSLSVQQGPNLLQVRQGSQATLVCQVDQATAWERLRVKWTKDGAILCQPYITNGSLSLGVCGPQGRLSWQAPSHLTLQLDPVSLNHSGAYVCWAAVEIPELEEAEGNITRLFVDPDDPTQNRNRIASFPGFLFVLLGVGSMGVAAIVWGAWFWGRRSCQQRDSGNAFYSNVLYRPRGAPKKSEDCSGEGKDQRGQSIYSTSFPQPAPRQPHLASRPCPSPRPCPSPRPGHPVSMVRVSPRPSPTQQPRPKGFPKVGEE

SEQ ID NO: 6833 - protein, 171 aa, Homo sapiens
MEKRLQEAQLYKEEGNQRYREGKYRDAVSRYHRALLQLRGLDPSLPSPLPNLGPQGPALTPEQENILHTTQTDCYNNLAACLLQMEPVNYERVREYSQKVLERQPDNAKALYRAGVAFFHLQDYDQARHYLLAAVNRQPKDANVRRYLQLTQSELSSYHRKEKQLYLGMFG

SEQ ID NO: 6834 - protein, 215 aa, Homo sapiens
MLNKEEELELLEALWSFSTSPAHSLLLPGRGGAGPIERRKPVSQAFSRPQQFLSRALLEFFGKSHPPPHRLFRKSLNVGLHYSHIPFLTTCLHFLRKRLQKGEVGLSVETSKPQVPVGGLSRKKVPQEPWATVMEKRLQEAQLYKEEGNQRYREGKYRDAVSRYHRALLQLRGLDPSLPSPLPNLGPQGPALTPEQENILHTTQTDCYNNLAVVK

SEQ ID NO: 6835 - protein, 665 aa, Homo sapiens
MAGLSGAQIPDGEFTALVYRLIRDARYAEAVQLLGRELQRSPRSRAGLSLLGYCYYRLQEFALAAECYEQLGQLHPELEQYRLYQAQALYKACLYPEATRVAFLLLDNPAYHSRVLRLQAAIKYSEGDLPGSRSLVEQLLSGEGGEESGGDNETDGQVNLGCLLYKEGQYEAACSKFSATLQASGYQPDLSYNLALAYYSSRQYASALKHIAEIIERGIRQHPELGVGMTTEGFDVRSVGNTLVLHQTALVEAFNLKAAIEYQLRNYEVAQETLTDMPPRAEEELDPVTLHNQALMNMDARPTEGFEKLQFLLQQNPFPPETFGNLLLLYCKYEYFDLAADVLAENAHLTYKFLTPYLYDFLDALITCQTAPEEAFIKLDGLAGMLTEQLRRLTKQVQEARHNRDDEAIKKAVNEYDETMEKYIPVLMAQAKIYWNLENYPMVEKVFRKSVEFCNDHDVWKLNVAHVLFMQENKYKEAIGFYEPIVKKHYDNILNVSAIVLANLCVSYIMTSQNEEAEELMRKIEKEEEQLSYDDPNRKMYHLCIVNLVIGTLYCAKGNYEFGISRVIKSLEPYNKKLGTDTWYYAKRCFLSLLENMSKHMIVIHDSVIQECVQFLGHCELYGTNIPAVIEQPLEEERMHVGKNTVTDESRQLKALIYEIIGWNK

SEQ ID NO: 6836 - protein, 913 aa, Homo sapiens
MAALFLRGFVQIGNCKTGISKSKEAFIEAVERKKKDRLVLYFKSGKYSTFRLSDNIQNVVLKSYRGNQNHLHLTLQNNNGLFIEGLSSTDAEQLKIFLDRVHQNEVQPPVRPGKGGSVFSSTTQKEINKTSFHKVDEKSSSKSFEIAKGSGTGVLQRMPLLTSKLTLTCGELSENQHKKRKRMLSSSSEMNEEFLKENNSVEYKKSKADCSRCVSYNREKQLKLKELEENKKLECESSCIMNATGNPYLDDIGLLQALTEKMVLVFLLQQGYSDGYTKWDKLKLFFELFPEKICHGLPNLGNTCYMNAVLQSLLSIPSFADDLLNQSFPWGKIPLNALTMCLARLLFFKDTYNIEIKEMLLLNLKKAISAAAEIFHGNAQNDAHEFLAHCLDQLKDNMEKLNTIWKPKSEFGEDNFPKQVFADDPDTSGFSCPVITNFELELLHSIACKACGQVILKTELNNYLSINLPQRIKAHPSSIQSTFDLFFGAEELEYKCAKCEHKTSVGVHSFSRLPRILIVHLKRYSLNEFCALKKNDQEVIISKYLKVSSHCNEGTRPPLPLSEDGEITDFQLLKVIRKMTSGNISVSWPATKESKDILAPHIGSDKESEQKKGQTVFKGASRRQQQKYLGKNSKPNELESVYSGDRAFIEKEPLAHLMTYLEDTSLCQFHKAGGKPASSPGTPLSKVDFQTVPENPKRKKYVKTSKFVAFDRIINPTKDLYEDKNIRIPERFQKVSEQTQQCDGMRICEQAPQQALPQSFPKPGTQGHTKNLLRPTKLNLQKSNRNSLLALGSNKNPRNKDILDKIKSKAKETKRNDDKGDHTYRLISVVSHLGKTLKSGHYICDAYDFEKQIWFTYDDMRVLGIQEAQMQEDRRCTGYIFFYMHNEIFEEMLKREENAQLNSKEVEETLQKE

SEQ ID NO: 6837 - protein, 307 aa, Homo sapiens
MGGLTASDVHPTLGVQLFSAGIAACLADVITFPLDTAKVRLQVQGECPTSSVIRYKGVLGTITAVVKTEGRMKLYSGLPAGLQRQISSASLRIGLYDTVQEFLTAGKETAPSLGSKILAGLTTGGVAVFIGQPTEVVKVRLQAQSHLHGIKPRYTGTYNAYRIIATTEGLTGLWKGTTPNLMRSVIINCTELVTYDLMKEAFVKNNILADDVPCHLVSALIAGFCATAMSSPVDVVKTRFINSPPGQYKSVPNCAMKVFTNEGPTAFFKGLVPSFLRLGSWNVIMFVCFEQLKRELSKSRQTMDCAT

SEQ ID NO: 6838 - protein, 238 aa, Homo sapiens
MAQQQMTSSQKALMLELKSLQEEPVEGFRITLVDESDLYNWEVAIFGPPNTLYEGGYFKAHIKFPIDYPYSPPTFRFLTKMWHPNIYENGDVCISILHPPVDDPQSGELPSERWNPTQNVRTILLSVISLLNEPNTFSPANVDASVMFRKWRDSKGKDKEYAEIIRKQVSATKAEAEKDGVKVPTTLAEYCIKTKVPSNDNSSDLLYDDLYDDDIDDEDEEEEDADCYDDDDSGNEES

SEQ ID NO: 6839 - protein, 530 aa, Homo sapiens
MEDDSLYLGGEWQFNHFSKLTSSRPDAAFAEIQRTSLPEKSPLSCETRVDLCDDLAPVARQLAPREKLPLSSRRPAAVGAGLQNMGNTCYVNASLQCLTYTPPLANYMLSREHSQTCHRHKGCMLCTMQAHITRALHNPGHVIQPSQALAAGFHRGKQEDAHEFLMFTVDAMKKACLPGHKQVDHHSKDTTLIHQIFGGYWRSQIKCLHCHGISDTFDPYLDIALDIQAAQSVQQALEQLVKPEELNGENAYHCGVCLQRAPASKTLTLHTSAKVLILVLKRFSDVTGNKIAKNVQYPECLDMQPYMSQTNTGPLVYVLYAVLVHAGWSCHNGHYFSYVKAQEGQWYKMDDAEVTASSITSVLSQQAYVLFYIQKSEWERHSESVSRGREPRALGAEDTDRRATQGELKRDHPCLQAPELDEHLVERATQESTLDHWKFLQEQNKTKPEFNVRKVEGTLPPDVLVIHQSKYKCGMKNHHPEQQSSLLNLSSTTPTHQESMNTGTLASLRGRARRSKGKNKHSKRALLVCQ

SEQ ID NO: 6840 - protein, 1123 aa, Homo sapiens
MPIVDKLKEALKPGRKDSADDGELGKLLASSAKKVLLQKIEFEPASKSFSYQLEALKSKYVLLNPKTEGASRHKSGDDPPARRQGSEHTYESCGDGVPAPQKVLFPTERLSLRWERVFRVGAGLHNLGNTCFLNATIQCLTYTPPLANYLLSKEHARSCHQGSFCMLCVMQNHIVQAFANSGNAIKPVSFIRDLKKIARHFRFGNQEDAHEFLRYTIDAMQKACLNGCAKLDRQTQATTLVHQIFGGYLRSRVKCSVCKSVSDTYDPYLDVALEIRQAANIVRALELFVKADVLSGENAYMCAKCKKKVPASKRFTIHRTSNVLTLSLKRFANFSGGKITKDVGYPEFLNIRPYMSQNNGDPVMYGLYAVLVHSGYSCHAGHYYCYVKASNGQWYQMNDSLVHSSNVKVVLNQQAYVLFYLRIPGSKKSPEGLISRTGSSSLPGRPSVIPDHSKKNIGNGIISSPLTGKRQDSGTMKKPHTTEEIGVPISRNGSTLGLKSQNGCIPPKLPSGSPSPKLSQTPTHMPTILDDPGKKVKKPAPPQHFSPRTAQGLPGTSNSNSSRSGSQRQGSWDSRDVVLSTSPKLLATATANGHGLKGNDESAGLDRRGSSSSSPEHSASSDSTKAPQTPRSGAAHLCDSQETNCSTAGHSKTPPSGADSKTVKLKSPVLSNTTTEPASTMSPPPAKKLALSAKKASTLWRATGNDLRPPPPSPSSDLTHPMKTSHPVVASTWPVHRARAVSPAPQSSSRLQPPFSPHPTLLSSTPKPPGTSEPRSCSSISTALPQVNEDLVSLPHQLPEASEPPQSPSEKRKKTFVGEPQRLGSETRLPQHIREATAAPHGKRKRKKKKRPEDTAASALQEGQTQRQPGSPMYRREGQAQLPAVRRQEDGTQPQVNGQQVGCVTDGHHASSRKRRRKGAEGLGEEGGLHQDPLRHSCSPMGDGDPEAMEESPRKKKKKKRKQETQRAVEEDGHLKCPRSAKPQDAVVPESSSCAPSANGWCPGDRMGLSQAPPVSWNGERESDVVQELLKYSSDKAYGRKVLTWDGKMSAVSQDAIEDSRQARTETVVDDWDEEFDRGKEKKIKKFKREKRRNFNAFQKLQTRRNFWSVTHPAKAASLSYRR

SEQ ID NO: 6841 - protein, 712 aa, Homo sapiens
MLAMDTCKHVGQLQLAQDHSSLNPQKWHCVDCNTTESIWACLSCSHVACGRYIEEHALKHFQESSHPVALEVNEMYVFCYLCDDYVLNDNTTGDLKLLRRTLSAIKSQNYHCTTRSGRFLRSMGTGDDSYFLHDGAQSLLQSEDQLYTALWHRRRILMGKIFRTWFEQSPIGRKKQEEPFQEKIVVKREVKKRRQELEYQVKAELESMPPRKSLRLQGLAQSTIIEIVSVQVPAQTPASPAKDKVLSTSENEISQKVSDSSVKRRPIVTPGVTGLRNLGNTCYMNSVLQVLSHLLIFRQCFLKLDLNQWLAMTASEKTRSCKHPPVTDTVVYQMNECQEKDTGFVCSRQSSLSSGLSGGASKGRKMELIQPKEPTSQYISLCHELHTLFQVMWSGKWALVSPFAMLHSVWRLIPAFRGYAQQDAQEFLCELLDKIQRELETTGTSLPALIPTSQRKLIKQVLNVVNNIFHGQLLSQVTCLACDNKSNTIEPFWDLSLEFPERYQCSGKDIASQPCLVTEMLAKFTETEALEGKIYVCDQCNSKRRRFSSKPVVLTEAQKQLMICHLPQVLRLHLKRFRWSGRNNREKIGVHVGFEEILNMEPYCCRETLKSLRPECFIYDLSAVVMHHGKGFGSGHYTAYCYNSEGGFWVHCNDSKLSMCTMDEVCKAQAYILFYTQRVTENGHSKLLPPELLLGSQHPNEDADTSSNEILS

SEQ ID NO: 6842 - protein, 523 aa, Homo sapiens
MAGQRVLLLVGFLLPGVLLSEAAKILTISTVGGSHYLLMDRVSQILQDHGHNVTMLNHKRGPFMPDFKKEEKSYQVISWLAPEDHQREFKKSFDFFLEETLGGRGKFENLLNVLEYLALQCSHFLNRKDIMDSLKNENFDMVIVETFDYCPFLIAEKLGKPFVAILSTSFGSLEFGLPIPLSYVPVFRSLLTDHMDFWGRVKNFLMFFSFCRRQQHMQSTFDNTIKEHFTEGSRPVLSHLLLKAELWFINSDFAFDFARPLLPNTVYVGGLMEKPIKPVPQDLENFIAKFGDSGFVLVTLGSMVNTCQNPEIFKEMNNAFAHLPQGVIWKCQCSHWPKDVHLAANVKIVDWLPQSDLLAHPSIRLFVTHGGQNSIMEAIQHGVPMVGIPLFGDQPENMVRVEAKKFGVSIQLKKLKAETLALKMKQIMEDKRYKSAAVAASVILRSHPLSPTQRLVGWIDHVLQTGGATHLKPYVFQQPWHEQYLLDVFVFLLGLTLGTLWLCGKLLGMAVWWLRGARKVKET

SEQ ID NO: 6843 - protein, 489 aa, Homo sapiens
MAGQRVLLLVGFLLPGVLLSEAAKILTISTVDFKKEEKSYQVISWLAPEDHQREFKKSFDFFLEETLGGRGKFENLLNVLEYLALQCSHFLNRKDIMDSLKNENFDMVIVETFDYCPFLIAEKLGKPFVAILSTSFGSLEFGLPIPLSYVPVFRSLLTDHMDFWGRVKNFLMFFSFCRRQQHMQSTFDNTIKEHFTEGSRPVLSHLLLKAELWFINSDFAFDFARPLLPNTVYVGGLMEKPIKPVPQDLENFIAKFGDSGFVLVTLGSMVNTCQNPEIFKEMNNAFAHLPQGVIWKCQCSHWPKDVHLAANVKIVDWLPQSDLLAHPSIRLFVTHGGQNSIMEAIQHGVPMVGIPLFGDQPENMVRVEAKKFGVSIQLKKLKAETLALKMKQIMEDKRYKSAAVAASVILRSHPLSPTQRLVGWIDHVLQTGGATHLKPYVFQQPWHEQYLLDVFVFLLGLTLGTLWLCGKLLGMAVWWLRGARKVKET

SEQ ID NO: 6844 - protein, 553 aa, Homo sapiens
MDVDKELGMESVKAGASGKPEMRLGTQEETSEGDANESSLLVLSSNVPLLALEFLEIAQAKEKAFLPMVSHTFHMRTEESDASQEGDDLPKSSANTSHPKQDDSPKSSEETIQPKEGDIPKAPEETIQSKKEDLPKSSEKAIQPKESNIPKSSAKPIQPKLGNIPKASVKPSQPKEGDIPKAPEETIQSKKEDLPKSSEEAIQPKEGDIPKSSAKPIQPKLGNIAKTSVKPSQPKESDIPKSPEETIQPKEGDIPKSSAKPIQPKLGNIPKASVKPSQPKEGDISKSPEEAIQPKEGDLPKSLEEAIQPKEGDIPKSPEEAIQPKEGDIPKSLEEAIQPKEGDIPKSPEETIQPKKGDIPKSPEEAIQPKEGDIPKSPKQAIQPKEGDIPKSLEEAIPPKEIDIPKSPEETIQPKEDDSPKSLEEATPSKEGDILKPEEETMEFPEGDKVKVILSKEDFEASLKEAGERLVAVDFSATWCGPCRTIRPFFHALSVKHEDVVFLEVDADNCEEVVRECAIMCVPTFQFYKKEEKVDELCGALKEKLEAVIAELK

SEQ ID NO: 6845 - protein, 486 aa, Homo sapiens
MVSHTFHMRTEESDASQEGDDLPKSSANTSHPKQDDSPKSSEETIQPKEGDIPKAPEETIQSKKEDLPKSSEKAIQPKESNIPKSSAKPIQPKLGNIPKASVKPSQPKEGDIPKAPEETIQSKKEDLPKSSEEAIQPKEGDIPKSSAKPIQPKLGNIAKTSVKPSQPKESDIPKSPEETIQPKEGDIPKSSAKPIQPKLGNIPKASVKPSQPKEGDISKSPEEAIQPKEGDLPKSLEEAIQPKEGDIPKSPEEAIQPKEGDIPKSLEEAIQPKEGDIPKSPEETIQPKKGDIPKSPEEAIQPKEGDIPKSPKQAIQPKEGDIPKSLEEAIPPKEIDIPKSPEETIQPKEDDSPKSLEEATPSKEGDILKPEEETMEFPEGDKVKVILSKEDFEASLKEAGERLVAVDFSATWCGPCRTIRPFFHALSVKHEDVVFLEVDADNCEEVVRECAIMCVPTFQFYKKEEKVDELCGALKEKLEAVIAELK

SEQ ID NO: 6846 - protein, 538 aa, Homo sapiens
MDVDKELGMESVKAGASGKPEMRLGTQEETSEGDANESSLLVLSSNVPLLALEFLEIAQAKEKAFLPMVSHTFHMRTEESDASQEGDDLPKSSANTSHPKQDDSPKSSEETIQPKEGDIPKAPEETIQSKKEDLPKSSEKAIQPKESNIPKSSAKPIQPKLGNIPKASVKPSQPKEGDIPKAPEETIQSKKEDLPKSSEEAIQPKEGDIPKSSAKPIQPKLGNIAKTSVKPSQPKESDIPKSPEETIQPKEGDIPKSSAKPIQPKLGNIPKASVKPSQPKEGDISKSPEEAIQPKEGDLPKSLEEAIQPKEGDIPKSLEEAIQPKEGDIPKSPEETIQPKKGDIPKSPEEAIQPKEGDIPKSPKQAIQPKEGDIPKSLEEAIPPKEIDIPKSPEETIQPKEDDSPKSLEEATPSKEGDILKPEEETMEFPEGDKVKVILSKEDFEASLKEAGERLVAVDFSATWCGPCRTIRPFFHALSVKHEDVVFLEVDADNCEEVVRECAIMCVPTFQFYKKEEKVDELCGALKEKLEAVIAELK

SEQ ID NO: 6847 - protein, 119 aa, Homo sapiens
MSLLEAFAFSSWALGLGLSKVEQFQLSISTEVKKSIDIPCKISSTRFETDVIHWYRQKPNQALEHLIYIVSTKSAARRSMGKTSNKVEARKNSQTLTSILTIKSVEKEDMAVYYCAAWD

SEQ ID NO: 6848 - protein, 475 aa, Homo sapiens
MSATAAARKRGKPASGAGAGAGAGKRRRKADSAGDRGKSKGGGKMNEEISSDSESESLAPRKPEEEEEEELEETAQEKKLRLAKLYLEQLRQQEEEKAEARAFEEDQVAGRLKEDVLEQRGRLQKLVAKEIQAPASADIRVLRGHQLSITCLVVTPDDSAIFSAAKDCSIIKWSVESGRKLHVIPRAKKGAEGKPPGHSSHVLCMAISSDGKYLASGDRSKLILIWEAQSCQHLYTFTGHRDAVSGLAFRRGTHQLYSTSHDRSVKVWNVAENSYVETLFGHQDAVAALDALSRECCVTAGGRDGTVRVWKIPEESQLVFYGHQGSIDCIHLINEEHMVSGADDGSVALWGLSKKRPLALQREAHGLRGEPGLEQPFWISSVAALLNTDLVATGSHSSCVRLWQCGEGFRQLDLLCDIPLVGFINSLKFSSSGDFLVAGVGQEHRLGRWWRIKEARNSVCIIPLRRVPVPPAAGS

SEQ ID NO: 6849 - protein, 530 aa, Homo sapiens
MACTGWTSPLPLCVCLLLTCGFAEAGKLLVVPMDGSHWFTMRSVVEKLILRGHEVVVVMPEVSWQLGRSLNCTVKTYSTSYTLEDLDREFKAFAHAQWKAQVRSIYSLLMGSYNDIFDLFFSNCRSLFKDKKLVEYLKESSFDAVFLDPFDNCGLIVAKYFSLPSVVFARGILCHYLEEGAQCPAPLSYVPRILLGFSDAMTFKERVRNHIMHLEEHLLCHRFFKNALEIASEILQTPVTEYDLYSHTSIWLLRTDFVLDYPKPVMPNMIFIGGINCHQGKPLPMEFEAYINASGEHGIVVFSLGSMVSEIPEKKAMAIADALGKIPQTVLWRYTGTRPSNLANNTILVKWLPQNDLLGHPMTRAFITHAGSHGVYESICNGVPMVMMPLFGDQMDNAKRMETKGAGVTLNVLEMTSEDLENALKAVINDKSYKENIMRLSSLHKDRPVEPLDLAVFWVEFVMRHKGAPHLRPAAHDLTWYQYHSLDVIGFLLAVVLTVAFITFKCCAYGYRKCLGKKGRVKKAHKSKTH

SEQ ID NO: 6850 - protein, 441 aa, Homo sapiens
MACTGWTSPLPLCVCLLLTCGFAEAGKLLVVPMDGSHWFTMRSVVEKLILRGHEVVVVMPEVSWQLGRSLNCTVKTYSTSYTLEDLDREFKAFAHAQWKAQVRSIYSLLMGSYNDIFDLFFSNCRSLFKDKKLVEYLKESSFDAVFLDPFDNCGLIVAKYFSLPSVVFARGILCHYLEEGAQCPAPLSYVPRILLGFSDAMTFKERVRNHIMHLEEHLLCHRFFKNALEIASEILQTPVTEYDLYSHTSIWLLRTDFVLDYPKPVMPNMIFIGGINCHQGKPLPMEFEAYINASGEHGIVVFSLGSMVSEIPEKKAMAIADALGKIPQTVLWRYTGTRPSNLANNTILVKWLPQNDLLGHPMTRAFITHAGSHGVYESICNGVPMVMMPLFGDQMDNAKRMETKGAGVTLNVLEMTSEDLENALKAVINDKRKKQQSGRQM

SEQ ID NO: 6851 - protein, 1495 aa, Homo sapiens
MGDTAKPYFVKRTKDRGTMDDDDFRRGHPQQDYLIIDDHAKGHGSKMEKGLQKKKITPGNYGNTPRKGPCAVSSNPYAFKNPIYSQPAWMNDSHKDQSKRWLSDEHTGNSDNWREFKPGPRIPVINRQRKDSFQENEDGYRWQDTRGCRTVRRLFHKDLTSLETTSEMEAGSPENKKQRSRPRKPRKTRNEENEQDGDLEGPVIDESVLSTKELLGLQQAEERLKRDCIDRLKRRPRNYPTAKYTCRLCDVLIESIAFAHKHIKEKRHKKNIKEKQEEELLTTLPPPTPSQINAVGIAIDKVVQEFGLHNENLEQRLEIKRIMENVFQHKLPDCSLRLYGSSCSRLGFKNSDVNIDIQFPAIMSQPDVLLLVQECLKNSDSFIDVDADFHARVPVVVCREKQSGLLCKVSAGNENACLTTKHLTALGKLEPKLVPLVIAFRYWAKLCSIDRPEEGGLPPYVFALMAIFFLQQRKEPLLPVYLGSWIEGFSLSKLGNFNLQDIEKDVVIWEHTDSAAGDTGITKEEAPRETPIKRGQVSLILDVKHQPSVPVGQLWVELLRFYALEFNLADLVISIRVKELVSRELKDWPKKRIAIEDPYSVKRNVARTLNSQPVFEYILHCLRTTYKYFALPHKITKSSLLKPLNAITCISEHSKEVINHHPDVQTKDDKLKNSVLAQGPGATSSAANTCKVQPLTLKETAESFGSPPKEEMGNEHISVHPENSDCIQADVNSDDYKGDKVYHPETGRKNEKEKVGRKGKHLLTVDQKRGEHVVCGSTRNNESESTLDLEGFQNPTAKECEGLATLDNKADLDGESTEGTEELEDSLNHFTHSVQGQTSEMIPSDEEEEDDEEEEEEEEPRLTINQREDEDGMANEDELDNTYTGSGDEDALSEEDDELGEAAKYEDVKECGKHVERALLVELNKISLKEENVCEEKNSPVDQSDFFYEFSKLIFTKGKSPTVVCSLCKREGHLKKDCPEDFKRIQLEPLPPLTPKFLNILDQVCIQCYKDFSPTIIEDQAREHIRQNLESFIRQDFPGTKLSLFGSSKNGFGFKQSDLDVCMTINGLETAEGLDCVRTIEELARVLRKHSGLRNILPITTAKVPIVKFFHLRSGLEVDISLYNTLALHNTRLLSAYSAIDPRVKYLCYTMKVFTKMCDIGDASRGSLSSYAYTLMVLYFLQQRNPPVIPVLQEIYKGEKKPEIFVDGWNIYFFDQIDELPTYWSECGKNTESVGQLWLGLLRFYTEEFDFKEHVISIRRKSLLTTFKKQWTSKYIVIEDPFDLNHNLGAGLSRKMTNFIMKAFINGRRVFGIPVKGFPKDYPSKMEYFFDPDVLTEGELAPNDRCCRICGKIGHFMKDCPMRRKVRRRRDQEDALNQRYPENKEKRSKEDKEIHNKYTEREVSTKEDKPIQCTPQKAKPMRAAADLGREKILRPPVEKWKRQDDKDLREKRCFICGREGHIKKECPQFKGSSGSLSSKYMTQGKASAKRTQQES

SEQ ID NO: 6852 - protein, 615 aa, Homo sapiens
MGDTAKPYFVKRTKDRGTMDDDDFRRGHPQQDYLIIDDHAKGHGSKMEKGLQKKKITPGNYGNTPRKGPCAVSSNPYAFKNPIYSQPAWMNDSHKDQSKRWLSDEHTGNSDNWREFKPGPRIPVINRQRKDSFQENEDGYRWQDTRGCRTVRRLFHKDLTSLETTSEMEAGSPENKKQRSRPRKPRKTRNEENEQDGDLEGPVIDESVLSTKELLGLQQAEERLKRDCIDRLKRRPRNYPTAKYTCRLCDVLIESIAFAHKHIKEKRHKKNIKEKQEEELLTTLPPPTPSQINAVGIAIDKVVQEFGLHNENLEQRLEIKRIMENVFQHKLPDCSLRLYGSSCSRLGFKNSDVNIDIQFPAIMSQPDVLLLVQECLKNSDSFIDVDADFHARVPVVVCREKQSGLLCKVSAGNENACLTTKHLTALGKLEPKLVPLVIAFRYWAKLCSIDRPEEGGLPPYVFALMAIFFLQQRKEPLLPVYLGSWIEGFSLSKLGNFNLQDIEKDVVIWEHTDSAAGDTGITKEEAPRETPIKRGQVSLILDVKHQPSVPVGQLWVELLRFYALEFNLADLVISIRVKELVSRELKDWPKKRIAIEGISKCLSYSPPLFFLKVPV

SEQ ID NO: 6853 - protein, 544 aa, Homo sapiens
MGDTAKPYFVKRTKDRGTMDDDDFRRGHPQQDYLIIDDHAKGHGSKMEKGLQKKKITPGNYGNTPRKGPCAVSSNPYAFKNPIYSQPAWMNDSHKDQSKRWLSDEHTGNSDNWREFKPGPRIPVINRQRKDSFQENEDGYRWQDTRGCRTVRRLFHKDLTSLETTSEMEAGSPENKKQRSRPRKPRKTRNEENEQDGDLEGPVIDESVLSTKELLGLQQAEERLKRDCIDRLKRRPRNYPTAKYTCRLCDVLIESIAFAHKHIKEKRHKKNIKEKQEEELLTTLPPPTPSQINAVGIAIDKVVQEFGLHNENLEQRLEIKRIMENVFQHKLPDCSLRLYGSSCSRLGFKNSDVNIDIQFPAIMSQPDVLLLVQECLKNSDSFIDVDADFHARVPVVVCREKQSGLLCKVSAGNENACLTTKHLTALGKLEPKLVPLVIAFRYWAKLCSIDRPEEGGLPPYVFALMAIFFLQQRKEPLLPVYLGSWIEGFSLSKLGNFNLQDIEKDVVIWEHTDSAAGDTGITKEEAPRETPIKRGQVVSSLLCR

SEQ ID NO: 6854 - protein, 1259 aa, Homo sapiens
MGDTAKPYFVKRTKDRGTMDDDDFRRGHPQQDYLIIDDHAKGHGSKMEKGLQKKKITPGNYGNTPRKGPCAVSSNPYAFKNPIYSQPAWMNDSHKDQSKRWLSDEHTGNSDNWREFKPGPRIPVINRQRKDSFQENEDGYRWQDTRGCRTVRRLFHKDLTSLETTSEMEAGSPENKKQRSRPRKPRKTRNEENEQDGDLEGPVIDESVLSTKELLGLQQAEERLKRDCIDRLKRRPRNYPTAKYTCRLCDVLIESIAFAHKHIKEKRHKKNIKEKQEEELLTTLPPPTPSQINAVGIAIDKVVQEFGLHNENLEQRLEIKRIMENVFQHKLPDCSLRLYGSSCSRLGFKNSDVNIDIQFPAIIEGFSLSKLGNFNLQDIEKDVVIWEHTDSAAGDTGITKEEAPRETPIKRGQVSLILDVKHQPSVPVGQLWVELLRFYALEFNLADLVISIRVKELVSRELKDWPKKRIAIEDPYSVKRNVARTLNSQPVFEYILHCLRTTYKYFALPHKITKSSLLKPLNAITCISEHSKEVINHHPDVQTKDDKLKNSVLAQGPGATSSAANTCKVQPLTLKETAESFGSPPKEEMGNEHISVHPENSDCIQADVNSDDYKGDKVYHPETGRKNEKEKVGRKGKHLLTVDQKRGEHVVCGSTRNNESESTLDLEGFQNPTAKECEGLATLDNKADLDGESTEGTEELEDSLNHFTHSVQGQTSEMIPSDEEEEDDEEEEEEEEPRLTINQREDEDGMANEDELDNTYTGSGDEDALSEEDDELGEAAKYEDVKECGKHVERALLVELNKISLKEENVCEEKNSPVDQSDFFYEFSKLIFTKGKGLDCVRTIEELARVLRKHSGLRNILPITTAKVPIVKFFHLRSGLEVDISLYNTLALHNTRLLSAYSAIDPRVKYLCYTMKVFTKMCDIGDASRGSLSSYAYTLMVLYFLQQRNPPVIPVLQEIYKGEKKPEIFVDGWNIYFFDQIDELPTYWSECGKNTESVGQLWLGLLRFYTEEFDFKEHVISIRRKSLLTTFKKQWTSKYIVIEDPFDLNHNLGAGLSRKMTNFIMKAFINGRRVFGIPVKGFPKDYPSKMEYFFDPDVLTEGELAPNDRCCRICGKIGHFMKDCPMRRKVRRRRDQEDALNQRYPENKEKRSKEDKEIHNKYTEREVSTKEDKPIQCTPQKAKPMRAAADLGREKILRPPVEKWKRQDDKDLREKRCFICGREGHIKKECPQFKGSSGSLSSKYMTQGKASAKRTQQES

SEQ ID NO: 6855 - protein, 412 aa, Homo sapiens
MGDTAKPYFVKRTKDRGTMDDDDFRRGHPQQDYLIIDDHAKGHGSKMEKGLQKKKITPGNYGNTPRKGPCAVSSNPYAFKNPIYSQPAWMNDSHKDQSKRWLSDEHTGNSDNWREFKPGPRIPVINRQRKDSFQENEDGYRWQDTRGCRTVRRLFHKDLTSLETTSEMEAGSPENKKQRSRPRKPRKTRNEENEQDGDLEGPVIDESVLSTKELLGLQQAEERLKRDCIDRLKRRPRNYPTAKYTCRLCDVLIESIAFAHKHIKEKRHKKNIKEKQEEELLTTLPPPTPSQINAVGIAIDKVVQEFGLHNENLEQRLEIKRIMENVFQHKLPDCSLRLYGSSCSRLGFKNSDVNIDIQFPAIMSQPDVLLLVQECLKNSDSFIDVDADFHARVPVVVCREKQRSHFFKLFIY

SEQ ID NO: 6856 - protein, 1457 aa, Homo sapiens
MGDTAKPYFVKRTKDRGTMDDDDFRRGHPQQDYLIIDDHAKGHGSKMEKGLQKKKITPGNYGNTPRKGPCAVSSNPYAFKNPIYSQPAWMNDSHKDQSKRWLSDEHTGNSDNWREFKPGPRIPVINRQRKDSFQENEDGYRWQDTRGCRTVRRLFHKDLTSLETTSEMEAGSPENKKQRSRPRKPRKTRNEENEQDGDLEGPVIDESVLSTKELLGLQQAEERLKRDCIDRLKRRPRNYPTAKYTCRLCDVLIESIAFAHKHIKEKRHKKNIKEKQEEELLTTLPPPTPSQINAVGIAIDKVVQEFGLHNENLEQRLEIKRIMENVFQHKLPDCSLRLYGSSCSRLGFKNSDVNIDIQFPAIMSQPDVLLLVQECLKNSDSFIDVDADFHARVPVVVCREKQSGLLCKVSAGNENACLTTKHLTALGKLEPKLVPLVIAFRYWAKLCSIDRPEEGGLPPYVFALMAIFFLQQRKEPLLPVYLGSWIEGFSLSKLGNFNLQDIEKDVVIWEHTDSAAGDTGITKEEAPRETPIKRGQVSLILDVKHQPSVPVGQLWVELLRFYALEFNLADLVISIRVKELVSRELKDWPKKRIAIEDPYSVKRNVARTLNSQPVFEYILHCLRTTYKYFALPHKITKSSLLKPLNAITCISEHSKEVINHHPDVQTKDDKLKNSVLAQGPGATSSAANTCKVQPLTLKETAESFGSPPKEEMGNEHISVHPENSDCIQADVNSDDYKGDKVYHPETGRKNEKEKVGRKGKHLLTVDQKRGEHVVCGSTRNNESESTLDLEGFQNPTAKECEGLATLDNKADLDGESTEGTEELEDSLNHFTHSVQGQTSEMIPSDEEEEDDEEEEEEEEPRLTINQREDEDGMANEDELDNTYTGSGDEDALSEEDDELGEAAKYEDVKECGKHVERALLVELNKISLKEENVCEEKNSPVDQSDFFYEFSKLIFTKGKSPTVVCSLCKREGHLKKDCPEDFKRIQLEPLPPLTPKFLNILDQVCIQCYKDFSPTIIEDQAREHIRQNLESFIRQDFPGTKLSLFGSSKNGFGFKQSDLDVCMTINGLETAEGLDCVRTIEELARVLRKHSGLRNILPITTAKVPIVKFFHLRSGLEVDISLYNTLALHNTRLLSAYSAIDPRVKYLCYTMKVFTKIYKGEKKPEIFVDGWNIYFFDQIDELPTYWSECGKNTESVGQLWLGLLRFYTEEFDFKEHVISIRRKSLLTTFKKQWTSKYIVIEDPFDLNHNLGAGLSRKMTNFIMKAFINGRRVFGIPVKGFPKDYPSKMEYFFDPDVLTEGELAPNDRCCRICGKIGHFMKDCPMRRKVRRRRDQEDALNQRYPENKEKRSKEDKEIHNKYTEREVSTKEDKPIQCTPQKAKPMRAAADLGREKILRPPVEKWKRQDDKDLREKRCFICGREGHIKKECPQFKGSSGSLSSKYMTQGKASAKRTQQES

SEQ ID NO: 6857 - protein, 427 aa, Homo sapiens
MSEFWLISAPGDKENLQALERMNTVTSKSNLSYNTKFAIPDFKVGTLDSLVGLSDELGKLDTFAESLIRRMAQSVVEVMEDSKGKVQEHLLANGVDLTSFVTHFEWDMAKYPVKQPLVSVVDTIAKQLAQIEMDLKSRTAAYNTLKTNLENLEKKSMGNLFTRTLSDIVSKEDFVLDSEYLVTLLVIVPKPNYSQWQKTYESLSDMVVPRSTKLITEDKEGGLFTVTLFRKVIEDFKTKAKENKFTVREFYYDEKEIEREREEMARLLSDKKQQYQTSCVALKKGSSTFPDHKVKVTPLGNPDRPAAGQTDRERESEGEGEGPLLRWLKVNFSEAFIAWIHIKALRVFVESVLRYGLPVNFQAVLLQPHKKSSTKRLREVLNSVFRHLDEVAATSILDASVEIPGLQLNNQDYFPYVYFHIDLSLLD

SEQ ID NO: 6858 - protein, 381 aa, Homo sapiens
MSEFWLISAPGDKENLQALERMNTVTSKSNLSYNTKFAIPDFKVGTLDSLVGLSDELGKLDTFAESLIRRMAQSVVEVMEDSKGKVQEHLLANGVDLTSFVTHFEWDMAKYPVKQPLVSVVDTIAKQLAQIEMDLKSRTAAYNTLKTNLENLEKKSMGNLFTRTLSDIVSKEDFVLDSEYLVTLLVIVPKPNYSQWQKTYESLSDMVVPRSTKLITEDKEGGLFTVTLFRKVIEDFKTKAKENKFTVREFYYDEKEIEREREEMARLLSDKKQQYGPLLRWLKVNFSEAFIAWIHIKALRVFVESVLRYGLPVNFQAVLLQPHKKSSTKRLREVLNSVFRHLDEVAATSILDASVEIPGLQLNNQDYFPYVYFHIDLSLLD

SEQ ID NO: 6859 - protein, 431 aa, Homo sapiens
MRALLARLLLCVLVVSDSKGSNELHQVPSNCDCLNGGTCVSNKYFSNIHWCNCPKKFGGQHCEIDKSKTCYEGNGHFYRGKASTDTMGRPCLPWNSATVLQQTYHAHRSDALQLGLGKHNYCRNPDNRRRPWCYVQVGLKPLVQECMVHDCADGKKPSSPPEELKFQCGQKTLRPRFKIIGGEFTTIENQPWFAAIYRRHRGGSVTYVCGGSLISPCWVISATHCFIDYPKKEDYIVYLGRSRLNSNTQGEMKFEVENLILHKDYSADTLAHHNDIALLKIRSKEGRCAQPSRTIQTICLPSMYNDPQFGTSCEITGFGKENSTDYLYPEQLKMTVVKLISHRECQQPHYYGSEVTTKMLCAADPQWKTDSCQGDSGGPLVCSLQGRMTLTGIVSWGRGCALKDKPGVYTRVSHFLPWIRSHTKEENGLAL

SEQ ID NO: 6860 - protein, 414 aa, Homo sapiens
MVFHLRTRYEQANCDCLNGGTCVSNKYFSNIHWCNCPKKFGGQHCEIDKSKTCYEGNGHFYRGKASTDTMGRPCLPWNSATVLQQTYHAHRSDALQLGLGKHNYCRNPDNRRRPWCYVQVGLKPLVQECMVHDCADGKKPSSPPEELKFQCGQKTLRPRFKIIGGEFTTIENQPWFAAIYRRHRGGSVTYVCGGSLISPCWVISATHCFIDYPKKEDYIVYLGRSRLNSNTQGEMKFEVENLILHKDYSADTLAHHNDIALLKIRSKEGRCAQPSRTIQTICLPSMYNDPQFGTSCEITGFGKENSTDYLYPEQLKMTVVKLISHRECQQPHYYGSEVTTKMLCAADPQWKTDSCQGDSGGPLVCSLQGRMTLTGIVSWGRGCALKDKPGVYTRVSHFLPWIRSHTKEENGLAL

SEQ ID NO: 6861 - protein, 206 aa, Homo sapiens
MSPKPRASGPPAKATEAGKRKSSSQPSPSDPKKKTTKVAKKGKAVRRGRRGKKGAATKMAAVTAPEAESAPAAPGPSDQPSQELPQHELPPEEPVSEGTQHDPLSQEAELEEPLSQESEVEEPLSQESQVEEPLSQESEVEEPLSQESQVEEPLSQESEVEEPLSQESQVEEPLSQESEMEEPLSQESQVEEPPSQESEMEELPSV

SEQ ID NO: 6862 - protein, 355 aa, Homo sapiens
MEPHLLGLLLGLLLGGTRVLAGYPIWWSLALGQQYTSLGSQPLLCGSIPGLVPKQLRFCRNYIEIMPSVAEGVKLGIQECQHQFRGRRWNCTTIDDSLAIFGPVLDKATRESAFVHAIASAGVAFAVTRSCAEGTSTICGCDSHHKGPPGEGWKWGGCSEDADFGVLVSREFADARENRPDARSAMNKHNNEAGRTTILDHMHLKCKCHGLSGSCEVKTCWWAQPDFRAIGDFLKDKYDSASEMVVEKHRESRGWVETLRAKYSLFKPPTERDLVYYENSPNFCEPNPETGSFGTRDRTCNVTSHGIDGCDLLCCGRGHNTRTEKRKEKCHCIFHWCCYVSCQECIRIYDVHTCK

SEQ ID NO: 6863 - protein, 919 aa, Homo sapiens
MTAEETVNVKEVEIIKLILDFLNSKKLHISMLALEKESGVINGLFSDDMLFLRQLILDGQWDEVLQFIQPLECMEKFDKKRFRYIILKQKFLEALCVNNAMSAEDEPQHLEFTMQEAVQCLHALEEYCPSKDDYSKLCLLLTLPRLTNHAEFKDWNPSTARVHCFEEACVMVAEFIPADRKLSEAGFKASNNRLFQLVMKGLLYECCVEFCQSKATGEEITESEVLLGIDLLCGNGCDDLDLSLLSWLQNLPSSVFSCAFEQKMLNIHVDKLLKPTKAAYADLLTPLISKLSPYPSSPMRRPQSADAYMTRSLNPALDGLTCGLTSHDKRISDLGNKTSPMSHSFANFHYPGVQNLSRSLMLENTECHSIYEESPERDTPVDAQRPIGSEILGQSSVSEKEPANGAQNPGPAKQEKNELRDSTEQFQEYYRQRLRYQQHLEQKEQQRQIYQQMLLEGGVNQEDGPDQQQNLTEQFLNRSIQKLGELNIGMDGLGNEVSALNQQCNGSKGNGSNGSSVTSFTTPPQDSSQRLTHDASNIHTSTPRNPGSTNHIPFLEESPCGSQISSEHSVIKPPLGDSPGSLSRSKGEEDDKSKKQFVCINILEDTQAVRAVAFHPAGGLYAVGSNSKTLRVCAYPDVIDPSAHETPKQPVVRFKRNKHHKGSIYCVAWSPCGQLLATGSNDKYVKVLPFNAETCNATGPDLEFSMHDGTIRDLAFMEGPESGGAILISAGAGDCNIYTTDCQRGQGLHALSGHTGHILALYTWSGWMIASGSQDKTVRFWDLRVPSCVRVVGTTFHGTGSAVASVAVDPSGRLLATGQEDSSCMLYDIRGGRMVQSYHPHSSDVRSVRFSPGAHYLLTGSYDMKIKVTDLQGDLTKQLPIMVVGEHKDKVIQCRWHTQDLSFLSSSADRTVTLWTYNG

SEQ ID NO: 6864 - protein, 891 aa, Homo sapiens
MTAEETVNVKEVEIIKLILDFLNSKKLHISMLALEKESGVINGLFSDDMLFLRFRYIILKQKFLEALCVNNAMSAEDEPQHLEFTMQEAVQCLHALEEYCPSKDDYSKLCLLLTLPRLTNHAEFKDWNPSTARVHCFEEACVMVAEFIPADRKLSEAGFKASNNRLFQLVMKGLLYECCVEFCQSKATGEEITESEVLLGIDLLCGNGCDDLDLSLLSWLQNLPSSVFSCAFEQKMLNIHVDKLLKPTKAAYADLLTPLISKLSPYPSSPMRRPQSADAYMTRSLNPALDGLTCGLTSHDKRISDLGNKTSPMSHSFANFHYPGVQNLSRSLMLENTECHSIYEESPERDTPVDAQRPIGSEILGQSSVSEKEPANGAQNPGPAKQEKNELRDSTEQFQEYYRQRLRYQQHLEQKEQQRQIYQQMLLEGGVNQEDGPDQQQNLTEQFLNRSIQKLGELNIGMDGLGNEVSALNQQCNGSKGNGSNGSSVTSFTTPPQDSSQRLTHDASNIHTSTPRNPGSTNHIPFLEESPCGSQISSEHSVIKPPLGDSPGSLSRSKGEEDDKSKKQFVCINILEDTQAVRAVAFHPAGGLYAVGSNSKTLRVCAYPDVIDPSAHETPKQPVVRFKRNKHHKGSIYCVAWSPCGQLLATGSNDKYVKVLPFNAETCNATGPDLEFSMHDGTIRDLAFMEGPESGGAILISAGAGDCNIYTTDCQRGQGLHALSGHTGHILALYTWSGWMIASGSQDKTVRFWDLRVPSCVRVVGTTFHGTGSAVASVAVDPSGRLLATGQEDSSCMLYDIRGGRMVQSYHPHSSDVRSVRFSPGAHYLLTGSYDMKIKVTDLQGDLTKQLPIMVVGEHKDKVIQCRWHTQDLSFLSSSADRTVTLWTYNG

SEQ ID NO: 6865 - protein, 920 aa, Homo sapiens
MTAEETVNVKEVEIIKLILDFLNSKKLHISMLALEKESGVINGLFSDDMLFLRQLILDGQWDEVLQFIQPLECMEKFDKKRFRYIILKQKFLEALCVNNAMSAEDEPQHLEFTMQEAVQCLHALEEYCPSKDDYSKLCLLLTLPRLTNHAEFKDWNPSTARVHCFEEACVMVAEFIPADRKLSEAGFKASNNRLFQLVMKGLLYECCVEFCQSKATGEEITESEVLLGIDLLCGNGCDDLDLSLLSWLQNLPSSVFSCAFEQKMLNIHVDKLLKPTKAAYADLLTPLISKLSPYPSSPMRRPQSADAYMTRSLNPALDGLTCGLTSHDKRISDLGNKTSPMSHSFANFHYPGVQNLSRSLMLENTECHSIYEESPERSDTPVDAQRPIGSEILGQSSVSEKEPANGAQNPGPAKQEKNELRDSTEQFQEYYRQRLRYQQHLEQKEQQRQIYQQMLLEGGVNQEDGPDQQQNLTEQFLNRSIQKLGELNIGMDGLGNEVSALNQQCNGSKGNGSNGSSVTSFTTPPQDSSQRLTHDASNIHTSTPRNPGSTNHIPFLEESPCGSQISSEHSVIKPPLGDSPGSLSRSKGEEDDKSKKQFVCINILEDTQAVRAVAFHPAGGLYAVGSNSKTLRVCAYPDVIDPSAHETPKQPVVRFKRNKHHKGSIYCVAWSPCGQLLATGSNDKYVKVLPFNAETCNATGPDLEFSMHDGTIRDLAFMEGPESGGAILISAGAGDCNIYTTDCQRGQGLHALSGHTGHILALYTWSGWMIASGSQDKTVRFWDLRVPSCVRVVGTTFHGTGSAVASVAVDPSGRLLATGQEDSSCMLYDIRGGRMVQSYHPHSSDVRSVRFSPGAHYLLTGSYDMKIKVTDLQGDLTKQLPIMVVGEHKDKVIQCRWHTQDLSFLSSSADRTVTLWTYNG

SEQ ID NO: 6866 - protein, 927 aa, Homo sapiens
MTAEETVNVKEVEIIKLILDFLNSKKLHISMLALEKESGVINGLFSDDMLFLRQLILDGQWDEVLQFIQPLECMEKFDKKRFRYIILKQKFLEALCVNNAMSAEDEPQHVRFLFLKLEFTMQEAVQCLHALEEYCPSKDDYSKLCLLLTLPRLTNHAEFKDWNPSTARVHCFEEACVMVAEFIPADRKLSEAGFKASNNRLFQLVMKGLLYECCVEFCQSKATGEEITESEVLLGIDLLCGNGCDDLDLSLLSWLQNLPSSVFSCAFEQKMLNIHVDKLLKPTKAAYADLLTPLISKLSPYPSSPMRRPQSADAYMTRSLNPALDGLTCGLTSHDKRISDLGNKTSPMSHSFANFHYPGVQNLSRSLMLENTECHSIYEESPERSDTPVDAQRPIGSEILGQSSVSEKEPANGAQNPGPAKQEKNELRDSTEQFQEYYRQRLRYQQHLEQKEQQRQIYQQMLLEGGVNQEDGPDQQQNLTEQFLNRSIQKLGELNIGMDGLGNEVSALNQQCNGSKGNGSNGSSVTSFTTPPQDSSQRLTHDASNIHTSTPRNPGSTNHIPFLEESPCGSQISSEHSVIKPPLGDSPGSLSRSKGEEDDKSKKQFVCINILEDTQAVRAVAFHPAGGLYAVGSNSKTLRVCAYPDVIDPSAHETPKQPVVRFKRNKHHKGSIYCVAWSPCGQLLATGSNDKYVKVLPFNAETCNATGPDLEFSMHDGTIRDLAFMEGPESGGAILISAGAGDCNIYTTDCQRGQGLHALSGHTGHILALYTWSGWMIASGSQDKTVRFWDLRVPSCVRVVGTTFHGTGSAVASVAVDPSGRLLATGQEDSSCMLYDIRGGRMVQSYHPHSSDVRSVRFSPGAHYLLTGSYDMKIKVTDLQGDLTKQLPIMVVGEHKDKVIQCRWHTQDLSFLSSSADRTVTLWTYNG

SEQ ID NO: 6867 - protein, 567 aa, Homo sapiens
MDDKDIDKELRQKLNFSYCEETEIEGQKKVEESREASSQTPEKGEVQDSEAKGTPPWTPLSNVHELDTSSEKDKESPDQILRTPVSHPLKCPETPAQPDSRSKLLPSDSPSTPKTMLSRLVISPTGKLPSRGPKHLKLTPAPLKDEMTSLALVNINPFTPESYKKLFLQSGGKRKIRGDLEEAGPEEGKGGLPAKRCVLRETNMASRYEKEFLEVEKIGVGEFGTVYKCIKRLDGCVYAIKRSMKTFTELSNENSALHEVYAHAVLGHHPHVVRYYSSWAEDDHMIIQNEYCNGGSLQAAISENTKSGNHFEEPKLKDILLQISLGLNYIHNSSMVHLDIKPSNIFICHKMQSESSGVIEEVENEADWFLSANVMYKIGDLGHATSINKPKVEEGDSRFLANEILQEDYRHLPKADIFALGLTIAVAAGAESLPTNGAAWHHIRKGNFPDVPQELSESFSSLLKNMIQPDAEQRPSAAALARNTVLRPSLGKTEELQQQLNLEKFKTATLERELREAQQAQSPQGYTHHGDTGVSGTHTGSRSTKRLVGGKSARSSSFTSGEREPLH

SEQ ID NO: 6868 - protein, 98 aa, Homo sapiens
MTERRRALSLAAVVDSINLACVVVSRDWLSLVPAFFYSPPPGGSFSGIKRESRRKRPSRNEIYGGGVLEQEVRMRRWSKTASPPVSLHHRPLGPARKP

SEQ ID NO: 6869 - protein, 133 aa, Homo sapiens
MLFGIRILVNTPSPLVTGLHHYNPSIHRDQGECANQWRKGPGSAHLAGLAGRCSLINTPSPLVTGLQRYNPSMDRAQGMCASLEEEAGLCKPLWAWWELQSHKHSQTSHHRAAGLQSQHAPGSGRVRITGGKV

SEQ ID NO: 6870 - protein, 395 aa, Homo sapiens
MMAAKVVPMPPKPKQSFILRVPPDSKLGQDLLRDATNGPKTIHQLVLEHFLTFLPKPSLVQPSQKVKETLVIMKDVSSSLQNRVHPRPLVKLLPKGVQKEQETVSLYLKANPEELVVFEDLNVFHCQEECVSLDPTQQLTSEKEDDSSVGEMMLLAVNGSNPEGEDPEREPVENEDYREKSSDDDEMDSSLVSQQPPDNQEKERLNTSIPQKRKMRNLLVTIENDTPLEELSKYVDISIIALTRNRRTRRWYTCPLCGKQFNESSYLISHQRTHTGEKPYDCNHCGKSFNHKTNLNKHERIHTGEKPYSCSQCGKNFRQNSHRSRHEGIHIREKIFKCPECGKTFPKNEEFVLHLQSHEAERPYGCKKCGRRFGRLSNCTRHEKTHSACKTRKQK

SEQ ID NO: 6871 - protein, 394 aa, Homo sapiens
MMAAKVVPMPPKPKQSFILRVPPDSKLGQDLLRDATNGPKTIHQLVLEHFLTFLPKPSLVQPSQKVKETLVIMKDVSSSLQNRVHPRPLVKLLPKGVQKEQETVSLYLKANPELVVFEDLNVFHCQEECVSLDPTQQLTSEKEDDSSVGEMMLLAVNGSNPEGEDPEREPVENEDYREKSSDDDEMDSSLVSQQPPDNQEKERLNTSIPQKRKMRNLLVTIENDTPLEELSKYVDISIIALTRNRRTRRWYTCPLCGKQFNESSYLISHQRTHTGEKPYDCNHCGKSFNHKTNLNKHERIHTGEKPYSCSQCGKNFRQNSHRSRHEGIHIREKIFKCPECGKTFPKNEEFVLHLQSHEAERPYGCKKCGRRFGRLSNCTRHEKTHSACKTRKQK

SEQ ID NO: 6872 - protein, 394 aa, Homo sapiens
MMAAKVVPMPPKPKQSFILRVPPDSKLGQDLLRDATNGPKTIHQLVLEHFLTFLPKPSLVQPSQKVKETLVIMKDVSSSLQNRVHPRPLVKLLPKGVQKEQETVSLYLKANPEELVVFEDLNVFHCQEECVSLDPTQQLTSEKEDDSSVGEMMLLVNGSNPEGEDPEREPVENEDYREKSSDDDEMDSSLVSQQPPDNQEKERLNTSIPQKRKMRNLLVTIENDTPLEELSKYVDISIIALTRNRRTRRWYTCPLCGKQFNESSYLISHQRTHTGEKPYDCNHCGKSFNHKTNLNKHERIHTGEKPYSCSQCGKNFRQNSHRSRHEGIHIREKIFKCPECGKTFPKNEEFVLHLQSHEAERPYGCKKCGRRFGRLSNCTRHEKTHSACKTRKQK

SEQ ID NO: 6873 - protein, 441 aa, Homo sapiens
MEISSHQSHLLQQLNEQRRQDVFCDCSILVEGKVFKAHRNVLFASSGYFKMLLSQNSKETSQPTTATFQAFSPDTFTVILDFVYSGKLSLTGQNVIEVMSAASFLQMTDVISVCKTFIKSSLDISEKEKDRYFSLSDKDANSNGVERSSFYSGGWQEGSSSPRSHLSPEQGTGIISGKSWNKYNYHPASQKNTQQPLAKHEPRKESIKKTKHLRLSQPSEVTHYKSSKREVRTSDSSSHVSQSEEQAQIDAEMDSTPVGYQYGQGSDVTSKSFPDDLPRMRFKCPYCTHVVKRKADLKRHLRCHTGERPYPCQACGKRFSRLDHLSSHFRTIHQACKLICRKCKRHVTDLTGQVVQEGTRRYRLCNECLAEFGIDSLPIDLEAEQHLMSPSDGDKDSRWHLSEDENRSYVEIVEDGSGDLVIQQVDDSEEEEEKEIKPNIR

SEQ ID NO: 6874 - protein, 338 aa, Homo sapiens
MEISSHQSHLLQQLNEQRRQDVFCDCSILVEGKVFKAHRNVLFASSGYFKMLLSQNSKETSQPTTATFQAFSPDTFTVILDFVYSGKLSLTGQNVIEVMSAASFLQMTDVISVCKTFIKSSLDISEKEKDRYFSLSDKDANSNGVERSSFYSGGWQEGSSSPRSHLSPEQGTGIISGKSWNKYNYHPASQKNTQQPLAKHEPRKESIKKTKHLRLSQPSEVTHYKSSKREVRTSDSSSHVSQSEEQAQIDAEMDSTPVGYQYGQGSDVTSKSFPDDLPRMRFKCPYCTHVVKRKADLKRHLRCHTGERPYPCQACGKRFSRLDHLSSHFRTMEIRIPD

SEQ ID NO: 6875 - protein, 140 aa, Homo sapiens
MDCKSPKRANICPHLPGGGLFSTPPSQAAWRTLLTALCFPGPTCTGPMREGPRAVYNPPRAHRNSSDNCVMKHLLCAGDKNGTRRHALPSPLEGSFQPGRQIPPPQTPSTDPQTLPLSFRSLLRCHQLCAASLPPSLKLP

SEQ ID NO: 6876 - protein, 441 aa, Homo sapiens
MSERSDLLHFKFENYGDSMLQKMNKLREENKFCDVTVLIDDIEVQGHKIVFAAGSPFLRDQFLLNDSREVKISILQSSEVGRQLLLSCYSGVLEFPEMELVNYLTAASFLQMSHIVERCTQALWKFIKPKQPMDSKEGCEPQSASPQSKEQQGDARGSPKQDSPCIHPSEDSMDMEDSDIQIVKVESIGDVSEVRSKKDQNQFISSEPTALHSSEPQHSLINSTVENRVSEIEQNHLHNYALSYTGSDNIIMASKDVFGPNIRGVDKGLQWHHQCPKCTRVFRHLENYANHLKMHKLFMCLLCGKTFTQKGNLHRHMRVHAGIKPFQCKICGKTFSQKCSLQDHLNLHSGDKPHKCNYCDMVFAHKPVLRKHLKQLHGKNSFDNANERNVQDLTVDFDSFACTTVTDSKGCQPQPDATQVLDAGKLAQAVLNLRNDSTCVN

SEQ ID NO: 6877 - protein, 641 aa, Homo sapiens
MVHGSVTFRDVAIDFSQEEWECLQPDQRTLYRDVMLENYSHLISLGSSISKPDVITLLEQEKEPWMVVRKETSRRYPDLELKYGPEKVSPENDTSEVNLPKQVIKQISTTLGIEAFYFRNDSEYRQFEGLQGYQEGNINQKMISYEKLPTHTPHASLICNTHKPYECKECGKYFSRSANLIQHQSIHTGEKPFECKECGKAFRLHIQFTRHQKFHTGEKPFECNECGKAFSLLTLLNRHKNIHTGEKLFECKECGKSFNRSSNLVQHQSIHSGVKPYECKECGKGFNRGAHLIQHQKIHSNEKPFVCKECGMAFRYHYQLIEHCQIHTGEKPFECKECGKAFTLLTKLVRHQKIHTGEKPFECRECGKAFSLLNQLNRHKNIHTGEKPFECKECGKSFNRSSNLVQHQSIHAGIKPYECKECGKGFNRGAHLIQHQKIHSNEKPFVCRECEMAFRYHCQLIEHSRIHTGDKPFECQDCGKAFNRGSSLVQHQSIHTGEKPYECKECGKAFRLYLQLSQHQKTHTGEKPFECKECGKFFRRGSNLNQHRSIHTGKKPFECKECGKAFRLHMHLIRHQKLHTGEKPFECKECGKAFRLHMQLIRHQKLHTGEKPFECKECGKVFSLPTQLNRHKNIHTGEKAS

SEQ ID NO: 6878 - protein, 158 aa, Homo sapiens
MGRSPRKIDQFCNSSNMVHGSVTFRDVAIDFSQEEWECLQPDQRTLYRDVMLENYSHLISLGSSISKPDVITLLEQEKEPWMVVRKETSRRYPDLELKYGPEKVSPENDTSEVNLPKQISSLASKPSFTAIHIQRRIHCRICIAFGYLSLVYCSLEIL

SEQ ID NO: 6879 - protein, 642 aa, Homo sapiens
MVHGSVTFRDVAIDFSQEEWECLQPDQRTLYRDVMLENYSHLISLAGSSISKPDVITLLEQEKEPWMVVRKETSRRYPDLELKYGPEKVSPENDTSEVNLPKQVIKQISTTLGIEAFYFRNDSEYRQFEGLQGYQEGNINQKMISYEKLPTHTPHASLICNTHKPYECKECGKYFSRSANLIQHQSIHTGEKPFECKECGKAFRLHIQFTRHQKFHTGEKPFECNECGKAFSLLTLLNRHKNIHTGEKLFECKECGKSFNRSSNLVQHQSIHSGVKPYECKECGKGFNRGAHLIQHQKIHSNEKPFVCKECGMAFRYHYQLIEHCQIHTGEKPFECKECGKAFTLLTKLVRHQKIHTGEKPFECRECGKAFSLLNQLNRHKNIHTGEKPFECKECGKSFNRSSNLVQHQSIHAGIKPYECKECGKGFNRGAHLIQHQKIHSNEKPFVCRECEMAFRYHCQLIEHSRIHTGDKPFECQDCGKAFNRGSSLVQHQSIHTGEKPYECKECGKAFRLYLQLSQHQKTHTGEKPFECKECGKFFRRGSNLNQHRSIHTGKKPFECKECGKAFRLHMHLIRHQKLHTGEKPFECKECGKAFRLHMQLIRHQKLHTGEKPFECKECGKVFSLPTQLNRHKNIHTGEKAS

SEQ ID NO: 6880 - protein, 1142 aa, Homo sapiens
MKEPLLGGECDKAVASQLGLLDEIKTEPDNAQEYCHRQQSRTQENELKINAVFSESASQLTAGIQLSLASSGVNKMLPSVSTTAIQVSCAGCKKILQKGQTAYQRKGSAQLFCSIPCITEYISSASSPVPSKRTCSNCSKDILNPKDVISVQLEDTTSCKTFCSLSCLSSYEEKRKPFVTICTNSILTKCSMCQKTAIIQYEVKYQNVKHNLCSNACLSKFHSANNFIMNCCENCGTYCYTSSSLSHILQMEGQSHYFNSSKSITAYKQKPAKPLISVPCKPLKPSDEMIETTSDLGKTELFCSINCFSAYSKAKMESSSVSVVSVVHDTSTELLSPKKDTTPVISNIVSLADTDVALPIMNTDVLQDTVSSVTATADVIVDLSKSSPSEPSNAVASSSTEQPSVSPSSSVFSQHAIGSSTEVQKDNMKSMKISDELCHPKCTSKVQKVKGKSRSIKKSCCADFECLENSKKDVAFCYSCQLFCQKYFSCGRESFATHGTSNWKKTLEKFRKHEKSEMHLKSLEFWREYQFCDGAVSDDLSIHSKQIEGNKKYLKLIIENILFLGKQCLPLRGNDQSVSSVNKGNFLELLEMRAKDKGEETFRLMNSQVDFYNSTQIQSDIIEIIKTEMLQDIVNEINDSSAFSIICDETINSAMKEQLSICVRYPQKSSKAILIKERFLGFVDTEEMTGTHLHRTIKTYLQQIGVDMDKIHGQAYDSTTNLKIKFNKIAAEFKKEEPRALYIHCYAHFLDLSIIRFCKEVKELRSALKTLSSLFNTICMSGEMLANFRNIYRLSQNKTCKKHISQSCWTVHDRTLLSVIDSLPEIIETLEVIASHSSNTSFADELSHLLTLVSKFEFVFCLKFLYRVLSVTGILSKELQNKTIDIFSLSSKIEAILECLSSERNDVYFKTIWDGTEEICQKITCKGFKVEKPSLQKRRKIQKSVDLGNSDNMFFPTSTEEQYKINIYYQGLDTILQNLKLCFSEFDYCKIKQISELLFKWNEPLNETTAKHVQEFYKLDEDIIPELRFYRHYAKLNFVIDDSCINFVSLGCLFIQHGLHSNIPCLSKLLYIALSWPITSASTENSFSTLPRLKTYLCNTMGQEKLTGPALMAVEQELVNKLMEPERLNEIVEKFISQMKEI

SEQ ID NO: 6881 - protein, 1178 aa, Homo sapiens
MLRMKLPLKPTHPAEPPPEAEEPEADARPGAKAPSRRRRDCRPPPPPPPPAGPSRGPLPPPPPPRGLGPPVAGGAAAGAGMPGGGGGPSAALREQERVYEWFGLVLGSAQRLEFMCGLLDLCNPLELRFLGSCLEDLARKDYHYLRDSEAKANGLSDPGPLADFREPAVRSRLIVYLALLGSENREAAGRLHRLLPQVDSVLKSLRAARGEGSRGGAEDERGEDGDGEQDAEKDGSGPEGGIVEPRVGGGLGSRAQEELLLLFTMASLHPAFSFHQRVTLREHLERLRAALRGGPEDAEVEVEPCKFAGPRAQNNSAHGDYMQNNESSLIEQAPIPQDGLTVAPHRAQREAVHIEKIMLKGVQRKRADKYWEYTFKVNWSDLSVTTVTKTHQELQEFLLKLPKELSSETFDKTILRALNQGSLKREERRHPDLEPILRQLFSSSSQAFLQSQKVHSFFQSISSDSLHSINNLQSSLKTSKILEHLKEDSSEASSQEEDVLQHAIIHKKHTGKSPIVNNIGTSCSPLDGLTMQYSEQNGIVDWRKQSCTTIQHPEHCVTSADQHSAEKRSLSSINKKKGKPQTEKEKIKKTDNRLNSRINGIRLSTPQHAHGGTVKDVNLDIGSGHDTCGETSSESYSSPSSPRHDGRESFESEEEKDRDTDSNSEDSGNPSTTRFTGYGSVNQTVTVKPPVQIASLGNENGNLLEDPLNSPKYQHISFMPTLHCVMHNGAQKSEVVVPAPKPADGKTIGMLVPSPVAISAIRESANSTPVGILGPTACTGESEKHLELLASPLPIPSTFLPHSSTPALHLTVQRLKLPPPQGSSESCTVNIPQQPPGSLSIASPNTAFIPIHNPGSFPGSPVATTDPITKSASQVVGLNQMVPQIEGNTGTVPQPTNVKVVLPAAGLSAAQPPASYPLPGSPLAAGVLPSQNSSVLSTAATSPQPASAGISQAQATVPPAVPTHTPGPAPSPSPALTHSTAQSDSTSYISAVGNTNANGTVVPPQQMGSGPCGSCGRRCSCGTNGNLQLNSYYYPNPMPGPMYRVPSFFTLPSICNGSYLNQAHQSNGNQLPFFLPQTPYANGLVHDPVMGSQANYGMQQMAGFGRFYPVYPAPNVVANTSGSGPKKNGNVSCYNCGVSGHYAQDCKQSSMEANQQGTYRLRYAPPLPPSNDTLDSAD

SEQ ID NO: 6882 - protein, 857 aa, Homo sapiens
MQNNESSLIEQAPIPQDGLTVAPHRAQREAVHIEKIMLKGVQRKRADKYWEYTFKVNWSDLSVTTVTKTHQELQEFLLKLPKELSSETFDKTILRALNQGSLKREERRHPDLEPILRQLFSSSSQAFLQSQKVHSFFQSISSDSLHSINNLQSSLKTSKILEHLKEDSSEASSQEEDVLQHAIIHKKHTGKSPIVNNIGTSCSPLDGLTMQYSEQNGIVDWRKQSCTTIQHPEHCVTSADQHSAEKRSLSSINKKKGKPQTEKEKIKKTDNRLNSRINGIRLSTPQHAHGGTVKDVNLDIGSGHDTCGETSSESYSSPSSPRHDGRESFESEEEKDRDTDSNSEDSGNPSTTRFTGYGSVNQTVTVKPPVQIASLGNENGNLLEDPLNSPKYQHISFMPTLHCVMHNGAQKSEVVVPAPKPADGKTIGMLVPSPVAISAIRESANSTPVGILGPTACTGESEKHLELLASPLPIPSTFLPHSSTPALHLTVQRLKLPPPQGSSESCTVNIPQQPPGSLSIASPNTAFIPIHNPGSFPGSPVATTDPITKSASQVVGLNQMVPQIEGNTGTVPQPTNVKVVLPAAGLSAAQPPASYPLPGSPLAAGVLPSQNSSVLSTAATSPQPASAGISQAQATVPPAVPTHTPGPAPSPSPALTHSTAQSDSTSYISAVGNTNANGTVVPPQQMGSGPCGSCGRRCSCGTNGNLQLNSYYYPNPMPGPMYRVPSFFTLPSICNGSYLNQAHQSNGNQLPFFLPQTPYANGLVHDPVMGSQANYGMQQMAGFGRFYPVYPAPNVVANTSGSGPKKNGNVSCYNCGVSGHYAQDCKQSSMEANQQGTYRLRYAPPLPPSNDTLDSAD

SEQ ID NO: 6883 - protein, 846 aa, Homo sapiens
MCFLRRPGAPASWIWWRMLRQVLRRGLQSFCHRLGLCVSRHPVFFLTVPAVLTITFGLSALNRFQPEGDLERLVAPSHSLAKIERSLASSLFPLDQSKSQLYSDLHTPGRYGRVILLSPTGDNILLQAEGILQTHRAVLEMKDGRNSFIGHQLGGVVEVPNSKDQRVKSARAIQITYYLQTYGSATQDLIGEKWENEFCKLIRKLQEEHQELQLYSLASFSLWRDFHKTSILARSKVLVSLVLILTTATLSSSMKDCLRSKPFLGLLGVLTVCISIITAAGIFFITDGKYNSTLLGIPFFAMGHGTKGVFELLSGWRRTKENLPFKDRIADAYSDVMVTYTMTSSLYFITFGMGASPFTNIEAVKVFCQNMCVSILLNYFYIFSFFGSCLVFAGQLEQNRYHSIFCCKIPSAEYLDRKPVWFQTVMSDGHQQTSHHETNPYQHHFIQHFLREHYNEWITNIYVKPFVVILYLIYASFSFMGCLQISDGANIINLLASDSPSVSYAMVQQKYFSNYSPVIGFYVYEPLEYWNSSVQDDLRRLCSGFTAVSWVEQYYQFLKVSNVSANNKSDFISVLQSSFLKKPEFQHFRNDIIFSKAGDESNIIASRLYLVARTSRDKQKEITEVLEKLRPLSLSKSIRFIVFNPSFVFMDHYSLSVTVPVLIAGFGVLLVLILTFFLVIHPLGNFWLILSVTSIELGVLGLMTLWNVDMDCISILCLIYTLNFAIDHCAPLLFTFVLATEHTRTQCIKSSLQDHGTAILQNVTSFLIGLVPLLFVPSNLTFTLFKCLLLTGGCTLLHCFVILPVFLTFFPPSKKHHKKKKRAKRKEREEIECIEIQENPDHVTTV

SEQ ID NO: 6884 - protein, 294 aa, Homo sapiens
MLRQVLRRGLQSFCHRLGLCVSRHPVFFLTVPAVLTITFGLSALNRFQPEGDLERLVAPSHSLAKIERSLASSLFPLDQSKSQLYSDLHTPGRYGRVILLSPTGDNILLQAEGILQTHRAVLEMKDGRNSFIGHQLGGVVEVPNSKDQRVKSARAIQITYYLQTYGSATQDLIGEKWENEFCKLIRKLQEEHQELQLYSLASFSLWRDFHKTSILARSKVLVSLVLILTTATLSSSMKDCLRSKPFLGLLGVLTVCISIITAAGIFFITDGKYNSTLLGIPFFAMGISTEFTSS

SEQ ID NO: 6885 - protein, 843 aa, Homo sapiens
MRRPGAPASWIWWRMLRQVLRRGLQSFCHRLGLCVSRHPVFFLTVPAVLTITFGLSALNRFQPEGDLERLVAPSHSLAKIERSLASSLFPLDQSKSQLYSDLHTPGRYGRVILLSPTGDNILLQAEGILQTHRAVLEMKDGRNSFIGHQLGGVVEVPNSKDQRVKSARAIQITYYLQTYGSATQDLIGEKWENEFCKLIRKLQEEHQELQLYSLASFSLWRDFHKTSILARSKVLVSLVLILTTATLSSSMKDCLRSKPFLGLLGVLTVCISIITAAGIFFITDGKYNSTLLGIPFFAMGHGTKGVFELLSGWRRTKENLPFKDRIADAYSDVMVTYTMTSSLYFITFGMGASPFTNIEAVKVFCQNMCVSILLNYFYIFSFFGSCLVFAGQLEQNRYHSIFCCKIPSAEYLDRKPVWFQTVMSDGHQQTSHHETNPYQHHFIQHFLREHYNEWITNIYVKPFVVILYLIYASFSFMGCLQISDGANIINLLASDSPSVSYAMVQQKYFSNYSPVIGFYVYEPLEYWNSSVQDDLRRLCSGFTAVSWVEQYYQFLKVSNVSANNKSDFISVLQSSFLKKPEFQHFRNDIIFSKAGDESNIIASRLYLVARTSRDKQKEITEVLEKLRPLSLSKSIRFIVFNPSFVFMDHYSLSVTVPVLIAGFGVLLVLILTFFLVIHPLGNFWLILSVTSIELGVLGLMTLWNVDMDCISILCLIYTLNFAIDHCAPLLFTFVLATEHTRTQCIKSSLQDHGTAILQNVTSFLIGLVPLLFVPSNLTFTLFKCLLLTGGCTLLHCFVILPVFLTFFPPSKKHHKKKKRAKRKEREEIECIEIQENPDHVTTV

SEQ ID NO: 6886 - protein, 593 aa, Homo sapiens
MKDCLRSKPFLGLLGVLTVCISIITAAGIFFITDGKYNSTLLGIPFFAMGHGTKGVFELLSGWRRTKENLPFKDRIADAYSDVMVTYTMTSSLYFITFGMGASPFTNIEAVKVFCQNMCVSILLNYFYIFSFFGSCLVFAGQLEQNRYHSIFCCKIPSAEYLDRKPVWFQTVMSDGHQQTSHHETNPYQHHFIQHFLREHYNEWITNIYVKPFVVILYLIYASFSFMGCLQISDGANIINLLASDSPSVSYAMVQQKYFSNYSPVIGFYVYEPLEYWNSSVQDDLRRLCSGFTAVSWVEQYYQFLKVSNVSANNKSDFISVLQSSFLKKPEFQHFRNDIIFSKAGDESNIIASRLYLVARTSRDKQKEITEVLEKLRPLSLSKSIRFIVFNPSFVFMDHYSLSVTVPVLIAGFGVLLVLILTFFLVIHPLGNFWLILSVTSIELGVLGLMTLWNVDMDCISILCLIYTLNFAIDHCAPLLFTFVLATEHTRTQCIKSSLQDHGTAILQNVTSFLIGLVPLLFVPSNLTFTLFKCLLLTGGCTLLHCFVILPVFLTFFPPSKKHHKKKKRAKRKEREEIECIEIQENPDHVTTV

SEQ ID NO: 6887 - protein, 492 aa, Homo sapiens
MAVLLETTLGDVVIDLYTEERPRACLNFLKLCKIKYYNYCLIHNVQRDFIIQTGDPTGTGRGGESIFGQLYGDQASFFEAEKVPRIKHKKKGTVSMVNNGSDQHGSQFLITTGENLDYLDGVHTVFGEVTEGMDIIKKINETFVDKDFVPYQDIRINHTVILDDPFDDPPDLLIPDRSPEPTREQLDSGRIGADEEIDDFKGRSAEEVEEIKAEKEAKTQAILLEMVGDLPDADIKPPENVLFVCKLNPVTTDEDLEIIFSRFGPIRSCEVIRDWKTGESLCYAFIEFEKEEDCEKAFFKMDNVLIDDRRIHVDFSQSVAKVKWKGKGGKYTKSDFKEYEKEQDKPPNLVLKDKVKPKQDTKYDLILDEQAEDSKSSHSHTSKKHKKKTHHCSEEKEDEDYMPIKNTNQDIYREMGFGHYEEEESCWEKQKSEKRDRTQNRSRSRSRERDGHYSNSHKSKYQTDLYERERSKKRDRSRSPKKSKDKEKSKYR

SEQ ID NO: 6888 - protein, 154 aa, Homo sapiens
MCWLRAWGQILLPVFLSLFLIQLLISFSENGFIHSPRNNQKPRDGNEEECAVKKSCQLCTEDKKCVWCSEEKACKKYCFPYFGCRFSSIYWLNCKVDMFGIMMLLLIAVLITGFVWYCCAYHFYLQDLNRNRVYFYGRRETVPIHDRSATVYDE

SEQ ID NO: 6889 - protein, 324 aa, Homo sapiens
MPELAVQKVVVHPLVLLSVVDHFNRIGKVGNQKRVVGVLLGSWQKKVLDVSNSFAVPFDEDDKDDSVWFLDHDYLENMYGMFKKVNARERIVGWYHTGPKLHKNDIAINELMKRYCPNSVLVIIDVKPKDLGLPTEAYISVEEVHDDGTPTSKTFEHVTSEIGAEEAEEVGVEHLLRDIKDTTVGTLSQRITNQVHGLKGLNSKLLDIRSYLEKVATGKLPINHQIIYQLQDVFNLLPDVSLQEFVKAFYLKTNDQMVVVYLASLIRSVVALHNLINNKIANRDAEKKEGQEKEESKKDRKEDKEKDKDKEKSDVKKEEKKEKK

SEQ ID NO: 6890 - protein, 175 aa, Homo sapiens
MASLRVERAGGPRLPRTRVGRPAALRLLLLLGAVLNPHEALAQPLPTTGTPGSEGGTVKNYETAVQFCWNHYKDQMDPIEKDWCDWAMISRPYSTLRDCLEHFAELFDLGFPNPLAERIIFETHQIHFANCSLVQPTFSDPPEDVLLAMIIAPICLIPFLITLVVWRSKDSEAQA

SEQ ID NO: 6891 - protein, 180 aa, Homo sapiens
MASLRVERAGGPRLPRTRVGRPAALRLLLLLGAVLNPHEALAQPLPTTGTPGSEASVPTGGTVKNYETAVQFCWNHYKDQMDPIEKDWCDWAMISRPYSTLRDCLEHFAELFDLGFPNPLAERIIFETHQIHFANCSLVQPTFSDPPEDVLLAMIIAPICLIPFLITLVVWRSKDSEAQA

SEQ ID NO: 6892 - protein, 382 aa, Homo sapiens
MRSGGRGRPRLRLGERGLMEPLLPPKRRLLPRVRLLPLLLALAVGSAFYTIWSGWHRRTEELPLGRELRVPLIGSLPEARLRRVVGQLDPQRLWSTYLRPLLVVRTPGSPGNLQVRKFLEATLRSLTAGWHVELDPFTASTPLGPVDFGNVVATLDPRAARHLTLACHYDSKLFPPGSTPFVGATDSAVPCALLLELAQALDLELSRAKKQAAPVTLQLLFLDGEEALKEWGPKDSLYGSRHLAQLMESIPHSPGPTRIQAIELFMLLDLLGAPNPTFYSHFPRTVRWFHRLRSIEKRLHRLNLLQSHPQEVMYFQPGEPFGSVEDDHIPFLRRGVPVLHLISTPFPAVWHTPADTEVNLHPPTVHNLCRILAVFLAEYLGL

SEQ ID NO: 6893 - protein, 288 aa, Homo sapiens
MRSGGRGRPRLRLGERGLMEPLLPPKRRLLPRVRLLPLLLALAVGSAFYTIWSGWHRRTEELPLGRELRVPLIGSLPEARLRRVVGQLDPQRLWSTYLRPLLVVRTPGSPGNLQVRKAAPVTLQLLFLDGEEALKEWGPKDSLYGSRHLAQLMESIPHSPGPTRIQAIELFMLLDLLGAPNPTFYSHFPRTVRWFHRLRSIEKRLHRLNLLQSHPQEVMYFQPGEPFGSVEDDHIPFLRRGVPVLHLISTPFPAVWHTPADTEVNLHPPTVHNLCRILAVFLAEYLGL

SEQ ID NO: 6894 - protein, 776 aa, Homo sapiens
MNNSLENTISFEEYIRVKARSVPQHRMKEFLDSLASKGPEALQEFQQTATTTMVYQQGGNCIYTDSTEVAGSLLELACPVTTSVQPQTQQEQQIQVQQPQQVQVQVQVQQSPQQVSAQLSPQLTVHQPTEQPIQVQVQIQGQAPQSAAPSIQTPSLQSPSPSQLQAAQIQVQHVQAAQQIQAAEIPEEHIPHQQIQAQLVAGQSLAGGQQIQIQTVGALSPPPSQQGSPREGERRVGTASVLQPVKKRKVDMPITVSYAISGQPVATVLAIPQGQQQSYVSLRPDLLTVDSAHLYSATGTITSPTGETWTIPVYSAQPRGDPQQQSITHIAIPQEAYNAVHVSGSPTALAAVKLEDDKEKMVGTTSVVKNSHEEVVQTLANSLFPAQFMNGNIHIPVAVQAVAGTYQNTAQTVHIWDPQQQPQQQTPQEQTPPPQQQQQQLQVTCSAQTVQVAEVEPQSQPQPSPELLLPNSLKPEEGLEVWKNWAQTKNAELEKDAQNRLAPIGRRQLLRFQEDLISSAVAELNYGLCLMTREARNGEGEPYDPDVLYYIFLCIQKYLFENGRVDDIFSDLYYVRFTEWLHEVLKDVQPRVTPLGYVLPSHVTEEMLWECKQLGAHSPSTLLTTLMFFNTKYFLLKTVDQHMKLAFSKVLRQTKKNPSNPKDKSTSIRYLKALGIHQTGQKVTDDMYAEQTENPENPLRCPIKLYDFYLFKCPQSVKGRNDTFYLTPEPVVAPNSPIWYSVQPISREQMGQMLTRILVIREIQEAIAVANASTMH

SEQ ID NO: 6895 - protein, 1463 aa, Homo sapiens
MEPRLFCWTTLFLLAGWCLPGLPCPSRCLCFKSTVRCMHLMLDHIPQVPQQTTVLDLRFNRIREIPGSAFKKLKNLNTLLLNNNHIRKISRNAFEGLENLLYLYLYKNEIHALDKQTFKGLISLEHLYIHFNQLEMLQPETFGDLLRLERLFLHNNKLSKIPAGSFSNLDSLKRLRLDSNALVCDCDLMWLGELLQGFAQHGHTQAAATCEYPRRLHGRAVASVTVEEFNCQSPRITFEPQDVEVPSGNTVYFTCRAEGNPKPEIIWIHNNHSLDLEDDTRLNVFDDGTLMIRNTRESDQGVYQCMARNSAGEAKTQSAMLRYSSLPAKPSFVIQPQDTEVLIGTSTTLECMATGHPHPLITWTRDNGLELDGSRHVATSSGLYLQNITQRDHGRFTCHANNSHGTVQAAANIIVQAPPQFTVTPKDQVVLEEHAVEWLCEADGNPPPVIVWTKTGGQLPVEGQHTVLSSGTLRIDRAAQHDQGQYECQAVSSLGVKKVSVQLTVKPKALAVFTQLPQDTSVEVGKNINISCHAQGEPQPIITWNKEGVQITESGKFHVDDEGTLTIYDAGFPDQGRYECVARNSFGLAVTNMFLTVTAIQGRQAGDDFVESSILDAVQRVDSAINSTRRHLFSQKPHTSSDLLAQFHYPRDPLIVEMARAGEIFEHTLQLIRERVKQGLTVDLEGKEFRYNDLVSPRSLSLIANLSGCTARRPLPNCSNRCFHAKYRAHDGTCNNLQQPTWGAALTAFARLLQPAYRDGIRAPRGLGLPVGSRQPLPPPRLVATVWARAAAVTPDHSYTRMLMHWGWFLEHDLDHTVPALSTARFSDGRPCSSVCTNDPPCFPMNTRHADPRGTHAPCMLFARSSPACASGRPSATVDSVYAREQINQQTAYIDGSNVYGSSERESQALRDPSVPRGLLKTGFPWPPSGKPLLPFSTGPPTECARQEQESPCFLAGDHRANEHLALAAMHTLWFREHNRMATELSALNPHWEGNTVYQEARKIVGAELQHITYSHWLPKVLGDPGTRMLRGYRGYNPNVNAGIINSFATAAFRFGHTLINPILYRLNATLGEISEGHLPFHKALFSPSRIIKEGGIDPVLRGLFGVAAKWRAPSYLLSPELTQRLFSAAYSAAVDSAATIIQRGRDHGIPPYVDFRVFCNLTSVKNFEDLQNEIKDSEIRQKLRKLYGSPGDIDLWPALMVEDLIPGTRVGPTLMCLFVTQFQRLRDGDRFWYENPGVFTPAQLTQLKQASLSRVLCDNGDSIQQVQADVFVKAEYPQDYLNCSEIPKVDLRVWQDCCADCRSRGQFRAVTQESQKKRSAQYSYPVDKDMELSHLRSRQQDKIYVGEDARNVTVLAKTKFSQDFSTFAAEIQETITALREQINKLEARLRQAGCTDVRGVPRKAEERWMKEDCTHCICESGQVTCVVEICPPAPCPSPELVKGTCCPVCRDRGMPSDSPEKR

SEQ ID NO: 6896 - protein, 1316 aa, Homo sapiens
MEPRLFCWTTLFLLAGWCLPGLPCPSRCLCFKSTVRCMHLMLDHIPQVPQQTTVLDLRFNRIREIPGSAFKKLKNLNTLLLNNNHIRKISRNAFEGLENLLYLYLYKNEIHALDKQTFKGLISLEHLYIHFNQLEMLQPETFGDLLRLERLFLHNNKLSKIPAGSFSNLDSLKRLRLDSNALVCDCDLMWLGELLQGFAQHGHTQAAATCEYPRRLHGRAVASVTVEEFNCQSPRITFEPQDVEVPSGNTVYFTCRAEGNPKPEIIWIHNNHSLDLEDDTRLNVFDDGTLMIRNTRESDQGVYQCMARNSAGEAKTQSAMLRYSSLPAKPSFVIQPQDTEVLIGTSTTLECMATGHPHPLITWTRDNGLELDGSRHVATSSGLYLQNITQRDHGRFTCHANNSHGTVQAAANIIVQAPPQFTVTPKDQVVLEEHAVEWLCEADGNPPPVIVWTKTGGQLPVEGQHTVLSSGTLRIDRAAQHDQGQYECQAVSSLGVKKVSVQLTVKPKALAVFTQLPQDTSVEVGKNINISCHAQGEPQPIITWNKEGVQITESGKFHVDDEGTLTIYDAGFPDQGRYECVARNSFGLAVTNMFLTVTAIQGRQAGDDFVESSILDAVQRVDSAINSTRRHLFSQKPHTSSDLLAQFHYPRDPLIVEMARAGEIFEHTLQLIRERVKQGLTVDLEGKEFRYNDLVSPRSLSLIANLSGCTARRPLPNCSNRCFHAKYRAHDGTCNNLQQPTWGAALTAFARLLQPAYRDGIRAPRGLGLPVGSRQPLPPPRLVATVWARAAAVTPDHSYTRMLMHWGWFLEHDLDHTVPALSTARFSDGRPCSSVCTNDPPCFPMNTRHADPRGTHAPCMLFARSSPACASGRPSATVDSVYAREQINQQTAYIDGSNVYGSSERESQALRDPSVPRGLLKTGFPWPPSGKPLLPFSTGPPTECARQEQESPCFLAGDHRANEHLALAAMHTLWFREHNRMATELSALNPHWEGNTVYQEARKIVGAELQHITYSHWLPKVLGDPGTRMLRGYRGYNPNVNAGIINSFATAAFRFGHTLINPILYRLNATLGEISEGHLPFHKALFSPSRIIKEGGIDPVLRGLFGVAAKWRAPSYLLSPELTQRLFSAAYSAAVDSAATIIQRGRDHGIPPYVDFRVFCNLTSVKNFEDLQNEIKDSEIRQKLRKLYGSPGDIDLWPALMVEDLIPGTRVGPTLMCLFVTQFQRLRDGDRFWYENPGVFTPAQLTQLKQASLSRVLCDNGDSIQQVQADVFVKAEYPQDYLNCSEIPKVDLRVWQDCCADKQAGGTPEAGRVYRC

SEQ ID NO: 6897 - protein, 515 aa, Homo sapiens
MLMHWGWFLEHDLDHTVPALSTARFSDGRPCSSVCTNDPPCFPMNTRHADPRGTHAPCMLFARSSPACASGRPSATVDSVYAREQINQQTAYIDGSNVYGSSERESQALRDPSVPRGLLKTGFPWPPSGKPLLPFSTGPPTECARQEQESPCFLAGDHRANEHLALAAMHTLWFREHNRMATELSALNPHWEGNTVYQEARKIVGAELQHITYSHWLPKVLGDPGTRMLRGYRGYNPNVNAGIINSFATAAFRFGHTLINPILYRLNATLGEISEGHLPFHKALFSPSRIIKEGGIDPVLRGLFGVAAKWRAPSYLLSPELTQRLFSAAYSAAVDSAATIIQRGRDHGIPPYVDFRVFCNLTSVKNFEDLQNEIKDSEIRQKLRKLYGSPGDIDLWPALMVEDLIPGTRVGPTLMCLFVTQFQRLRDGDRFWYENPGVFTPAQLTQLKQASLSRVLCDNGDSIQQVQADVFVKAEYPQDYLNCSEIPKVDLRVWQDCCADKQAGGTPEAGRVYRC

SEQ ID NO: 6898 - protein, 462 aa, Homo sapiens
MASNSSSCPTPGGGHLNGYPVPPYAFFFPPMLGGLSPPGALTTLQHQLPVSGYSTPSPATIETQSSSSEEIVPSPPSPPPLPRIYKPCFVCQDKSSGYHYGVSACEGCKGFFRRSIQKNMVYTCHRDKNCIINKVTRNRCQYCRLQKCFEVGMSKESVRNDRNKKKKEVPKPECSESYTLTPEVGELIEKVRKAHQETFPALCQLGKYTTNNSSEQRVSLDIDLWDKFSELSTKCIIKTVEFAKQLPGFTTLTIADQITLLKAACLDILILRICTRYTPEQDTMTFSDGLTLNRTQMHNAGFGPLTDLVFAFANQLLPLEMDDAETGLLSAICLICGDRQDLEQPDRVDMLQEPLLEALKVYVRKRRPSRPHMFPKMLMKITDLRSISAKGAERVITLKMEIPGSMPPLIQEMLENSEGLDTLSGQPGGGGRDGGGLAPPPGSCSPSLSPSSNRSSPATHSP

SEQ ID NO: 6899 - protein, 457 aa, Homo sapiens
MYESVEVGGPTPNPFLVVDFYNQNRACLLPEKGLPAPGPYSTPLRTPLWNGSNHSIETQSSSSEEIVPSPPSPPPLPRIYKPCFVCQDKSSGYHYGVSACEGCKGFFRRSIQKNMVYTCHRDKNCIINKVTRNRCQYCRLQKCFEVGMSKESVRNDRNKKKKEVPKPECSESYTLTPEVGELIEKVRKAHQETFPALCQLGKYTTNNSSEQRVSLDIDLWDKFSELSTKCIIKTVEFAKQLPGFTTLTIADQITLLKAACLDILILRICTRYTPEQDTMTFSDGLTLNRTQMHNAGFGPLTDLVFAFANQLLPLEMDDAETGLLSAICLICGDRQDLEQPDRVDMLQEPLLEALKVYVRKRRPSRPHMFPKMLMKITDLRSISAKGAERVITLKMEIPGSMPPLIQEMLENSEGLDTLSGQPGGGGRDGGGLAPPPGSCSPSLSPSSNRSSPATHSP

SEQ ID NO: 6900 - protein, 365 aa, Homo sapiens
MASNSSSCPTPGGGHLNGYPVPPYAFFFPPMLGGLSPPGALTTLQHQLPVSGYSTPSPATVRNDRNKKKKEVPKPECSESYTLTPEVGELIEKVRKAHQETFPALCQLGKYTTNNSSEQRVSLDIDLWDKFSELSTKCIIKTVEFAKQLPGFTTLTIADQITLLKAACLDILILRICTRYTPEQDTMTFSDGLTLNRTQMHNAGFGPLTDLVFAFANQLLPLEMDDAETGLLSAICLICGDRQDLEQPDRVDMLQEPLLEALKVYVRKRRPSRPHMFPKMLMKITDLRSISAKGAERVITLKMEIPGSMPPLIQEMLENSEGLDTLSGQPGGGGRDGGGLAPPPGSCSPSLSPSSNRSSPATHSP

SEQ ID NO: 6901 - protein, 359 aa, Homo sapiens
MVKLFIGNLPREATEQEIRSLFEQYGKVLECDIIKNYGFVHIEDKTAAEDAIRNLHHYKLHGVNINVEASKNKSKASTKLHVGNISPTCTNQELRAKFEEYGPVIECDIVKDYAFVHMERAEDAVEAIRGLDNTEFQGKRMHVQLSTSRLRTAPGMGDQSGCYRCGKEGHWSKECPVDRTGRVADFTEQYNEQYGAVRTPYTMGYGESMYYNDAYGALDYYKRYRVRSYEAVAAAAAASAYNYAEQTMSHLPQVQSTTVTSHLNSTSVDPYDRHLLPNSGAAATSAAMAAAAATTSSYYGRDRSPLRRAAAMLPTVGEGYGYGPESELSQASAATRNSLYDMARYEREQYVDRARYSAF

SEQ ID NO: 6902 - protein, 1250 aa, Homo sapiens
MEQLSDEEIDHGAEEDSDKEDQDLDKMFGAWLGELDKLTQSLDSDKPMEPVKRSPLRQETNMANFSYRFSIYNLNEALNQGETVDLDALMADLCSIEQELSSIGSGNSKRQITETKATQKLPVSRHTLKHGTLKGLSSSSNRIAKPSHASYSLDDVTAQLEQASLSMDEAAQQSVLEDTKPLVTNQHRRTASAGTVSDAEVHSISNSSHSSITSAASSMDSLDIDKVTRPQELDLTHQGQPITEEEQAAKLKAEKIRVALEKIKEAQVKKLVIRVHMSDDSSKTMMVDERQTVRQVLDNLMDKSHCGYSLDWSLVETVSELQMERIFEDHENLVENLLNWTRDSQNKLIFMERIEKYALFKNPQNYLLGKKETAEMADRNKEVLLEECFCGSSVTVPEIEGVLWLKDDGKKSWKKRYFLLRASGIYYVPKGKAKVSRDLVCFLQLDHVNVYYGQDYRNKYKAPTDYCLVLKHPQIQKKSQYIKYLCCDDVRTLHQWVNGIRIAKYGKQLYMNYQEALKRTESAYDWTSLSSSSIKSGSSSSSIPESQSNHSNQSDSGVSDTQPAGHVRSQSIVSSVFSEAWKRGTQLEESSKARMESMNRPYTSLVPPLSPQPKIVTPYTASQPSPPLPPPPPPPPPPPPPPPPPPPPLPSQSAPSAGSAAPMFVKYSTITRLQNASQHSGALFKPPTPPVMQSQSVKPQILVPPNGVVPPPPPPPPPPTPGSAMAQLKPAPCAPSLPQFSAPPPPLKIHQVQHITQVAPPTPPPPPPIPAPLPPQAPPKPLVTIPAPTSTKTVAPVVTQAAPPTPTPPVPPAKKQPAFPASYIPPSPPTPPVPVPPPTLPKQQSFCAKPPPSPLSPVPSVVKQIASQFPPPPTPPAMESQPLKPVPANVAPQSPPAVKAKPKWQPSSIPVPSPDFPPPPPESSLVFPPPPPSPVPAPPPPPPPTASPTPDKSGSPGKKTSKTSSPGGKKPPPTPQRNSSIKSSSGAEHPEPKRPSVDSLVSKFTPPAESGSPSKETLPPPAAPPKPGKLNLSGVNLPGVLQQGCVSAKAPVLSGRGKDSVVEFPSPPSDSDFPPPPPETELPLPPIEIPAVFSGNTSPKVAVVNPQPQQWSKMSVKKAPPPTRPKRNDSTRLTQAEISEQPTMATVVPQVPTSPKSSLSVQPGFLADLNRTLQRKSITRHGSLSSRMSRAEPTATMDDMALPPPPPELLSDQQKAGYGGSHISGYATLRRGPPPAPPKRDQNTKLSRDW

SEQ ID NO: 6903 - protein, 597 aa, Homo sapiens
MEQLSDEEIDHGAEEDSDKEDQDLDKMFGAWLGELDKLTQSLDSDKPMEPVKRSPLRQETNMANFSYRFSIYNLNEALNQGETVDLDALMADLCSIEQELSSIGSGNSKRQITETKATQKLPVSRHTLKHGTLKGLSSSSNRIAKPSHASYSLDDVTAQLEQASLSMDEAAQQSVLEDTKPLVTNQHRRTASAGTVSDAEVHSISNSSHSSITSAASSMDSLDIDKVTRPQELDLTHQGQPITEEEQAAKLKAEKIRVALEKIKEAQVKKLVIRVHMSDDSSKTMMVDERQTVRQVLDNLMDKSHCGYSLDWSLVETVSELQMERIFEDHENLVENLLNWTRDSQNKLIFMERIEKYALFKNPQNYLLGKKETAEMADRNKEVLLEECFCGSSVTVPEIEGVLWLKDDGKKSWKKRYFLLRASGIYYVPKGKAKVSRDLVCFLQLDHVNVYYGQDYRNKYKAPTDYCLVLKHPQIQKKSQYIKYLCCDDVRTLHQWVNGIRIAKYGKQLYMNYQEALKRTESAYDWTSLSSSSIKSGSSSSSIPESQSNHSNQSDSGVSDTQPAGHVRSQSIVSSVFSEAWKRGTQLEESSKVTASF

SEQ ID NO: 6904 - protein, 624 aa, Homo sapiens
MEQLSDEEIDHGAEEDSDKEDQDLDKMFGAWLGELDKLTQSLDSDKPMEPVKRSPLRQETNMANFSYRFSIYNLNEALNQGETVDLDALMADLCSIEQELSSIGSGNSKRQITETKATQKLPVSRHTLKHGTLKGLSSSSNRIAKPSHASYSLDDVTAQLEQASLSMDEAAQQSVLEDTKPLVTNQHRRTASAGTVSDAEVHSISNSSHSSITSAASSMDSLDIDKVTRPQELDLTHQGQPITEHAISLRCSSKQAKRHIDFTEEQAELTPEEQAAKLKAEKIRVALEKIKEAQVKKLVIRVHMSDDSSKTMMVDERQTVRQVLDNLMDKSHCGYSLDWSLVETVSELQMERIFEDHENLVENLLNWTRDSQNKLIFMERIEKYALFKNPQNYLLGKKETAEMADRNKEVLLEECFCGSSVTVPEIEGVLWLKDDGKKSWKKRYFLLRASGIYYVPKGKAKVSRDLVCFLQLDHVNVYYGQDYRNKYKAPTDYCLVLKHPQIQKKSQYIKYLCCDDVRTLHQWVNGIRIAKYGKQLYMNYQEALKRTESAYDWTSLSSSSIKSGSSSSSIPESQSNHSNQSDSGVSDTQPAGHVRSQSIVSSVFSEAWKRGTQLEESSKVTASF

SEQ ID NO: 6905 - protein, 622 aa, Homo sapiens
MEQLSDEEIDHGAEEDSDKEDQDLDKMFGAWLGELDKLTQSLDSDKPMEPVKRSPLRQETNMANFSYRFSIYNLNEALNQGETVDLDALMADLCSIEQELSSIGSGNSKRQITETKATQKLPVSRHTLKHGTLKGLSSSSNRIAKPSHASYSLDDVTAQLEQASLSMDEAAQQSVLEDTKPLVTNQHRRTASAGTVSDAEVHSISNSSHSSITSAASSMDSLDIDKVTRPQELDLTHQGQPITEHSYLDRETSLLLRNIAGKPSHLLTKEEQAAKLKAEKIRVALEKIKEAQVKKLVIRVHMSDDSSKTMMVDERQTVRQVLDNLMDKSHCGYSLDWSLVETVSELQMERIFEDHENLVENLLNWTRDSQNKLIFMERIEKYALFKNPQNYLLGKKETAEMADRNKEVLLEECFCGSSVTVPEIEGVLWLKDDGKKSWKKRYFLLRASGIYYVPKGKAKVSRDLVCFLQLDHVNVYYGQDYRNKYKAPTDYCLVLKHPQIQKKSQYIKYLCCDDVRTLHQWVNGIRIAKYGKQLYMNYQEALKRTESAYDWTSLSSSSIKSGSSSSSIPESQSNHSNQSDSGVSDTQPAGHVRSQSIVSSVFSEAWKRGTQLEESSKVTASF

SEQ ID NO: 6906 - protein, 592 aa, Homo sapiens
MEQLSDEEIDHGAEEDSDKEDQDLDKMFGAWLGELDKLTQSLDSDKPMEPVKRSPLRQETNMANFSYRFSIYNLNEALNQGETVDLDALMADLCSIEQELSSIGSGNSKRQITETKATQKLPVSRHTLKHGTLKGLSSSSNRIAKPSHASYSLDDVTAQLEQASLSMDEAAQQSVLEDTKPLVTNQHRRTASAGTVSDAEVHSISNSSHSSITSAASSMDSLDIDKVTRPQELDLTHQGQPITEEEQAAKLKAEKIRVALEKIKEAQVKKLVIRVHMSDDSSKTMMVDERQTVRQVLDNLMDKSHCGYSLDWSLVETVSELQMERIFEDHENLVENLLNWTRDSQNKLIFMERIEKYALFKNPQNYLLGKKETAEMADRNKEVLLEECFCGSSVTVPEIEGVLWLKDDGKKSWKKRYFLLRASGIYYVPKGKAKVSRDLVCFLQLDHVNVYYGQDYRNKYKAPTDYCLVLKHPQIQKKSQYIKYLCCDDVRTLHQWVNGIRIAKYGKQLYMNYQEALKRTESAYDWTSLSSSSIKSGSSSSSIPESQSNHSNQSDSGVSDTQPAGHVRSQSIVSSVFSEAWKRGTQLEESSK

SEQ ID NO: 6907 - protein, 649 aa, Homo sapiens
MEQLSDEEIDHGAEEDSDKEDQDLDKMFGAWLGELDKLTQSLDSDKPMEPVKRSPLRQETNMANFSYRFSIYNLNEALNQGETVDLDALMADLCSIEQELSSIGSGNSKRQITETKATQKLPVSRHTLKHGTLKGLSSSSNRIAKPSHASYSLDDVTAQLEQASLSMDEAAQQSVLEDTKPLVTNQHRRTASAGTVSDAEVHSISNSSHSSITSAASSMDSLDIDKVTRPQELDLTHQGQPITEHAISLRCSSKQAKRHIDFTEEQAELTPHSYLDRETSLLLRNIAGKPSHLLTKEEQAAKLKAEKIRVALEKIKEAQVKKLVIRVHMSDDSSKTMMVDERQTVRQVLDNLMDKSHCGYSLDWSLVETVSELQMERIFEDHENLVENLLNWTRDSQNKLIFMERIEKYALFKNPQNYLLGKKETAEMADRNKEVLLEECFCGSSVTVPEIEGVLWLKDDGKKSWKKRYFLLRASGIYYVPKGKAKVSRDLVCFLQLDHVNVYYGQDYRNKYKAPTDYCLVLKHPQIQKKSQYIKYLCCDDVRTLHQWVNGIRIAKYGKQLYMNYQEALKRTESAYDWTSLSSSSIKSGSSSSSIPESQSNHSNQSDSGVSDTQPAGHVRSQSIVSSVFSEAWKRGTQLEESSKVTASF

SEQ ID NO: 6908 - protein, 619 aa, Homo sapiens
MEQLSDEEIDHGAEEDSDKEDQDLDKMFGAWLGELDKLTQSLDSDKPMEPVKRSPLRQETNMANFSYRFSIYNLNEALNQGETVDLDALMADLCSIEQELSSIGSGNSKRQITETKATQKLPVSRHTLKHGTLKGLSSSSNRIAKPSHASYSLDDVTAQLEQASLSMDEAAQQSVLEDTKPLVTNQHRRTASAGTVSDAEVHSISNSSHSSITSAASSMDSLDIDKVTRPQELDLTHQGQPITEHAISLRCSSKQAKRHIDFTEEQAELTPEEQAAKLKAEKIRVALEKIKEAQVKKLVIRVHMSDDSSKTMMVDERQTVRQVLDNLMDKSHCGYSLDWSLVETVSELQMERIFEDHENLVENLLNWTRDSQNKLIFMERIEKYALFKNPQNYLLGKKETAEMADRNKEVLLEECFCGSSVTVPEIEGVLWLKDDGKKSWKKRYFLLRASGIYYVPKGKAKVSRDLVCFLQLDHVNVYYGQDYRNKYKAPTDYCLVLKHPQIQKKSQYIKYLCCDDVRTLHQWVNGIRIAKYGKQLYMNYQEALKRTESAYDWTSLSSSSIKSGSSSSSIPESQSNHSNQSDSGVSDTQPAGHVRSQSIVSSVFSEAWKRGTQLEESSK

SEQ ID NO: 6909 - protein, 617 aa, Homo sapiens
MEQLSDEEIDHGAEEDSDKEDQDLDKMFGAWLGELDKLTQSLDSDKPMEPVKRSPLRQETNMANFSYRFSIYNLNEALNQGETVDLDALMADLCSIEQELSSIGSGNSKRQITETKATQKLPVSRHTLKHGTLKGLSSSSNRIAKPSHASYSLDDVTAQLEQASLSMDEAAQQSVLEDTKPLVTNQHRRTASAGTVSDAEVHSISNSSHSSITSAASSMDSLDIDKVTRPQELDLTHQGQPITEHSYLDRETSLLLRNIAGKPSHLLTKEEQAAKLKAEKIRVALEKIKEAQVKKLVIRVHMSDDSSKTMMVDERQTVRQVLDNLMDKSHCGYSLDWSLVETVSELQMERIFEDHENLVENLLNWTRDSQNKLIFMERIEKYALFKNPQNYLLGKKETAEMADRNKEVLLEECFCGSSVTVPEIEGVLWLKDDGKKSWKKRYFLLRASGIYYVPKGKAKVSRDLVCFLQLDHVNVYYGQDYRNKYKAPTDYCLVLKHPQIQKKSQYIKYLCCDDVRTLHQWVNGIRIAKYGKQLYMNYQEALKRTESAYDWTSLSSSSIKSGSSSSSIPESQSNHSNQSDSGVSDTQPAGHVRSQSIVSSVFSEAWKRGTQLEESSK

SEQ ID NO: 6910 - protein, 644 aa, Homo sapiens
MEQLSDEEIDHGAEEDSDKEDQDLDKMFGAWLGELDKLTQSLDSDKPMEPVKRSPLRQETNMANFSYRFSIYNLNEALNQGETVDLDALMADLCSIEQELSSIGSGNSKRQITETKATQKLPVSRHTLKHGTLKGLSSSSNRIAKPSHASYSLDDVTAQLEQASLSMDEAAQQSVLEDTKPLVTNQHRRTASAGTVSDAEVHSISNSSHSSITSAASSMDSLDIDKVTRPQELDLTHQGQPITEHAISLRCSSKQAKRHIDFTEEQAELTPHSYLDRETSLLLRNIAGKPSHLLTKEEQAAKLKAEKIRVALEKIKEAQVKKLVIRVHMSDDSSKTMMVDERQTVRQVLDNLMDKSHCGYSLDWSLVETVSELQMERIFEDHENLVENLLNWTRDSQNKLIFMERIEKYALFKNPQNYLLGKKETAEMADRNKEVLLEECFCGSSVTVPEIEGVLWLKDDGKKSWKKRYFLLRASGIYYVPKGKAKVSRDLVCFLQLDHVNVYYGQDYRNKYKAPTDYCLVLKHPQIQKKSQYIKYLCCDDVRTLHQWVNGIRIAKYGKQLYMNYQEALKRTESAYDWTSLSSSSIKSGSSSSSIPESQSNHSNQSDSGVSDTQPAGHVRSQSIVSSVFSEAWKRGTQLEESSK

SEQ ID NO: 6911 - protein, 413 aa, Homo sapiens
MKRVNSCVKSDEHVLEELETEGERQLKSLLQHQLDTSVSIEECMSKKESFAPGTMYKPFGKEAAGTMTLSQFQTLHEKDQETASLRELGLNETEILIWKSHVSGEKKTKLRATPEAIQNRLQDIEERISERQRILCLPQRFAKSKQLTRREMEIEKSLFQGADRHSFLKALYYQDEPQKKNKGDPMNNLESFYQEMIMKKRLEEFQLMRGEPFASHSLVSATSVGDSGTAESPSLLQDKGKQAAQGKGPSLHVANVIDFSPEQCWTGPKKLTQPIEFVPEDEIQRNRLSEEEIRKIPMFSSYNPGEPNKVLYLKNLSPRVTERDLVSLFARFQEKKGPPIQFRMMTGRMRGQAFITFPNKEIAWQALHLVNGYKLHGKILVIEFGKNKKQRSNLQATSLISCATGSTTEISGS

SEQ ID NO: 6912 - protein, 405 aa, Homo sapiens
MKRVNSCVKSDEHVLEELETEGERQLKSLLQHQLDTSVSIEECMSKKESFAPGTMYKPFGKEAAGTMTLSQFQTLHEKDQETASLRELGLNETEILIWKSHVSGEKKTKLRATPEAIQNRLQDIEERISERQRILCLPQRFAKSKQLTRREMEIEKSLFQGADRHSFLKALYYQDEPQKKNKGDPMNNLESFYQEMIMKKRLEEFQLMRGEPFASHSLVSATSVGDSGTAESPSLLQDKGKQAAQGKGPSLHVANVIDFSPEQCWTGPKKLTQPIEFVPEDEIQRNRLSEEEIRKIPMFSSYNPGEPNKVLYLKNLSPRVTERDLVSLFARFQEKKGPPIQFRMMTGRMRGQAFITFPNKEIAWQALHLVNGYKLHGKILVIEFGKNKKQRSNLQATSLISCATG

SEQ ID NO: 6913 - protein, 311 aa, Homo sapiens
MKRVNSCVKSDEHVLEELETEGERQLKSLLQHQLDTSVSIEECMSKKESFAPGTMYKPFGKEAAGTMTLSQFQTLHEKDQETASLRELGLNETEILIWKSHVSGEKKTKLRATPEAIQNRLQDIEERISERQRILCLPQRFAKSKQLTRREMEIEKSLFQGADRHSFLKALYYQAYHKKTSADKYMTSMKRKIKLGTKDEPQKKNKGDPMNNLESFYQEMIMKKRLEEFQLMRGLTSFPREDFQNLSYEGTTSVLGAKWQKRTGRTSTFSILLVSLLSETVFTSSAMYGIPHLLTMSLKFSTRIGKLSFTP

SEQ ID NO: 6914 - protein, 977 aa, Homo sapiens
MRTAGRDPVPRRSPRWRRAVPLCETSAGRRVTQLRGDDLRRPATMKGKERSPVKAKRSRGGEDSTSRGERSKKLGGSGGSNGSSSGKTDSGGGSRRSLHLDKSSSRGGSREYDTGGGSSSSRLHSYSSPSTKNSSGGGESRSSSRGGGGESRSSGAASSAPGGGDGAEYKTLKISELGSQLSDEAVEDGLFHEFKRFGDVSVKISHLSGSGSGDERVAFVNFRRPEDARAAKHARGRLVLYDRPLKIEAVYVSRRRSRSPLDKDTYPPSASVVGASVGGHRHPPGGGGGQRSLSPGGAALGYRDYRLQQLALGRLPPPPPPPLPRDLERERDYPFYERVRPAYSLEPRVGAGAGAAPFREVDEISPEDDQRANRTLFLGNLDITVTESDLRRAFDRFGVITEVDIKRPSRGQTSTYGFLKFENLDMSHRAKLAMSGKIIIRNPIKIGYGKATPTTRLWVGGLGPWVPLAALAREFDRFGTIRTIDYRKGDSWAYIQYESLDAAHAAWTHMRGFPLGGPDRRLRVDFADTEHRYQQQYLQPLPLTHYELVTDAFGHRAPDPLRGARDRTPPLLYRDRDRDLYPDSDWVPPPPPVRERSTRTAATSVPAYEPLDSLDRRRDGWSLDRDRGDRDLPSSRDQPRKRRLPEESGGRHLDRSPESDRPRKRHCAPSPDRSPELSSSRDRYNSDNDRSSRLLLERPSPIRDRRGSLEKSQGDKRDRKNSASAERDRKHRTTAPTEGKSPLKKEDRSDGSAPSTSTASSKLKSPSQKQDGGTAPVASASPKLCLAWQGMLLLKNSNFPSNMHLLQGDLQVASSLLVEGSTGGKVAQLKITQRLRLDQPKLDEVTRRIKVAGPNGYAILLAVPGSSDSRSSSSSAASDTATSTQRPLRNLVSYLKQKQAAGVISLPVGGNKDKENTGVLHAFPPCEFSQQFLDSPAKALAKSEEDYLVMIIVRGFGFQIGVRYENKKRENLALTLL

SEQ ID NO: 6915 - protein, 957 aa, Homo sapiens
MRTAGRDPVPRRSPRWRRAVPLCETSAGRRVTQLRGDDLRRPATMKGKERSPVKAKRSRGGEDSTSRGERSKKLGGSGGSNGSSSGKTDSGGGSRRSLHLDKSSSRGGSREYDTGGGSSSSRLHSYSSPSTKNSSGGGESRSSSRGGGGESRSSGAASSAPGGGDGAEYKTLKISELGSQLSDEAVEDGLFHEFKRFGDVSVKISHLSGSGSGDERVAFVNFRRPEDARAAKHARGRLVLYDRPLKIEAVYVSRRRSRSPLDKDTYPPSASVVGASVGGHRHPPGGGGGQRSLSPGGAALGYRDYRLQQLALGRLPPPPPPPLPRDLERERDYPFYERVRPAYSLEPRVGAGAGAAPFREVDEISPEDDQRANRTLFLGNLDITVTESDLRRAFDRFGVITEVDIKRPSRGQTSTYGFLKFENLDMSHRAKLAMSGKIIIRNPIKIGYGKATPTTRLWVGGLGPWVPLAALAREFDRFGTIRTIDYRKGDSWAYIQYESLDAAHAAWTHMRGFPLGGPDRRLRVDFADTEHRYQQQYLQPLPLTHYELVTDAFGHRAPDPLRGARDRTPPLLYRDRDRDLYPDSDWVPPPPPVRERSTRTAATSVPAYEPLDSLDRRRDGWSLDRDRGDRDLPSSRDQPRKRRLPEESGGRHLDRSPESDRPRKRHCAPSPDRSPELSSSRDRYNSDNDRSSRLLLERPSPIRDRRGSLEKSQGDKRDRKNSASAERDRKHRTTAPTEGKSPLKKEDRSDGSAPSTSTASSKLKSPSQKQDGGTAPVASASPKLCLAWQGMLLLKNSNFPSNMHLLQGDLQVASSLLVEGSTGGKVAQLKITQRLRLDQPKLDEVTRRIKVAGPNGYAILLAVPGSSDSRSSSSSAASDTATSTQRPLRNLVSYLKQKQAAGVISLPVGGNKDKENTGVLHAFPPCEFSQQFLDSPAKALAKSEEDYLVMIIVRGAS

SEQ ID NO: 6916 - protein, 969 aa, Homo sapiens
MRTAGRDPVPRRSPRWRRAVPLCETSAGRRVTQLRGDDLRRPATMKGKERSPVKAKRSRGGEDSTSRGERSKKLGGSGGSNGSSSGKTDSGGGSRRSLHLDKSSSRGGSREYDTGGGSSSSRLHSYSSPSTKNSSGGGESRSSSRGGGGESRSSGAASSAPGGGDGAEYKTLKISELGSQLSDEAVEDGLFHEFKRFGDVSVKISHLSGSGSGDERVAFVNFRRPEDARAAKHARGRLVLYDRPLKIEAVYVSRRRSRSPLDKDTYPPSASVVGASVGGHRHPPGGGGGQRSLSPGGAALGYRDYRLQQLALGRLPPPPPPPLPRDLERERDYPFYERVRPAYSLEPRVGAGAGAAPFREVDEISPEDDQRANRTLFLGNLDITVTESDLRRAFDRFGVITEVDIKRPSRGQTSTYGFLKFENLDMSHRAKLAMSGKIIIRNPIKIGYGKATPTTRLWVGGLGPWVPLAALAREFDRFGTIRTIDYRKGDSWAYIQYESLDAAHAAWTHMRGFPLGGPDRRLRVDFADTEHRYQQQYLQPLPLTHYELVTDAFGHRAPDPLRGARDRTPPLLYRDRDRDLYPDSDWVPPPPPVRERSTRTAATSVPAYEPLDSLDRRRDGWSLDRDRGDRDLPSSRDQPRKRRLPEESGGRHLDRSPESDRPRKRHCAPSPDRSPELSSSRDRYNSDNDRSSRLLLERPSPIRDRRGSLEKSQGDKRDRKNSASAERDRKHRTTAPTEGKSPLKKEDRSDGSAPSTSTASSKLKSPSQKQDGGTAPVASASPKLCLAWQGMLLLKNSNFPSNMHLLQGDLQVASSLLVEGSTGGKVAQLKITQRLRLDQPKLDEVTRRIKVAGPNGYAILLAVPGSSDSRSSSSSAASDTATSTQRPLRNLVSYLKQKQAAGVISLPVGGNKDKENTGVLHAFPPCEFSQQFLDSPAKALAKSEEDYLVMIIVRAKLVEQRMKIWNSKL

SEQ ID NO: 6917 - protein, 913 aa, Homo sapiens
MKGKERSPVKAKRSRGGEDSTSRGERSKKLGGSGGSNGSSSGKTDSGGGSRRSLHLDKSSSRGGSREYDTGGGSSSSRLHSYSSPSTKNSSGGGESRSSSRGGGGESRSSGAASSAPGGGDGAEYKTLKISELGSQLSDEAVEDGLFHEFKRFGDVSVKISHLSGSGSGDERVAFVNFRRPEDARAAKHARGRLVLYDRPLKIEAVYVSRRRSRSPLDKDTYPPSASVVGASVGGHRHPPGGGGGQRSLSPGGAALGYRDYRLQQLALGRLPPPPPPPLPRDLERERDYPFYERVRPAYSLEPRVGAGAGAAPFREVDEISPEDDQRANRTLFLGNLDITVTESDLRRAFDRFGVITEVDIKRPSRGQTSTYGFLKFENLDMSHRAKLAMSGKIIIRNPIKIGYGKATPTTRLWVGGLGPWVPLAALAREFDRFGTIRTIDYRKGDSWAYIQYESLDAAHAAWTHMRGFPLGGPDRRLRVDFADTEHRYQQQYLQPLPLTHYELVTDAFGHRAPDPLRGARDRTPPLLYRDRDRDLYPDSDWVPPPPPVRERSTRTAATSVPAYEPLDSLDRRRDGWSLDRDRGDRDLPSSRDQPRKRRLPEESGGRHLDRSPESDRPRKRHCAPSPDRSPELSSSRDRYNSDNDRSSRLLLERPSPIRDRRGSLEKSQGDKRDRKNSASAERDRKHRTTAPTEGKSPLKKEDRSDGSAPSTSTASSKLKSPSQKQDGGTAPVASASPKLCLAWQGMLLLKNSNFPSNMHLLQGDLQVASSLLVEGSTGGKVAQLKITQRLRLDQPKLDEVTRRIKVAGPNGYAILLAVPGSSDSRSSSSSAASDTATSTQRPLRNLVSYLKQKQAAGVISLPVGGNKDKENTGVLHAFPPCEFSQQFLDSPAKALAKSEEDYLVMIIVRGAS

SEQ ID NO: 6918 - protein, 1052 aa, Homo sapiens
MMQATAVVETASGKGYHSNGGNLQKDKPSNPKKENLLLSSNGCDEVKLTFPDDDWNSSTLEQRANNKEISNIDKMDLLEPFFSVSQDTNTESTQFQSSELEDSTDYAFLNKTYSIPYSESKLKKESLTPLSSELDPEVQKKEEVFFNILEHQDKTVGLERIYNISDANYRESAEDTQKHDTDEDSQQEYHSAEEQEYISNHLSFDQTKALDISNPEVVELGNSGYEVKCASNVEDNRVNSGSGSIISFDSLDVYGQEESLHVSKFQNSVMLREYHDLKHEKYKEQETNSMYHTVFDGSVLRSNSPGNQESQSKSGSLSPQKVLKMKIYTENMKSQINEGKDFCGNKIVENKILLHLENPSTLPQDKALETLLQPCKDCQTSWTSVFDDSIISACGYYESLQNTADSALDFSAMLPKIAVRDNQAIEDNTSLKVAHSSTTKKTCFHNIGEMCTKSLTDAASCTVTINQTVDVSTDFRACFTTSRATSARPSVVSTSSNTEITMMNKKRPDEWQNEKQKSVACSTDWSYSEDCIDTQMAITKGSGKSLSVDSLKPNGNFLNKDFLELRKACGITDLKKHPEREFQLFKDTEKDLPSMCCQKIMQRAIKAELHLLNVHYQMCRRHCCDIYKLVMENREGLNMNLSSNSAKKELGSALLSLLGDLKVRYVTLKEKIHKGIPLEELPPLSLESKLLSTFSTFASRLMKKETHVFSEADAEQDNQRAHDVDVSSNLKKTLSQMSLSSDNSHATQNISPKKDDFKNGDINADFSQLKLGDKDCRHYQETSEDWSDAKESLTGVDVSGTQGNQVEQDTWNLDLTGEMKNVEPSQRDKGYLIHVGGLCPSVSEADLRSHFQKYQVSEISIYDSTNYRYASLAFTKNSDAKIAVKEMNGIEINGKSVNVWPVKILGEYTSPLSSKNGNRISSNNLEKSTNKQIHSEFSISRLPRTRPRQLGSEQDSEVFPSDQGVKKNCKQIESAKLLPDTPVQFIPPNTLNLRSFTKIIKRLAELHPEVSRDHIINALQEVRIRHKGFLNGLSITTIVEMTSSLLKNSASS

SEQ ID NO: 6919 - protein, 318 aa, Homo sapiens
MVELMFPLLLLLLPFLLYMAAPQIRKMLSSGVCTSTVQLPGKVVVVTGANTGIGKETAKELAQRGARVYLACRDVEKGELVAKEIQTTTGNQQVLVRKLDLSDTKSIRAFAKGFLAEEKHLHVLINNAGVMMCPYSKTADGFEMHIGVNHLGHFLLTHLLLEKLKESAPSRIVNVSSLAHHLGRIHFHNLQGEKFYNAGLAYCHSKLANILFTQELARRLKGSGVTTYSVHPGTVQSELVRHSSFMRWMWWLFSFFIKTPQQGAQTSLHCALTEGLEILSGNHFSDCHVAWVSAQARNETIARRLWDVSCDLLGLPID

SEQ ID NO: 6920 - protein, 305 aa, Homo sapiens
MVELMFPLLLLLLPFLLYMAAPQIRKMLSSGVCTSTVQLPGKVVVVTGANTGARVYLACRDVEKGELVAKEIQTTTGNQQVLVRKLDLSDTKSIRAFAKGFLAEEKHLHVLINNAGVMMCPYSKTADGFEMHIGVNHLGHFLLTHLLLEKLKESAPSRIVNVSSLAHHLGRIHFHNLQGEKFYNAGLAYCHSKLANILFTQELARRLKGSGVTTYSVHPGTVQSELVRHSSFMRWMWWLFSFFIKTPQQGAQTSLHCALTEGLEILSGNHFSDCHVAWVSAQARNETIARRLWDVSCDLLGLPID

SEQ ID NO: 6921 - protein, 248 aa, Homo sapiens
MVELMFPLLLLLLPFLLYMAAPQIRKMLSSGVCTSTVQLPGKVVVVTGANTGIGKETAKELAQRGARVYLACRDVEKGELVAKEIQTTTGNQQVLVRKLDLSDTKSIRAFAKGFLAEEKHLHVLINNAGVMMCPYSKTADGFEMHIGVNHLGSGVTTYSVHPGTVQSELVRHSSFMRWMWWLFSFFIKTPQQGAQTSLHCALTEGLEILSGNHFSDCHVAWVSAQARNETIARRLWDVSCDLLGLPID

SEQ ID NO: 6922 - protein, 1159 aa, Homo sapiens
MSLPQPTPRMAELRKPTSSLTPPEDPDSQPPSSKRLCLEEPGGVFKAGWRLPLVPRLSEAEKVWELSPRPFKGLLVSTNAIFDNSTDSCVEKSVSGKQICNLKCSNLKFQMSSCLQSPPSQSPDSDLRASGRSEAGLHDREAFSVHRSNSSKAGVSQLLPSTSIHDIHGIRNENRKQQFVQGRDNVHKENPFLDVTFYKETKSPFHEIKNRCKANSVVPSNKRENNISSSVLKISKSQNQPSLEIAKPSYFRDSGTISVPQFPMDLNSKMSSVYLKEIAKKKNDKKEAYVRDFTNIYWSQNRPDVKKQKLQNDKKTVEAENIFSKCYENDYPSLSSQNTCKRKDLISSNYCNCSSIQCNVRDSRKNFAILENANWEEAECLDSYVLTRLEKSQNWDCNVRHILRRNRGNCWIINNCKTKCENMKKTEEKWNWLLLLEIDLLSKEDYHCAKVINAYEEQSKLLVREILGSQTALITTVWLNGKGENDNTLQLRYNTTQKVFHVNNPFESFIIEIFYFHKSISGNKKDNSILTCCNILKCKKQIGIIGIQNLITRNMNTNIKNGILSIYLQDSVSEPLDILLKTNIAFLLNNFDSLTRIENDFELEEECIFKCMLYLKYPKNIVENHTAYLVKILTSSRLLEDNMKPMLKKRKLFRTEQVFEKSKKKLINSFSMTTQNTGFPIFETYEKIPLLMDFDDMDEISLIREITCQNMSCPQQVVNVENWAHYNSSTVKAHGNSCPQFIQNNRGYINENFYEVNMHSQDLNMERKQGHNKISNFDCEHIFEDLCNVRQQAIPASHNIIHNEETHTTSITQVLNFWNLLSEIEEKKYDLILKEEVKVTAESLTNSCQVHKDTKIEKEEKDSFFPMDDMFSVQSVSLISKEVNVEENKYVNQNYVTNTNEYESILPEREIANSKDFHRKNDSALYINHQFETGLSEGNDECFQDLAAKYLSTEALTIVKDFEMKRKFDLVLEELRMFHEISRENELLSTVETNNGQENYFGENDAEKVKMEIEKDLKMVVVNKIRASSSFHDTIAGPNMGKSHQSLFKWKTVPNNGEQEVPNESCYPSRSEEELLYSTSEKDCETPLPKRPAFLPDECKEEFNYLLRGGSHFPHGISRVRPLKTCSRPIRIGLSRKARIKQLHPYLKQMCYGNLKENF

SEQ ID NO: 6923 - protein, 309 aa, Homo sapiens
MSFNLQSSKKLFIFLGKSLFSLLEAMIFALLPKPRKNVAGEIVLITGAGSGLGRLLALQFARLGSVLVLWDINKEGNEETCKMAREAGATRVHAYTCDCSQKEGVYRVADQVKKEVGDVSILINNAGIVTGKKFLDCPDELMEKSFDVNFKAHLWTYKAFLPAMIANDHGHLVCISSSAGLSGVNGLADYCASKFAAFGFAESVFVETFVQKQKGIKTTIVCPFFIKTGMFEGCTTGCPSLLPILEPKYAVEKIVEAILQEKMYLYMPKLLYFMMFLKSFLPLKTGLLIADYLGILHAMDGFVDQKKKL

SEQ ID NO: 6924 - protein, 265 aa, Homo sapiens
MSFNLQSSKKLFIFLGKSLFSLLEAMIFALLPKPRKNVAGEIVLITGAGSGLGRLLALQFARLGSVLVLWDINKEGNEETCKMAREAGATRVHAYTCDCSQKEGVYRVADQTYKAFLPAMIANDHGHLVCISSSAGLSGVNGLADYCASKFAAFGFAESVFVETFVQKQKGIKTTIVCPFFIKTGMFEGCTTGCPSLLPILEPKYAVEKIVEAILQEKMYLYMPKLLYFMMFLKSFLPLKTGLLIADYLGILHAMDGFVDQKKKL

SEQ ID NO: 6925 - protein, 201 aa, Homo sapiens
MAGKSSLFKVILLGDGGVGKSSLMNRYVTNKFDTQLFHTIGVEFLNKDLEVDGHFVTMQIWDTAGQERFRSLRTPFYRGSDCCLLTFSVDDSQSFQNLSNWKKEFIYYADVKEPESFPFVILGNKIDISERQVSTEEAQAWCRDNGDYPYFETSAKDATNVAAAFEEAVRRVLATEDRSDHLIQTDTVNLHRKPKPSSSCC

SEQ ID NO: 6926 - protein, 476 aa, Homo sapiens
MGLKKMKGLSYDEAFAMANDPLEGFHEVNLASPTSPDLLGVYESGTQEQTTSPSVIYRPHPSALSSVPIQANALDVSELPTQPVYSSPRRLNCAEISSISFHVTDPAPCSTSGVTAGLTKLTTRKDNYNAEREFLQGATITEACDGSDDIFGLSTDSLSRLRSPSVLEVREKGYERLKEELAKAQRELKLKDEECERLSKVRDQLGQELEELTASLFEEAHKMVREANIKQATAEKQLKEAQGKIDVLQAEVAALKTLVLSSSPTSPTQEPLPGGKTPFKKGHTRNKSTSSAMSGSHQDLSVIQPIVKDCKEADLSLYNEFRLWKDEPTMDRTCPFLDKIYQEDIFPCLTFSKSELASAVLEAVENNTLSIEPVGLQPIRFVKASAVECGGPKKCALTGQSKSCKHRIKLGDSSNYYYISPFCRYRITSVCNFFTYIRYIQQGLVKQQDVDQMFWEVMQLRKEMSLAKLGYFKEEL

SEQ ID NO: 6927 - protein, 460 aa, Homo sapiens
MANDPLEGFHEVNLASPTSPDLLGVYESGTQEQTTSPSVIYRPHPSALSSVPIQANALDVSELPTQPVYSSPRRLNCAEISSISFHVTDPAPCSTSGVTAGLTKLTTRKDNYNAEREFLQGATITEACDGSDDIFGLSTDSLSRLRSPSVLEVREKGYERLKEELAKAQRELKLKDEECERLSKVRDQLGQELEELTASLFEEAHKMVREANIKQATAEKQLKEAQGKIDVLQAEVAALKTLVLSSSPTSPTQEPLPGGKTPFKKGHTRNKSTSSAMSGSHQDLSVIQPIVKDCKEADLSLYNEFRLWKDEPTMDRTCPFLDKIYQEDIFPCLTFSKSELASAVLEAVENNTLSIEPVGLQPIRFVKASAVECGGPKKCALTGQSKSCKHRIKLGDSSNYYYISPFCRYRITSVCNFFTYIRYIQQGLVKQQDVDQMFWEVMQLRKEMSLAKLGYFKEEL

SEQ ID NO: 6928 - protein, 395 aa, Homo sapiens
MANDPLEGFHEVNLASPTSPDLLGVYESGTQEQTTSPSVIYRPHPSALSSVPIQANALDVSELPTQPVYSSPRRLNCAEISSISFHVTDPAPCSTSGVTAGLTKLTTRKDNYNAEREFLQGATITEACDGSDDIFGLSTDSLSRLRSPSVLEVREKGYERLKEELAKAQRELKLKDEECERLSKVRDQLGQELEELTASLFEEAHKMVREANIKQATAEKQLKEAQGKIDVLQAEVAALKTLVLSSSPTSPTQEPLPGGKTPFKKGHTRNKSTSSAMSGSHQDLSVIQPIVKDCKEADLSLYNEFRLWKDEPTMDRTCPFLDKIYQEDIFPCLTFSKSELASAVLEAVENNTLSIEPVGLQPIRFVKASAVECGGPKSLLYVTFLHTFDTFSRDS

SEQ ID NO: 6929 - protein, 411 aa, Homo sapiens
MGLKKMKGLSYDEAFAMANDPLEGFHEVNLASPTSPDLLGVYESGTQEQTTSPSVIYRPHPSALSSVPIQANALDVSELPTQPVYSSPRRLNCAEISSISFHVTDPAPCSTSGVTAGLTKLTTRKDNYNAEREFLQGATITEACDGSDDIFGLSTDSLSRLRSPSVLEVREKGYERLKEELAKAQRELKLKDEECERLSKVRDQLGQELEELTASLFEEAHKMVREANIKQATAEKQLKEAQGKIDVLQAEVAALKTLVLSSSPTSPTQEPLPGGKTPFKKGHTRNKSTSSAMSGSHQDLSVIQPIVKDCKEADLSLYNEFRLWKDEPTMDRTCPFLDKIYQEDIFPCLTFSKSELASAVLEAVENNTLSIEPVGLQPIRFVKASAVECGGPKSLLYVTFLHTFDTFSRDS

SEQ ID NO: 6930 - protein, 304 aa, Homo sapiens
MANDPLEGFHEVNLASPTSPDLLGVYESGTQEQTTSPSVIYRPHPSALSSVPIQANALDVSELPTQPVYSSPRRLNCAEISSISFHVTDPAPCSTSGVTAGLTKLTTRKDNYNAEREFLQGATITEACDGSDDIFGLSTDSLSRLRSPSVLEVREKGYERLKEELAKAQRELKLKDEECERLSKVRDQLGQELEELTASLFEEAHKMVREANIKQATAEKQLKEAQGKIDVLQAEVAALKTLVLSSSPTSPTQEPLPGGKTPFKKGHTRNKSTSSAMSGSHQDLSVIQPIVKDCKEKMCSHWPE

SEQ ID NO: 6931 - protein, 320 aa, Homo sapiens
MGLKKMKGLSYDEAFAMANDPLEGFHEVNLASPTSPDLLGVYESGTQEQTTSPSVIYRPHPSALSSVPIQANALDVSELPTQPVYSSPRRLNCAEISSISFHVTDPAPCSTSGVTAGLTKLTTRKDNYNAEREFLQGATITEACDGSDDIFGLSTDSLSRLRSPSVLEVREKGYERLKEELAKAQRELKLKDEECERLSKVRDQLGQELEELTASLFEEAHKMVREANIKQATAEKQLKEAQGKIDVLQAEVAALKTLVLSSSPTSPTQEPLPGGKTPFKKGHTRNKSTSSAMSGSHQDLSVIQPIVKDCKEKMCSHWPE

SEQ ID NO: 6932 - protein, 315 aa, Homo sapiens
MANDPLEGFHEVNLASPTSPDLLGVYESGTQEQTTSPSVIYRPHPSALSSVPIQANALDVSELPTQPVYSSPRRLNCAEISSISFHVTDPAPCSTSGVTAGLTKLTTRKDNYNAEREFLQGATITEACDGSDDIFGLSTDSLSRLRSPSVLEVREKGYERLKEELAKAQRELKLKDEECERLSKVRDQLGQELEELTASLFEEAHKMVREANIKQATAEKQLKEAQGKIDVLQAEVAALKTLVLSSSPTSPTQEPLPGGKTPFKKGHTRNKSTSSAMSGSHQDLSVIQPIVKDCKEVTHQGLSPLTLLILVSSHH

SEQ ID NO: 6933 - protein, 254 aa, Homo sapiens
MVREANIKQATAEKQLKEAQGKIDVLQAEVAALKTLVLSSSPTSPTQEPLPGGKTPFKKGHTRNKSTSSAMSGSHQDLSVIQPIVKDCKEADLSLYNEFRLWKDEPTMDRTCPFLDKIYQEDIFPCLTFSKSELASAVLEAVENNTLSIEPVGLQPIRFVKASAVECGGPKKCALTGQSKSCKHRIKLGDSSNYYYISPFCRYRITSVCNFFTYIRYIQQGLVKQQDVDQMFWEVMQLRKEMSLAKLGYFKEEL

SEQ ID NO: 6934 - protein, 157 aa, Homo sapiens [sequence omitted]

SEQ ID NO: 6935 - protein, 269 aa, Homo sapiens
MERSQSRLSLSASFEALAIYFPCMNSFDDEDAGDSRRLKGAIQRSTETGLAVEMPSRTLRQASHESIEDSMNSYGSEGNLNYGGVCLASDAQFSDFLGSMGPAQFVGRQTLATTPMGDVEIGLQERNGQLEVDIIQARGLTAKPGSKTLPAAYIKAYLLENGICIAKKKTKVARKSLDPLYNQVLLFPESPQGKVLQVIVWGNYGRMERKQFMGVARVLLEELDLTTLAVGWYKLFPTSSMVDPATGPLLRQASQLSLESTVGPCGERS

SEQ ID NO: 6936 - protein, 270 aa, Homo sapiens
MERSQSRLSLSASFEALAIYFPCMNSFDDEDAEGDSRRLKGAIQRSTETGLAVEMPSRTLRQASHESIEDSMNSYGSEGNLNYGGVCLASDAQFSDFLGSMGPAQFVGRQTLATTPMGDVEIGLQERNGQLEVDIIQARGLTAKPGSKTLPAAYIKAYLLENGICIAKKKTKVARKSLDPLYNQVLLFPESPQGKVLQVIVWGNYGRMERKQFMGVARVLLEELDLTTLAVGWYKLFPTSSMVDPATGPLLRQASQLSLESTVGPCGERS

SEQ ID NO: 6937 - protein, 985 aa, Homo sapiens
MIRHAGAPARGDPTGPVPVVGKGEEEEEEDGMRLCLPANPKNCLPHRRGISILEKLIKTCPVWLQLSLGQAEVARILHRVVAGMFLVRRDSSSKQLVLCVHFPSLNESSAEVLEYTIKEEKSILYLEGSALVFEDIFRLIAFYCVSRDLLPFTLRLPQAILEASSFTDLETIANLGLGFWDSSLNPPQERGKPAEPPRDRAPGFPLVSSLRPTAHDANCACEIELSVGNDRLWFVNPIFIEDCSSALPTDQPPLGNCPARPLPPTSDATSPTSRWAPRRPPPPPPVLPLQPCSPAQPPVLPALAPAPACPLPTSPPVPAPHVTPHAPGPPDHPNQPPMMTCERLPCPTAGLGPLREEAMKPGAASSPLQQVPAPPLPAKKNLPTAPPRRRVSERVSLEDQSPGMAAEGDQLSLPPQGTSDGPEDTPRESTEQGQDTEVKASDPHSMPELPRTAKQPPVPPPRKKRISRQLASTLPAPLENAELCTQAMALETPTPGPPREGQSPASQAGTQHPPAQATAHSQSSPEFKGSLASLSDSLGVSVMATDQDSYSTSSTEEELEQFSSPSVKKKPSMILGKARHRLSFASFSSMFHAFLSNNRKLYKKVVELAQDKGSYFGSLVQDYKVYSLEMMARQTSSTEMLQEIRTMMTQLKSYLLQSTELKALVDPALHSEEELEAIVESALYKCVLKPLKEAINSCLHQIHSKDGSLQQLKENQLVILATTTTDLGVTTSVPEVPMMEKILQKFTSMHKAYSPEKKISILLKTCKLIYDSMALGNPGKPYGADDFLPVLMYVLARSNLTEMLLNVEYMMELMDPALQLGEGSYYLTTTYGALEHIKSYDKITVTRQLSVEVQDSIHRWERRRTLNKARASRSSVQDFICVSYLEPEQQARTLASRADTQAQALCAQCAEKFAVERPQAHRLFVLVDGRCFQLADDALPHCIKGYLLRSEPKRDFHFVYRPLDGGGGGGGGSPPCLVVREPNFL

SEQ ID NO: 6938 - protein, 903 aa, Homo sapiens
MIRHAGAPARGDPTGPVPVVGKGEEEEEEDGMRLCLPANPKNCLPHRRGISILEKLIKTCPVWLQLSLGQAEVARILHRVVAGMFLVRRDSSSKQLVLCVHFPSLNESSAEVLEYTIKEEKSILYLEGSALVFEDIFRLIAFYCVSRDLLPFTLRLPQAILEASSFTDLETIANLGLGFWDSSLNPPQERGKPAEPPRDRAPGFPLVSSLRPTAHDANCACEIELSVGNDRLWFVNPIFIEDCSSALPTDQPPLGNCPARPLPPTSDATSPTSRWAPRRPPPPPPVLPLQPCSPAQPPVLPALAPAPACPLPTSPPVPAPHVTPHAPGPPDHPNQPPMMTCERLPCPTAGLGPLREEAMKPGAASSPLQQVPAPPLPAKKNLPTAPPRRRVSERVSLEDQSPGMAAEGDQLSLPPQGTSDGPEDTPRESTEQGQDTEVKASDPHSMPELPRTAKQPPVPPPRKKRISRQLASTLPAPLENAELCTQAMALETPTPGPPREGQSPASQAGTQHPPAQATAHSQSSPEFKGSLASLSDSLGVSVMATDQDSYSTSSTEEELEQFSSPSVKKKPSMILGKARHRLSFASFSSMFHAFLSNNRKLYKKVVELAQDKGSYFGSLVQDYKVYSLEMMARQTSSTEMLQEIRTMMTQLKSYLLQSTELKALVDPALHSEEELEAIVESALYKCVLKPLKEAINSCLHQIHSKDGSLQQLKENQLVILATTTTDLGVTTSVPEVPMMEKILQKFTSMHKAYSPEKKISILLKTCKLIYDSMALGNPGKPYGADDFLPVLMYVLARSNLTEMLLNVEYMMELMDPALQLGEGSYYLTTTYGALEHIKSYDKITVTRQLSVEVQDSIHRWERRRTLNKARASRSSVQVRPESGRGPVGPCPRHHPCCLLAKEP

SEQ ID NO: 6939 - protein, 184 aa, Homo sapiens [sequence omitted]

SEQ ID NO: 6940 - protein, 146 aa, Homo sapiens
MHIRKATKYLKDVTLQKQCVPFRRYNGGVGRCAQAKQWGWTQGRWPKKSAEFLLHMLKNAESNAELKGLDVDSLVIEHIQVNKAPKMRRRTYRAHGRINPYMSSPCHIEMILTEKEQIVPKPEEEVAQKKKISQKKLKKQKLMARE

SEQ ID NO: 6941 - protein, 228 aa, Homo sapiens
MVRYSLDPENPTKSCKSRGSNLRVHFKNTRETAQAIKGMHIRKATKYLKDVTLQKQCVPFRRYNGGVGRCAQAKQWGWTQGRWPKKSAEFLLHMLKNAESNAELKGLDVDSLVIEHIQVNKAPKMRRRTYRAHGRINPYMSSPCHIEMILTEKEQIVPKPEEEVAQKKKLRSSSLGKWCAFLVSSFQFCSGSTKNSWSHIYTLWFPPSLVVYGLRKQYKNPMIQTKAK

SEQ ID NO: 6942 - protein, 125 aa, Homo sapiens [sequence omitted]

SEQ ID NO: 6943 - protein, 128 aa, Homo sapiens
MAPAKKGGEKKKGRSAINEVVTREYTINIHKRIHGVGFKKRAPRALKEIRKFAMKEMGTPDVRIDTRLNKAVWAKGIRNVPYRIRVRLSRKRNEDEDSPNKLYTLVTYVPVTTFKISVLNSVTVAKSP

SEQ ID NO: 6944 - protein, 121 aa, Homo sapiens
MAPAKKGGEKKKGRSAINEVVTREYTINIHKRIHGVGFKKRAPRALKEIRKFAMKEMGTPDVRIDTRLNKAVWAKGIRNVPYRIRVRLSRKRNEDEDSPNKLYTLVTYVPVTTFKSKFSIP

SEQ ID NO: 6945 - protein, 475 aa, Homo sapiens
MEGLLTRCRALPALATCSRQLSGYVPCRFHHCAPRRGRRLLLSRVFQPQNLREDRVLSLQDKSDDLTCKSQRLMLQVGLIYPASPGCYHLLPYTVRAMEKLVRVIDQEMQAIGGQKVNMPSLSPAELWQATNRWDLMGKELLRLRDRHGKEYCLGPTHEEAITALIASQKKLSYKQLPFLLYQVTRKFRDEPRPRFGLLRGREFYMKDMYTFDSSPEAAQQTYSLVCDAYCSLFNKLGLPFVKVQADVGTIGGTVSHEFQLPVDIGEDRLAICPRCSFSANMETLDLSQMNCPACQGPLTKTKGIEVGHTFYLGTKYSSIFNAQFTNVCGKPTLAEMGCYGLGVTRILAAAIEVLSTEDCVRWPSLLAPYQACLIPPKKGSKEQAASELIGQLYDHITEAVPQLHGEVLLDDRTHLTIGNRLKDANKFGYPFVIIAGKRALEDPAHFEVWCQNTGEVAFLTKDGVMDLLTPVQTV

SEQ ID NO: 6946 - protein, 452 aa, Homo sapiens
MALQTLQSSWVTFRKILSHFPEELSLAFVYGSGVYRQAGPSSDQKNAMLDFVFTVDDPVAWHSKNLKKNWSHYSFLKVLGPKIITSIQNNYGAGVYYNSLIMCNGRLIKYGVISTNVLIEDLLNWNNLYIAGRLQKPVKIISVNEDVTLRSALDRNLKSAVTAAFLMLPESFSEEDLFIEIAGLSYSGDFRMVVGEDKTKVLNIVKPNIAHFRELYGSILQENPQVVYKSQQGWLEIDKSPEGQFTQLMTLPKTLQQQINHIMDPPGKNRDVEETLFQVAHDPDCGDVVRLGLSAIVRPSSIRQSTKGIFTAGKSFGNPCVTYLLTEWLPHSWLQCKALYLLGACEMLSFDGHKLGYCSKVQTGITAAEPGGRTMSDHWQCCWKLYCPSEFSETLPVCRVFPSYCFIYQSYRCIGLQKQQHLCSPSSSPSLRQLLPSVLVGYFCCYCHFSKW

SEQ ID NO: 6947 - protein, 316 aa, Homo sapiens
MALQTLQSSWVTFRKILSHFPEELSLAFVYGSGVYRQAGPSSDQKNAMLDFVFTVDDPVAWHSKNLKKNWSHYSFLKVLGPKIITSIQNNYGAGVYYNSLIMCNGRLIKYGVISTNVLIEDLLNWNNLYIAGRLQKPVKIISVNEDVTLRSALDRNLKSAVTAAFLMLPESFSEEDLFIEIAGLSYSGDFRMVVGEDKTKVLNIVKPNIAHFRELYGSILQENPQVVYKSQQGWLEIDKSPEGQFTQLMTLPKTLQQQINHIMDPPGKNRDVEETLFQVAHDPDCGDVVRLGLKKSVIYSSLKLHKMWKGWLRKTS

SEQ ID NO: 6948 - protein, 337 aa, Homo sapiens
MALQTLQSSWVTFRKILSHFPEELSLAFVYGSGVYRQAGPSSDQKNAMLDFVFTVDDPVAWHSKNLKKNWSHYSFLKVLGPKIITSIQNNYGAGVYYNSLIMCNGRLIKYGVISTNVLIEDLLNWNNLYIAGRLQKPVKIISVNEDVTLRSALDRNLKSAVTAAFLMLPESFSEEDLFIEIAGLSYSGDFRMVVGEDKTKVLNIVKPNIAHFRELYGSILQENPQVVYKSQQGWLEIDKSPEGQFTQLMTLPKTLQQQINHIMDPPGKNRDVEETLFQVAHDPDCGDVVRLGLSAIVRPSSIRQSTKGIFTAGLKKSVIYSSLKLHKMWKGWLRKTS

SEQ ID NO: 6949 - protein, 4244 aa, Homo sapiens
MMPAQYALTSSLVLLVLLSTARAGPFSSRSNVTLPAPRPPPQPGGHTVGAGVGSPSSQLYEHTVEGGEKQVVFTHRINLPPSTGCGCPPGTEPPVLASEVQALRVRLEILEELVKGLKEQCTGGCCPASAQAGTGQTDVRTLCSLHGVFDLSRCTCSCEPGWGGPTCSDPTDAEIPPSSPPSASGSCPDDCNDQGRCVRGRCVCFPGYTGPSCGWPSCPGDCQGRGRCVQGVCVCRAGFSGPDCSQRSCPRGCSQRGRCEGGRCVCDPGYTGDDCGMRSCPRGCSQRGRCENGRCVCNPGYTGEDCGVRSCPRGCSQRGRCKDGRCVCDPGYTGEDCGTRSCPWDCGEGGRCVDGRCVCWPGYTGEDCSTRTCPRDCRGRGRCEDGECICDTGYSGDDCGVRSCPGDCNQRGRCEDGRCVCWPGYTGTDCGSRACPRDCRGRGRCENGVCVCNAGYSGEDCGVRSCPGDCRGRGRCESGRCMCWPGYTGRDCGTRACPGDCRGRGRCVDGRCVCNPGFTGEDCGSRRCPGDCRGHGLCEDGVCVCDAGYSGEDCSTRSCPGGCRGRGQCLDGRCVCEDGYSGEDCGVRQCPNDCSQHGVCQDGVCICWEGYVSEDCSIRTCPSNCHGRGRCEEGRCLCDPGYTGPTCATRMCPADCRGRGRCVQGVCLCHVGYGGEDCGQEEPPASACPGGCGPRELCRAGQCVCVEGFRGPDCAIQTCPGDCRGRGECHDGSCVCKDGYAGEDCGEEVPTIEGMRMHLLEETTVRTEWTPAPGPVDAYEIQFIPTTEGASPPFTARVPSSASAYDQRGLAPGQEYQVTVRALRGTSWGLPASKTITTMIDGPQDLRVVAVTPTTLELGWLRPQAEVDRFVVSYVSAGNQRVRLEVPPEADGTLLTDLMPGVEYVVTVTAERGRAVSYPASVRANTGSSPLGLLGTTDEPPPSGPSTTQGAQAPLLQQRPQELGELRVLGRDETGRLRVVWTAQPDTFAYFQLRMRVPEGPGAHEEVLPGDVRQALVPPPPPGTPYELSLHGVPPGGKPSDPIIYQGIMDKDEEKPGKSSGPPRLGELTVTDRTSDSLLLRWTVPEGEFDSFVIQYKDRDGQPQVVPVEGPQRSAVITSLDPGRKYKFVLYGFVGKKRHGPLVAEAKILPQSDPSPGTPPHLGNLWVTDPTPDSLHLSWTVPEGQFDTFMVQYRDRDGRPQVVPVEGPERSFVVSSLDPDHKYRFTLFGIANKKRYGPLTADGTTAPERKEEPPRPEFLEQPLLGELTVTGVTPDSLRLSWTVAQGPFDSFMVQYKDAQGQPQAVPVAGDENEVTVPGLDPDRKYKMNLYGLRGRQRVGPESVVAKTAPQEDVDETPSPTELGTEAPESPEEPLLGELTVTGSSPDSLSLFWTVPQGSFDSFTVQYKDRDGRPRAVRVGGKESEVTVGGLEPGHKYKMHLYGLHEGQRVGPVSAVGVTAPQQEETPPATESPLEPRLGELTVTDVTPNSVGLSWTVPEGQFDSFIVQYKDKDGQPQVVPVAADQREVTVYNLEPERKYKMNMYGLHDGQRMGPLSVVIVTAPLPPAPATEASKPPLEPRLGELTVTDITPDSVGLSWTVPEGEFDSFVVQYKDRDGQPQVVPVAADQREVTIPDLEPSRKYKFLLFGIQDGKRRSPVSVEAKTVARGDASPGAPPRLGELWVTDPTPDSLRLSWTVPEGQFDSFVVQFKDKDGPQVVPVEGHERSVTVTPLDAGRKYRFLLYGLLGKKRHGPLTADGTTEARSAMDDTGTKRPPKPRLGEELQVTTVTQNSVGLSWTVPEGQFDSFVVQYKDRDGQPQVVPVEGSLREVSVPGLDPAHRYKLLLYGLHHGKRVGPISAVAITAGREETETETTAPTPPAPEPHLGELTVEEATSHTLHLSWMVTEGEFDSFEIQYTDRDGQLQMVRIGGDRNDITLSGLESDHRYLVTLYGFSDGKHVGPVHVEALTVPEEEKPSEPPTATPEPPIKPRLGELTVTDATPDSLSLSWTVPEGQFDHFLVQYRNGDGQPKAVRVPGHEEGVTISGLEPDHKYKMNLYGFHGGQRMGPVSVVGVTAAEEETPSPTEPSMEAPEPAEEPLLGELTVTGSSPDSLSLSWTVPQGRFDSFTVQYKDRDGRPQVVRVGGEESEVTVGGLEPGRKYKMHLYGLHEGRRVGPVSAVGVTAPEEESPDAPLAKLRLGQMTVRDITSDSLSLSWTVPEGQFDHFLVQFKNGDGQPKAVRVPGHEDGVTISGLEPDHKYKMNLYGFHGGQRVGPVSAVGLTAPGKDEEMAPASTEPPTPEPPIKPRLEELTVTDATPDSLSLSWTVPEGQFDHFLVQYKNGDGQPKATRVPGHEDRVTISGLEPDNKYKMNLYGFHGGQRVGPVSAIGVTAAEEETPSPTEPSMEAPEPPEEPLLGELTVTGSSPDSLSLSWTVPQGRFDSFTVQYKDRDGRPQVVRVGGEESEVTVGGLEPGRKYKMHLYGLHEGRRVGPVSTVGVTAPQEDVDETPSPTEPGTEAPGPPEEPLLGELTVTGSSPDSLSLSWTVPQGRFDSFTVQYKDRDGRPQAVRVGGQESKVTVRGLEPGRKYKMHLYGLHEGRRLGPVSAVGVTEDEAETTQAVPTMTPEPPIKPRLGELTMTDATPDSLSLSWTVPEGQFDHFLVQYRNGDGQPKAVRVPGHEDGVTISGLEPDHKYKMNLYGFHGGQRVGPISVIGVTAAEEETPSPTELSTEAPEPPEEPLLGELTVTGSSPDSLSLSWTIPQGHFDSFTVQYKDRDGRPQVMRVRGEESEVTVGGLEPGRKYKMHLYGLHEGRRVGPVSTVGVTAPEDEAETTQAVPTTTPEPPNKPRLGELTVTDATPDSLSLSWMVPEGQFDHFLVQYRNGDGQPKVVRVPGHEDGVTISGLEPDHKYKMNLYGFHGGQRVGPISVIGVTAAEEETPAPTEPSTEAPEPPEEPLLGELTVTGSSPDSLSLSWTIPQGRFDSFTVQYKDRDGRPQVVRVRGEESEVTVGGLEPGCKYKMHLYGLHEGQRVGPVSAVGVTAPKDEAETTQAVPTMTPEPPIKPRLGELTVTDATPDSLSLSWMVPEGQFDHFLVQYRNGDGQPKAVRVPGHEDGVTISGLEPDHKYKMNLYGFHGGQRVGPVSAIGVTEEETPSPTEPSTEAPEAPEEPLLGELTVTGSSPDSLSLSWTVPQGRFDSFTVQYKDRDGQPQVVRVRGEESEVTVGGLEPGRKYKMHLYGLHEGQRVGPVSTVGITAPLPTPLPVEPRLGELAVAAVTSDSVGLSWTVAQGPFDSFLVQYRDAQGQPQAVPVSGDLRAVAVSGLDPARKYKFLLFGLQNGKRHGPVPVEARTAPDTKPSPRLGELTVTDATPDSVGLSWTVPEGEFDSFVVQYKDKDGRLQVVPVAANQREVTVQGLEPSRKYRFLLYGLSGRKRLGPISADSTTAPLEKELPPHLGELTVAEETSSSLRLSWTVAQGPFDSFVVQYRDTDGQPRAVPVAADQRTVTVEDLEPGKKYKFLLYGLLGGKRLGPVSALGMTAPEEDTPAPELAPEAPEPPEEPRLGVLTVTDTTPDSMRLSWSVAQGPFDSFVVQYEDTNGQPQALLVDGDQSKILISGLEPSTPYRFLLYGLHEGKRLGPLSAEGTTGLAPAGQTSEESRPRLSQLSVTDVTTSSLRLNWEAPPGAFDSFLLRFGVPSPSTLEPHPRPLLQRELMVPGTRHSAVLRDLRSGTLYSLTLYGLRGPHKADSIQGTARTLSPVLESPRDLQFSEIRETSAKVNWMPPPSRADSFKVSYQLADGGEPQSVQVDGQARTQKLQGLIPGARYEVTVVSVRGFEESEPLTGFLTTVPDGPTQLRALNLTEGFAVLHWKPPQNPVDTYDVQVTAPGAPPLQAETPGSAVDYPLHDLVLHTNYTATVRGLRGPNLTSPASITFTTGLEAPRDLEAKEVTPRTALLTWTEPPVRPAGYLLSFHTPGGQNQEILLPGGITSHQLLGLFPSTSYNARLQAMWGQSLLPPVSTSFTTGGLRIPFPRDCGEEMQNGAGASRTSTIFLNGNRERPLNVFCDMETDGGGWLVFQRRMDGQTDFWRDWEDYAHGFGNISGEFWLGNEALHSLTQAGDYSMRVDLRAGDEAVFAQYDSFHVDSAAEYYRLHLEGYHGTAGDSMSYHSGSVFSARDRDPNSLLISCAVSYRGAWWYRNCHYANLNGLYGSTVDHQGVSWYHWKGFEFSVPFTEMKLRPRNFRSPAGGG

SEQ ID NO: 6950 - protein, 4242 aa, Homo sapiens
MMPAQYALTSSLVLLVLLSTARAGPFSSRSNVTLPAPRPPPQPGGHTVGAGVGSPSSQLYEHTVEGGEKQVVFTHRINLPPSTGCGCPPGTEPPVLASEVQALRVRLEILEELVKGLKEQCTGGCCPASAQAGTGQTDVRTLCSLHGVFDLSRCTCSCEPGWGGPTCSDPTDAEIPPSSPPSASGSCPDDCNDQGRCVRGRCVCFPGYTGPSCGWPSCPGDCQGRGRCVQGVCVCRAGFSGPDCSQRSCPRGCSQRGRCEGGRCVCDPGYTGDDCGMRSCPRGCSQRGRCENGRCVCNPGYTGEDCGVRSCPRGCSQRGRCKDGRCVCDPGYTGEDCGTRSCPWDCGEGGRCVDGRCVCWPGYTGEDCSTRTCPRDCRGRGRCEDGECICDTGYSGDDCGVRSCPGDCNQRGRCEDGRCVCWPGYTGTDCGSRACPRDCRGRGRCENGVCVCNAGYSGEDCGVRSCPGDCRGRGRCESGRCMCWPGYTGRDCGTRACPGDCRGRGRCVDGRCVCNPGFTGEDCGSRRCPGDCRGHGLCEDGVCVCDAGYSGEDCSTRSCPGGCRGRGQCLDGRCVCEDGYSGEDCGVRQCPNDCSQHGVCQDGVCICWEGYVSEDCSIRTCPSNCHGRGRCEEGRCLCDPGYTGPTCATRMCPADCRGRGRCVQGVCLCHVGYGGEDCGQEEPPASACPGGCGPRELCRAGQCVCVEGFRGPDCAIQTCPGDCRGRGECHDGSCVCKDGYAGEDCGEEVPTIEGMRMHLLEETTVRTEWTPAPGPVDAYEIQFIPTTEGASPPFTARVPSSASAYDQRGLAPGQEYQVTVRALRGTSWGLPASKTITTMIDGPQDLRVVAVTPTTLELGWLRPQAEVDRFVVSYVSAGNQRVRLEVPPEADGTLLTDLMPGVEYVVTVTAERGRAVSYPASVRANTGSSPLGLLGTTDEPPPSGPSTTQGAQAPLLQQRPQELGELRVLGRDETGRLRVVWTAQPDTFAYFQLRMRVPEGPGAHEEVLPGDVRQALVPPPPPGTPYELSLHGVPPGGKPSDPIIYQGIMDKDEEKPGKSSGPPRLGELTVTDRTSDSLLLRWTVPEGEFDSFVIQYKDRDGQPQVVPVEGPQRSAVITSLDPGRKYKFVLYGFVGKKRHGPLVAEAKILPQSDPSPGTPPHLGNLWVTDPTPDSLHLSWTVPEGQFDTFMVQYRDRDGRPQVVPVEGPERSFVVSSLDPDHKYRFTLFGIANKKRYGPLTADGTTAPERKEEPPRPEFLEQPLLGELTVTGVTPDSLRLSWTVAQGPFDSFMVQYKDAQGQPQAVPVAGDENEVTVPGLDPDRKYKMNLYGLRGRQRVGPESVVAKTAPQEDVDETPSPTELGTEAPESPEEPLLGELTVTGSSPDSLSLFWTVPQGSFDSFTVQYKDRDGRPRAVRVGGKESEVTVGGLEPGHKYKMHLYGLHEGQRVGPVSAVGVTAPQQEETPPATESPLEPRLGELTVTDVTPNSVGLSWTVPEGQFDSFIVQYKDKDGQPQVVPVAADQREVTVYNLEPERKYKMNMYGLHDGQRMGPLSVVIVTAPLPPAPATEASKPPLEPRLGELTVTDITPDSVGLSWTVPEGEFDSFVVQYKDRDGQPQVVPVAADQREVTIPDLEPSRKYKFLLFGIQDGKRRSPVSVEAKTVARGDASPGAPPRLGELWVTDPTPDSLRLSWTVPEGQFDSFVVQFKDKDGPQVVPVEGHERSVTVTPLDAGRKYRFLLYGLLGKKRHGPLTADGTTEARSAMDDTGTKRPPKPRLGEELQVTTVTQNSVGLSWTVPEGQFDSFVVQYKDRDGQPQVVPVEGSLREVSVPGLDPAHRYKLLLYGLHHGKRVGPISAVAITAGREETETETTAPTPPAPEPHLGELTVEEATSHTLHLSWMVTEGEFDSFEIQYTDRDGQLQMVRIGGDRNDITLSGLESDHRYLVTLYGFSDGKHVGPVHVEALTVPEEEKPSEPPTATPEPPIKPRLGELTVTDATPDSLSLSWTVPEGQFDHFLVQYRNGDGQPKAVRVPGHEEGVTISGLEPDHKYKMNLYGFHGGQRMGPVSVVGVTAAEEETPSPTEPSMEAPEPAEEPLLGELTVTGSSPDSLSLSWTVPQGRFDSFTVQYKDRDGRPQVVRVGGEESEVTVGGLEPGRKYKMHLYGLHEGRRVGPVSAVGVTAPEEESPDAPLAKLRLGQMTVRDITSDSLSLSWTVPEGQFDHFLVQFKNGDGQPKAVRVPGHEDGVTISGLEPDHKYKMNLYGFHGGQRVGPVSAVGLTAPGKDEEMAPASTEPPTPEPPIKPRLEELTVTDATPDSLSLSWTVPEGQFDHFLVQYKNGDGQPKATRVPGHEDRVTISGLEPDNKYKMNLYGFHGGQRVGPVSAIGVTAAEEETPSPTEPSMEAPEPPEEPLLGELTVTGSSPDSLSLSWTVPQGRFDSFTVQYKDRDGRPQVVRVGGEESEVTVGGLEPGRKYKMHLYGLHEGRRVGPVSTVGVTAPQEDVDETPSPTEPGTEAPGPPEEPLLGELTVTGSSPDSLSLSWTVPQGRFDSFTVQYKDRDGRPQAVRVGGQESKVTVRGLEPGRKYKMHLYGLHEGRRLGPVSAVGVTEDEAETTQAVPTMTPEPPIKPRLGELTMTDATPDSLSLSWTVPEGQFDHFLVQYRNGDGQPKAVRVPGHEDGVTISGLEPDHKYKMNLYGFHGGQRVGPISVIGVTAAEEETPSPTELSTEAPEPPEEPLLGELTVTGSSPDSLSLSWTIPQGHFDSFTVQYKDRDGRPQVMRVRGEESEVTVGGLEPGRKYKMHLYGLHEGRRVGPVSTVGVTEDEAETTQAVPTTTPEPPNKPRLGELTVTDATPDSLSLSWMVPEGQFDHFLVQYRNGDGQPKVVRVPGHEDGVTISGLEPDHKYKMNLYGFHGGQRVGPISVIGVTAAEEETPAPTEPSTEAPEPPEEPLLGELTVTGSSPDSLSLSWTIPQGRFDSFTVQYKDRDGRPQVVRVRGEESEVTVGGLEPGCKYKMHLYGLHEGQRVGPVSAVGVTAPKDEAETTQAVPTMTPEPPIKPRLGELTVTDATPDSLSLSWMVPEGQFDHFLVQYRNGDGQPKAVRVPGHEDGVTISGLEPDHKYKMNLYGFHGGQRVGPVSAIGVTEEETPSPTEPSTEAPEAPEEPLLGELTVTGSSPDSLSLSWTVPQGRFDSFTVQYKDRDGQPQVVRVRGEESEVTVGGLEPGRKYKMHLYGLHEGQRVGPVSTVGITAPLPTPLPVEPRLGELAVAAVTSDSVGLSWTVAQGPFDSFLVQYRDAQGQPQAVPVSGDLRAVAVSGLDPARKYKFLLFGLQNGKRHGPVPVEARTAPDTKPSPRLGELTVTDATPDSVGLSWTVPEGEFDSFVVQYKDKDGRLQVVPVAANQREVTVQGLEPSRKYRFLLYGLSGRKRLGPISADSTTAPLEKELPPHLGELTVAEETSSSLRLSWTVAQGPFDSFVVQYRDTDGQPRAVPVAADQRTVTVEDLEPGKKYKFLLYGLLGGKRLGPVSALGMTAPEEDTPAPELAPEAPEPPEEPRLGVLTVTDTTPDSMRLSWSVAQGPFDSFVVQYEDTNGQPQALLVDGDQSKILISGLEPSTPYRFLLYGLHEGKRLGPLSAEGTTGLAPAGQTSEESRPRLSQLSVTDVTTSSLRLNWEAPPGAFDSFLLRFGVPSPSTLEPHPRPLLQRELMVPGTRHSAVLRDLRSGTLYSLTLYGLRGPHKADSIQGTARTLSPVLESPRDLQFSEIRETSAKVNWMPPPSRADSFKVSYQLADGGEPQSVQVDGQARTQKLQGLIPGARYEVTVVSVRGFEESEPLTGFLTTVPDGPTQLRALNLTEGFAVLHWKPPQNPVDTYDVQVTAPGAPPLQAETPGSAVDYPLHDLVLHTNYTATVRGLRGPNLTSPASITFTTGLEAPRDLEAKEVTPRTALLTWTEPPVRPAGYLLSFHTPGGQNQEILLPGGITSHQLLGLFPSTSYNARLQAMWGQSLLPPVSTSFTTGGLRIPFPRDCGEEMQNGAGASRTSTIFLNGNRERPLNVFCDMETDGGGWLVFQRRMDGQTDFWRDWEDYAHGFGNISGEFWLGNEALHSLTQAGDYSMRVDLRAGDEAVFAQYDSFHVDSAAEYYRLHLEGYHGTAGDSMSYHSGSVFSARDRDPNSLLISCAVSYRGAWWYRNCHYANLNGLYGSTVDHQGVSWYHWKGFEFSVPFTEMKLRPRNFRSPAGGG

SEQ ID NO: 6951 - protein, 673 aa, Homo sapiens
MRLSWSVAQGPFDSFVVQYEDTNGQPQALLVDGDQSKILISGLEPSTPYRFLLYGLHEGKRLGPLSAEGTTGLAPAGQTSEESRPRLSQLSVTDVTTSSLRLNWEAPPGAFDSFLLRFGVPSPSTLEPHPRPLLQRELMVPGTRHSAVLRDLRSGTLYSLTLYGLRGPHKADSIQGTARTLSPVLESPRDLQFSEIRETSAKVNWMPPPSRADSFKVSYQLADGGEPQSVQVDGQARTQKLQGLIPGARYEVTVVSVRGFEESEPLTGFLTTVPDGPTQLRALNLTEGFAVLHWKPPQNPVDTYDVQVTAPGAPPLQAETPGSAVDYPLHDLVLHTNYTATVRGLRGPNLTSPASITFTTGLEAPRDLEAKEVTPRTALLTWTEPPVRPAGYLLSFHTPGGQNQEILLPGGITSHQLLGLFPSTSYNARLQAMWGQSLLPPVSTSFTTGGLRIPFPRDCGEEMQNGAGASRTSTIFLNGNRERPLNVFCDMETDGGGWLVFQRRMDGQTDFWRDWEDYAHGFGNISGEFWLGNEALHSLTQAGDYSMRVDLRAGDEAVFAQYDSFHVDSAAEYYRLHLEGYHGTAGDSMSYHSGSVFSARDRDPNSLLISCAVSYRGAWWYRNCHYANLNGLYGSTVDHQGVSWYHWKGFEFSVPFTEMKLRPRNFRSPAGGG

SEQ ID NO: 6952 - protein, 4245 aa, Homo sapiens
MMPAQYALTSSLVLLVLLSTARAGPFSSRSNVTLPAPRPPPQPGGHTVGAGVGSPSSQLYEHTVEGGEKQVVFTHRINLPPSTGCGCPPGTEPPVLASEVQALRVRLEILEELVKGLKEQCTGGCCPASAQAGTGEQGQTDVRTLCSLHGVFDLSRCTCSCEPGWGGPTCSDPTDAEIPPSSPPSASGSCPDDCNDQGRCVRGRCVCFPGYTGPSCGWPSCPGDCQGRGRCVQGVCVCRAGFSGPDCSQRSCPRGCSQRGRCEGGRCVCDPGYTGDDCGMRSCPRGCSQRGRCENGRCVCNPGYTGEDCGVRSCPRGCSQRGRCKDGRCVCDPGYTGEDCGTRSCPWDCGEGGRCVDGRCVCWPGYTGEDCSTRTCPRDCRGRGRCEDGECICDTGYSGDDCGVRSCPGDCNQRGRCEDGRCVCWPGYTGTDCGSRACPRDCRGRGRCENGVCVCNAGYSGEDCGVRSCPGDCRGRGRCESGRCMCWPGYTGRDCGTRACPGDCRGRGRCVDGRCVCNPGFTGEDCGSRRCPGDCRGHGLCEDGVCVCDAGYSGEDCSTRSCPGGCRGRGQCLDGRCVCEDGYSGEDCGVRQCPNDCSQHGVCQDGVCICWEGYVSEDCSIRTCPSNCHGRGRCEEGRCLCDPGYTGPTCATRMCPADCRGRGRCVQGVCLCHVGYGGEDCGQEEPPASACPGGCGPRELCRAGQCVCVEGFRGPDCAIQTCPGDCRGRGECHDGSCVCKDGYAGEDCGEEVPTIEGMRMHLLEETTVRTEWTPAPGPVDAYEIQFIPTTEGASPPFTARVPSSASAYDQRGLAPGQEYQVTVRALRGTSWGLPASKTITTMIDGPQDLRVVAVTPTTLELGWLRPQAEVDRFVVSYVSAGNQRVRLEVPPEADGTLLTDLMPGVEYVVTVTAERGRAVSYPASVRANTGSSPLGLLGTTDEPPPSGPSTTQGAQAPLLQQRPQELGELRVLGRDETGRLRVVWTAQPDTFAYFQLRMRVPEGPGAHEEVLPGDVRQALVPPPPPGTPYELSLHGVPPGGKPSDPIIYQGIMDKDEEKPGKSSGPPRLGELTVTDRTSDSLLLRWTVPEGEFDSFVIQYKDRDGQPQVVPVEGPQRSAVITSLDPGRKYKFVLYGFVGKKRHGPLVAEAKILPQSDPSPGTPPHLGNLWVTDPTPDSLHLSWTVPEGQFDTFMVQYRDRDGRPQVVPVEGPERSFVVSSLDPDHKYRFTLFGIANKKRYGPLTADGTTAPERKEEPPRPEFLEQPLLGELTVTGVTPDSLRLSWTVAQGPFDSFMVQYKDAQGQPQAVPVAGDENEVTVPGLDPDRKYKMNLYGLRGRQRVGPESVVAKTAPQEDVDETPSPTELGTEAPESPEEPLLGELTVTGSSPDSLSLFWTVPQGSFDSFTVQYKDRDGRPRAVRVGGKESEVTVGGLEPGHKYKMHLYGLHEGQRVGPVSAVGVTAPQQEETPPATESPLEPRLGELTVTDVTPNSVGLSWTVPEGQFDSFIVQYKDKDGQPQVVPVAADQREVTVYNLEPERKYKMNMYGLHDGQRMGPLSVVIVTAPLPPAPATEASKPPLEPRLGELTVTDITPDSVGLSWTVPEGEFDSFVVQYKDRDGQPQVVPVAADQREVTIPDLEPSRKYKFLLFGIQDGKRRSPVSVEAKTVARGDASPGAPPRLGELWVTDPTPDSLRLSWTVPEGQFDSFVVQFKDKDGPQVVPVEGHERSVTVTPLDAGRKYRFLLYGLLGKKRHGPLTADGTTEARSAMDDTGTKRPPKPRLGEELQVTTVTQNSVGLSWTVPEGQFDSFVVQYKDRDGQPQVVPVEGSLREVSVPGLDPAHRYKLLLYGLHHGKRVGPISAVAITAGREETETETTAPTPPAPEPHLGELTVEEATSHTLHLSWMVTEGEFDSFEIQYTDRDGQLQMVRIGGDRNDITLSGLESDHRYLVTLYGFSDGKHVGPVHVEALTVPEEEKPSEPPTATPEPPIKPRLGELTVTDATPDSLSLSWTVPEGQFDHFLVQYRNGDGQPKAVRVPGHEEGVTISGLEPDHKYKMNLYGFHGGQRMGPVSVVGVTAAEEETPSPTEPSMEAPEPAEEPLLGELTVTGSSPDSLSLSWTVPQGRFDSFTVQYKDRDGRPQVVRVGGEESEVTVGGLEPGRKYKMHLYGLHEGRRVGPVSAVGVTAPEEESPDAPLAKLRLGQMTVRDITSDSLSLSWTVPEGQFDHFLVQFKNGDGQPKAVRVPGHEDGVTISGLEPDHKYKMNLYGFHGGQRVGPVSAVGLTAPGKDEEMAPASTEPPTPEPPIKPRLEELTVTDATPDSLSLSWTVPEGQFDHFLVQYKNGDGQPKATRVPGHEDRVTISGLEPDNKYKMNLYGFHGGQRVGPVSAIGVTAAEEETPSPTEPSMEAPEPPEEPLLGELTVTGSSPDSLSLSWTVPQGRFDSFTVQYKDRDGRPQVVRVGGEESEVTVGGLEPGRKYKMHLYGLHEGRRVGPVSTVGVTAPQEDVDETPSPTEPGTEAPGPPEEPLLGELTVTGSSPDSLSLSWTVPQGRFDSFTVQYKDRDGRPQAVRVGGQESKVTVRGLEPGRKYKMHLYGLHEGRRLGPVSAVGVTEDEAETTQAVPTMTPEPPIKPRLGELTMTDATPDSLSLSWTVPEGQFDHFLVQYRNGDGQPKAVRVPGHEDGVTISGLEPDHKYKMNLYGFHGGQRVGPISVIGVTAAEEETPSPTELSTEAPEPPEEPLLGELTVTGSSPDSLSLSWTIPQGHFDSFTVQYKDRDGRPQVMRVRGEESEVTVGGLEPGRKYKMHLYGLHEGRRVGPVSTVGVTEDEAETTQAVPTTTPEPPNKPRLGELTVTDATPDSLSLSWMVPEGQFDHFLVQYRNGDGQPKVVRVPGHEDGVTISGLEPDHKYKMNLYGFHGGQRVGPISVIGVTAAEEETPAPTEPSTEAPEPPEEPLLGELTVTGSSPDSLSLSWTIPQGRFDSFTVQYKDRDGRPQVVRVRGEESEVTVGGLEPGCKYKMHLYGLHEGQRVGPVSAVGVTAPKDEAETTQAVPTMTPEPPIKPRLGELTVTDATPDSLSLSWMVPEGQFDHFLVQYRNGDGQPKAVRVPGHEDGVTISGLEPDHKYKMNLYGFHGGQRVGPVSAIGVTEEETPSPTEPSTEAPEAPEEPLLGELTVTGSSPDSLSLSWTVPQGRFDSFTVQYKDRDGQPQVVRVRGEESEVTVGGLEPGRKYKMHLYGLHEGQRVGPVSTVGITAPLPTPLPVEPRLGELAVAAVTSDSVGLSWTVAQGPFDSFLVQYRDAQGQPQAVPVSGDLRAVAVSGLDPARKYKFLLFGLQNGKRHGPVPVEARTAPDTKPSPRLGELTVTDATPDSVGLSWTVPEGEFDSFVVQYKDKDGRLQVVPVAANQREVTVQGLEPSRKYRFLLYGLSGRKRLGPISADSTTAPLEKELPPHLGELTVAEETSSSLRLSWTVAQGPFDSFVVQYRDTDGQPRAVPVAADQRTVTVEDLEPGKKYKFLLYGLLGGKRLGPVSALGMTAPEEDTPAPELAPEAPEPPEEPRLGVLTVTDTTPDSMRLSWSVAQGPFDSFVVQYEDTNGQPQALLVDGDQSKILISGLEPSTPYRFLLYGLHEGKRLGPLSAEGTTGLAPAGQTSEESRPRLSQLSVTDVTTSSLRLNWEAPPGAFDSFLLRFGVPSPSTLEPHPRPLLQRELMVPGTRHSAVLRDLRSGTLYSLTLYGLRGPHKADSIQGTARTLSPVLESPRDLQFSEIRETSAKVNWMPPPSRADSFKVSYQLADGGEPQSVQVDGQARTQKLQGLIPGARYEVTVVSVRGFEESEPLTGFLTTVPDGPTQLRALNLTEGFAVLHWKPPQNPVDTYDVQVTAPGAPPLQAETPGSAVDYPLHDLVLHTNYTATVRGLRGPNLTSPASITFTTGLEAPRDLEAKEVTPRTALLTWTEPPVRPAGYLLSFHTPGGQNQEILLPGGITSHQLLGLFPSTSYNARLQAMWGQSLLPPVSTSFTTGGLRIPFPRDCGEEMQNGAGASRTSTIFLNGNRERPLNVFCDMETDGGGWLVFQRRMDGQTDFWRDWEDYAHGFGNISGEFWLGNEALHSLTQAGDYSMRVDLRAGDEAVFAQYDSFHVDSAAEYYRLHLEGYHGTAGDSMSYHSGSVFSARDRDPNSLLISCAVSYRGAWWYRNCHYANLNGLYGSTVDHQGVSWYHWKGFEFSVPFTEMKLRPRNFRSPAGGG

SEQ ID NO: 6953 - protein, 904 aa, Homo sapiens
MRQTLPCIYFWGGLLPFGMLCASSTTKCTVSHEVADCSHLKLTQVPDDLPTNITVLNLTHNQLRRLPAANFTRYSQLTSLDVGFNTISKLEPELCQKLPMLKVLNLQHNELSQLSDKTFAFCTNLTELHLMSNSIQKIKNNPFVKQKNLITLDLSHNGLSSTKLGTQVQLENLQELLLSNNKIQALKSEELDIFANSSLKKLELSSNQIKEFSPGCFHAIGRLFGLFLNNVQLGPSLTEKLCLELANTSIRNLSLSNSQLSTTSNTTFLGLKWTNLTMLDLSYNNLNVVGNDSFAWLPQLEYFFLEYNNIQHLFSHSLHGLFNVRYLNLKRSFTKQSISLASLPKIDDFSFQWLKCLEHLNMEDNDIPGIKSNMFTGLINLKYLSLSNSFTSLRTLTNETFVSLAHSPLHILNLTKNKISKIESDAFSWLGHLEVLDLGLNEIGQELTGQEWRGLENIFEIYLSYNKYLQLTRNSFALVPSLQRLMLRRVALKNVDSSPSPFQPLRNLTILDLSNNNIANINDDMLEGLEKLEILDLQHNNLARLWKHANPGGPIYFLKGLSHLHILNLESNGFDEIPVEVFKDLFELKIIDLGLNNLNTLPASVFNNQVSLKSLNLQKNLITSVEKKVFGPAFRNLTELDMRFNPFDCTCESIAWFVNWINETHTNIPELSSHYLCNTPPHYHGFPVRLFDTSSCKDSAPFELFFMINTSILLIFIFIVLLIHFEGWRISFYWNVSVHRVLGFKEIDRQTEQFEYAAYIIHAYKDKDWVWEHFSSMEKEDQSLKFCLEERDFEAGVFELEAIVNSIKRSRKIIFVITHHLLKDPLCKRFKVHHAVQQAIEQNLDSIILVFLEEIPDYKLNHALCLRRGMFKSHCILNWPVQKERIGAFRHKLQVALGSKNSVH

SEQ ID NO: 6954 - protein, 627 aa, Homo sapiens
MLDLSYNNLNVVGNDSFAWLPQLEYFFLEYNNIQHLFSHSLHGLFNVRYLNLKRSFTKQSISLASLPKIDDFSFQWLKCLEHLNMEDNDIPGIKSNMFTGLINLKYLSLSNSFTSLRTLTNETFVSLAHSPLHILNLTKNKISKIESDAFSWLGHLEVLDLGLNEIGQELTGQEWRGLENIFEIYLSYNKYLQLTRNSFALVPSLQRLMLRRVALKNVDSSPSPFQPLRNLTILDLSNNNIANINDDMLEGLEKLEILDLQHNNLARLWKHANPGGPIYFLKGLSHLHILNLESNGFDEIPVEVFKDLFELKIIDLGLNNLNTLPASVFNNQVSLKSLNLQKNLITSVEKKVFGPAFRNLTELDMRFNPFDCTCESIAWFVNWINETHTNIPELSSHYLCNTPPHYHGFPVRLFDTSSCKDSAPFELFFMINTSILLIFIFIVLLIHFEGWRISFYWNVSVHRVLGFKEIDRQTEQFEYAAYIIHAYKDKDWVWEHFSSMEKEDQSLKFCLEERDFEAGVFELEAIVNSIKRSRKIIFVITHHLLKDPLCKRFKVHHAVQQAIEQNLDSIILVFLEEIPDYKLNHALCLRRGMFKSHCILNWPVQKERIGAFRHKLQVALGSKNSVH

SEQ ID NO: 6955 - protein, 429 aa, Homo sapiens
MSRDPGSGGWEEAPRAAAALCTLYHEAGQRLRRLQDQLAARDALIARLRARLAALEGDAAPSLVDALLEQVARFREQLRRQEGGAAEAQMRQEIERLTERLEEKEREMQQLLSQPQHEREKEVVLLRRSMAEGERARAASDVLCRSLANETHQLRRTLTATAHMCQHLAKCLDERQHAQRNVGERSPDQSEHTDGHTSVQSVIEKLQEENRLLKQKVTHVEDLNAKWQRYNASRDEYVRGLHAQLRGLQIPHEPELMRKEISRLNRQLEEKINDCAEVKQELAASRTARDAALERVQMLEQQILAYKDDFMSERADRERAQSRIQELEEKVASLLHQVSWRQDSREPDAGRIHAGSKTAKYLAADALELMVPGGWRPGTGSQQPEPPAEGGHPGAAQRGQGDLQCPHCLQCFSDEQGEELLRHVAECCQ

SEQ ID NO: 6956 - protein, 322 aa, Homo sapiens
MQQLLSQPQHEREKEVVLLRRSMAEGERARAASDVLCRSLANETHQLRRTLTATAHMCQHLAKCLDERQHAQRNVGERSPDQSEHTDGHTSVQSVIEKLQEENRLLKQKVTHVEDLNAKWQRYNASRDEYVRGLHAQLRGLQIPHEPELMRKEISRLNRQLEEKINDCAEVKQELAASRTARDAALERVQMLEQQILAYKDDFMSERADRERAQSRIQELEEKVASLLHQVSWRQDSREPDAGRIHAGSKTAKYLAADALELMVPGGWRPGTGSQQPEPPAEGGHPGAAQRGQGDLQCPHCLQCFSDEQGEELLRHVAECCQ

SEQ ID NO: 6957 - protein, 345 aa, Homo sapiens
MQLEIQVALNFIISYLYNKLPRRRVNIFGEELERLLKKKYEGHWYPEKPYKGSGFRCIHIGEKVDPVIEQASKESGLDIDDVRGNLPQDLSVWIDPFEVSYQIGEKGPVKVLYVDDNNENGCELDKEIKNSFNPEAQVFMPISDPASSVSSSPSPPFGHSAAVSPTFMPRSTQPLTFTTATFAATKFGSTKMKNSGRSNKVARTSPINLGLNVNDLLKQKAISSSMHSLYGLGLGSQQQPQQQQQPAQPPPPPPPPQQQQQQKTSALSPNAKEFIFPNMQGQGSSTNGMFPGDSPLNLSPLQYSNAFDVFAAYGGLNEKSFVDGLNFSLNNMQYSNQQFQPVMAN

SEQ ID NO: 6958 - protein, 217 aa, Homo sapiens
MSLVPGQHCSPSHTRLHLTSPITMGTEPATQNTEFSKGSLIYGVTSPQRGHSQHSEASQGPLSLDKPLQLPPIFLEGEKGESSVQNEQEGEPSLQSPSLELQSPAWPRHAGVAQEPLKVSSSYLSDTQSSESHVSSVQHPRPEEGSHASLSSGYAGDKEGSDISLVGSHRRVRLNRRLNTQAASNQTSQLGSIDPPSSLKSRLTGPAHSTKQTGGKE

SEQ ID NO: 6959 - protein, 403 aa, Homo sapiens
MHNFEEELTCPICYSIFEDPRVLPCSHTFCRNCLENILQASGNFYIWRPLRIPLKCPNCRSITEIAPTGIESLPVNFALRAIIEKYQQEDHPDIVTCPEHYRQPLNVYCLLDKKLVCGHCLTIGQHHGHPIDDLQSAYLKEKDTPQKLLEQLTDTHWTDLTHLIEKLKEQKSHSEKMIQGDKEAVLQYFKELNDTLEQKKKSFLTALCDVGNLINQEYTPQIERMKEIREQQLELMALTISLQEESPLKFLEKVDDVRQHVQILKQRPLPEVQPVEIYPRVSKILKEEWSRTEIGQIKNVLIPKMKISPKRMSCSWPGKDEKEVEFLKILNIVVVTLISVILMSILFFNQHIITFLSEITLIWFSEASLSVYQSLSNSLHKVKNILCHIFYLLKEFVWKIVSH

SEQ ID NO: 6960 - protein, 175 aa, Homo sapiens
MQLTHQLDLFPECRVTLLLFKDVKNAGDLRRKAMEGTIDGSLINPTVIVDPFQILVAANKAVHLYKLGKMKTRTLSTEIIFNLSPNNNISEALKKFGISANDTSILIVYIEEGEKQINQEYLISQVEGHQVSLKNLPEIMNITEVKKIYKLSSQEESIGTLLDAIICRMSTKDVL

SEQ ID NO: 6961 - protein, 142 aa, Homo sapiens
MQLTHQLDLFPECRIVDPFQILVAANKAVHLYKLGKMKTRTLSTEIIFNLSPNNNISEALKKFGISANDTSILIVYIEEGEKQINQEYLISQVEGHQVSLKNLPEIMNITEVKKIYKLSSQEESIGTLLDAIICRMSTKDVL

SEQ ID NO: 6962 - protein, 214 aa, Homo sapiens
MQLTHQLDLFPECRVTLLLFKDVKNAGDLRRKAMEGTIDGSLINPTVFHSCCPGWSAMARSWLTATSASRVQAIVLPQPPELLGLQIVDPFQILVAANKAVHLYKLGKMKTRTLSTEIIFNLSPNNNISEALKKFGISANDTSILIVYIEEGEKQINQEYLISQVEGHQVSLKNLPEIMNITEVKKIYKLSSQEESIGTLLDAIICRMSTKDVL

SEQ ID NO: 6963 - protein, 129 aa, Homo sapiens
MARGSLRRLLRLLVLGLWLALLRSVAGEQAPGTAPCSRGSSWSADLDKCMDCASCRARPHSDFCLGCAAAPPAPFRLLWPILGGALSLTFVLGLLSGFLVWRRCRRREKFTTPIEETGGEGCPAVALIQ

SEQ ID NO: 6964 - protein, 94 aa, Homo sapiens
MARGSLRRLLRLLVLGLWLALLRSVAGEQAPGAAAPPAPFRLLWPILGGALSLTFVLGLLSGFLVWRRCRRREKFTTPIEETGGEGCPAVALIQ

SEQ ID NO: 6965 - protein, 1962 aa, Homo sapiens
MRELEAKATKDVERNLSRDLVQEEEQLMEEKKKKKDDKKKKEAAQKKATEQKIKVPEQIKPSVSQPQPANSNNGTSTATSTNNNAKRATANNQQPQQQQQQQQPQQQQPQQQPQPQPQQQQPQQQPQALPRYPREVPPRFRHQEHKQLLKRGQHFPVIAANLGSAVKVLNSQSESSALTNQQPQNNGEVQNSKNQSDINHSTSGSHYENSQRGPVSSTSDSSTNCKNAVVSDLSEKEAWPSAPGSDPELASECMDADSASSSESERNITIMASGNTGGEKDGLRNSTGLGSQNKFVVGSSSNNVGHGSSTGPWGFSHGAIISTCQVSVDAPESKSESSNNRMNAWGTVSSSSNGGLNPSTLNSASNHGAWPVLENNGLALKGPVGSGSSGINIQCSTIGQMPNNQSINSKVSGGSTHGTWGSLQETCESEVSGTQKVSFSGQPQNITTEMTGPNNTTNFMTSSLPNSGSVQNNELPSSNTGAWRVSTMNHPQMQAPSGMNGTSLSHLSNGESKSGGSYGTTWGAYGSNYSGDKCSGPNGQANGDTVNATLMQPGVNGPMGTNFQVNTNKGGGVWESGAANSQSTSWGSGNGANSGGSRRGWGTPAQNTGTNLPSVEWNKLPSNQHSNDSANGNGKTFTNGWKSTEEEDQGSATSQTNEQSSVWAKTGGTVESDGSTESTGRLEEKGTGESQSRDRRKIDQHTLLQSIVNRTDLDPRVLSNSGWGQTPIKQNTAWDTETSPRGERKTDNGTEAWGSSATQTFNSGACIDKTSPNGNDTSSVSGWGDPKPALRWGDSKGSNCQGGWEDDSAATGMVKSNQWGNCKEEKAAWNDSQKNKQGWGDGQKSSQGWSVSASDNWGETSRNNHWGEANKKSSSGGSDSDRSVSGWNELGKTSSFTWGNNINPNNSSGWDESSKPTPSQGWGDPPKSNQSLGWGDSSKPVSSPDWNKQQDIVGSWGIPPATGKPPGTGWLGGPIPAPAKEEEPTGWEEPSPESIRRKMEIDDGTSAWGDPSKYNYKNVNMWNKNVPNGNSRSDQQAQVHQLLTPASAISNKEASSGSGWGEPWGEPSTPATTVDNGTSAWGKPIDSGPSWGEPIAAASSTSTWGSSSVGPQALSKSGPKSMQDGWCGDDMPLPGNRPTGWEEEEDVEIGMWNSNSSQELNSSLNWPPYTKKMSSKGLSGKKRRRERGMMKGGNKQEEAWINPFVKQFSNISFSRDSPEENVQSNKMDLSGGMLQDKRMEIDKHSLNIGDYNRTVGKGPGSRPQISKESSMERNPYFDKDGIVADESQNMQFMSSQSMKLPPSNSALPNQALGSIAGLGMQNLNSVRQNGNPSMFGVGNTAAQPRGMQQPPAQPLSSSQPNLRAQVPPPLLSPQVPVSLLKYAPNNGGLNPLFGPQQVAMLNQLSQLNQLSQISQLQRLLAQQQRAQSQRSVPSGNRPQQDQQGRPLSVQQQMMQQSRQLDPNLLVKQQTPPSQQQPLHQPAMKSFLDNVMPHTTPELQKGPSPINAFSNFPIGLNSNLNVNMDMNSIKEPQSRLRKWTTVDSISVNTSLDQNSSKHGAISSGFRLEESPFVPYDFMNSSTSPASPPGSIGDGWPRAKSPNGSSSVNWPPEFRPGEPWKGYPNIDPETDPYVTPGSVINNLSINTVREVDHLRDRNSGSSSSLNTTLPSTSAWSSIRASNYNVPLSSTAQSTSARNSDSKLTWSPGSVTNTSLAHELWKVPLPPKNITAPSRPPPGLTGQKPPLSTWDNSPLRIGGGWGNSDARYTPGSSWGESSSGRITNWLVLKNLTPQIDGSTLRTLCMQHGPLITFHLNLPHGNALVRYSSKEEVVKAQKSLHMCVLGNTTILAEFASEEEISRFFAQSQSLTPSPGWQSLGSSQSRLGSLDCSHSFSSRTDLNHWNGAGLSGTNCGDLHGTSLWGTPHYSTSLWGPPSSSDPRGISSPSPINAFLSVDHLGGGGESM

SEQ ID NO: 6966 - protein, 1709 aa, Homo sapiens
MDADSASSSESERNITIMASGNTGGEKDGLRNSTGLGSQNKFVVGSSSNNVGHGSSTGPWGFSHGAIISTCQVSVDAPESKSESSNNRMNAWGTVSSSSNGGLNPSTLNSASNHGAWPVLENNGLALKGPVGSGSSGINIQCSTIGQMPNNQSINSKVSGGSTHGTWGSLQETCESEVSGTQKVSFSGQPQNITTEMTGPNNTTNFMTSSLPNSGSVQNNELPSSNTGAWRVSTMNHPQMQAPSGMNGTSLSHLSNGESKSGGSYGTTWGAYGSNYSGDKCSGPNGQANGDTVNATLMQPGVNGPMGTNFQVNTNKGGGVWESGAANSQSTSWGSGNGANSGGSRRGWGTPAQNTGTNLPSVEWNKLPSNQHSNDSANGNGKTFTNGWKSTEEEDQGSATSQTNEQSSVWAKTGGTVESDGSTESTGRLEEKGTGESQSRDRRKIDQHTLLQSIVNRTDLDPRVLSNSGWGQTPIKQNTAWDTETSPRGERKTDNGTEAWGSSATQTFNSGACIDKTSPNGNDTSSVSGWGDPKPALRWGDSKGSNCQGGWEDDSAATGMVKSNQWGNCKEEKAAWNDSQKNKQGWGDGQKSSQGWSVSASDNWGETSRNNHWGEANKKSSSGGSDSDRSVSGWNELGKTSSFTWGNNINPNNSSGWDESSKPTPSQGWGDPPKSNQSLGWGDSSKPVSSPDWNKQQDIVGSWGIPPATGKPPGTGWLGGPIPAPAKEEEPTGWEEPSPESIRRKMEIDDGTSAWGDPSKYNYKNVNMWNKNVPNGNSRSDQQAQVHQLLTPASAISNKEASSGSGWGEPWGEPSTPATTVDNGTSAWGKPIDSGPSWGEPIAAASSTSTWGSSSVGPQALSKSGPKSMQDGWCGDDMPLPGNRPTGWEEEEDVEIGMWNSNSSQELNSSLNWPPYTKKMSSKGLSGKKRRRERGMMKGGNKQEEAWINPFVKQFSNISFSRDSPEENVQSNKMDLSGGMLQDKRMEIDKHSLNIGDYNRTVGKGPGSRPQISKESSMERNPYFDKDGIVADESQNMQFMSSQSMKLPPSNSALPNQALGSIAGLGMQNLNSVRQNGNPSMFGVGNTAAQPRGMQQPPAQPLSSSQPNLRAQVPPPLLSPQVPVSLLKYAPNNGGLNPLFGPQQVAMLNQLSQLNQLSQISQLQRLLAQQQRAQSQRSVPSGNRPQQDQQGRPLSVQQQMMQQSRQLDPNLLVKQQTPPSQQQPLHQPAMKSFLDNVMPHTTPELQKGPSPINAFSNFPIGLNSNLNVNMDMNSIKEPQSRLRKWTTVDSISVNTSLDQNSSKHGAISSGFRLEESPFVPYDFMNSSTSPASPPGSIGDGWPRAKSPNGSSSVNWPPEFRPGEPWKGYPNIDPETDPYVTPGSVINNLSINTVREVDHLRDRNSGSSSSLNTTLPSTSAWSSIRASNYNVPLSSTAQSTSARNSDSKLTWSPGSVTNTSLAHELWKVPLPPKNITAPSRPPPGLTGQKPPLSTWDNSPLRIGGGWGNSDARYTPGSSWGESSSGRITNWLVLKNLTPQIDGSTLRTLCMQHGPLITFHLNLPHGNALVRYSSKEEVVKAQKSLHMCVLGNTTILAEFASEEEISRFFAQSQSLTPSPGWQSLGSSQSRLGSLDCSHSFSSRTDLNHWNGAGLSGTNCGDLHGTSLWGTPHYSTSLWGPPSSSDPRGISSPSPINAFLSVDHLGGGGESM

SEQ ID NO: 6967 - protein, 329 aa, Homo sapiens
MLQDKRMEIDKHSLNIGDYNRTVGKGPGSRPQISKESSMERNPYFDKNGNPSMFGVGNTAAQPRGMQQPPAQPLSSSQPNLRAQVPPPLLSPQVPVSLLKYAPNNGGLNPLFGPQQVAMLNQLSQLNQLSQISQLQRLLAQQQRAQSQRSVPSGNRPQQDQQGRPLSVQQQMMQQSRQLDPNLLVKQQTPPSQQQPLHQPAMKSFLDNVMPHTTPELQKGPSPINAFSNFPIGLNSNLNVNMDMNSIKEPQSRLRKWTTVDSISVNTSLDQNSSKHGAISSGFRLEESPFVPYDFMNSSTSPASPPGSIGDGWPRAKSPNGSSSVNWPP

SEQ ID NO: 6968 - protein, 161 aa, Homo sapiens
MQHGPLITFHLNLPHGNALVRYSSKEEVVKAQKSLHMCVLGNTTILAEFASEEEISRFFAQSQSLTPSPGWQSLGSSQSRLGSLDCSHSFSSRTDLNHWNGAGLSGTNCGDLHGTSLWGTPHYSTSLWGPPSSSDPRGISSPSPINAFLSVDHLGGGGESM

SEQ ID NO: 6969 - protein, 1930 aa, Homo sapiens
MAYFGGTLYWLIFSTPFLLLGLVPEQIKPSVSQPQPANSNNGTSTATSTNNNAKRATANNQQPQQQQQQQQPQQQQPQQQPQPQPQQQQPQQQPQALPRYPREVPPRFRHQEHKQLLKRGQHFPVIAANLGSAVKVLNSQSESSALTNQQPQNNGEVQNSKNQSDINHSTSGSHYENSQRGPVSSTSDSSTNCKNAVVSDLSEKEAWPSAPGSDPELASECMDADSASSSESERNITIMASGNTGGEKDGLRNSTGLGSQNKFVVGSSSNNVGHGSSTGPWGFSHGAIISTCQVSVDAPESKSESSNNRMNAWGTVSSSSNGGLNPSTLNSASNHGAWPVLENNGLALKGPVGSGSSGINIQCSTIGQMPNNQSINSKVSGGSTHGTWGSLQETCESEVSGTQKVSFSGQPQNITTEMTGPNNTTNFMTSSLPNSGSVQNNELPSSNTGAWRVSTMNHPQMQAPSGMNGTSLSHLSNGESKSGGSYGTTWGAYGSNYSGDKCSGPNGQANGDTVNATLMQPGVNGPMGTNFQVNTNKGGGVWESGAANSQSTSWGSGNGANSGGSRRGWGTPAQNTGTNLPSVEWNKLPSNQHSNDSANGNGKTFTNGWKSTEEEDQGSATSQTNEQSSVWAKTGGTVESDGSTESTGRLEEKGTGESQSRDRRKIDQHTLLQSIVNRTDLDPRVLSNSGWGQTPIKQNTAWDTETSPRGERKTDNGTEAWGSSATQTFNSGACIDKTSPNGNDTSSVSGWGDPKPALRWGDSKGSNCQGGWEDDSAATGMVKSNQWGNCKEEKAAWNDSQKNKQGWGDGQKSSQGWSVSASDNWGETSRNNHWGEANKKSSSGGSDSDRSVSGWNELGKTSSFTWGNNINPNNSSGWDESSKPTPSQGWGDPPKSNQSLGWGDSSKPVSSPDWNKQQDIVGSWGIPPATGKPPGTGWLGGPIPAPAKEEEPTGWEEPSPESIRRKMEIDDGTSAWGDPSKYNYKNVNMWNKNVPNGNSRSDQQAQVHQLLTPASAISNKEASSGSGWGEPWGEPSTPATTVDNGTSAWGKPIDSGPSWGEPIAAASSTSTWGSSSVGPQALSKSGPKSMQDGWCGDDMPLPGNRPTGWEEEEDVEIGMWNSNSSQELNSSLNWPPYTKKMSSKGLSGKKRRRERGMMKGGNKQEEAWINPFVKQFSNISFSRDSPEENVQSNKMDLSGGMLQDKRMEIDKHSLNIGDYNRTVGKGPGSRPQISKESSMERNPYFDKDGIVADESQNMQFMSSQSMKLPPSNSALPNQALGSIAGLGMQNLNSVRQNGNPSMFGVGNTAAQPRGMQQPPAQPLSSSQPNLRAQVPPPLLSPQVPVSLLKYAPNNGGLNPLFGPQQVAMLNQLSQLNQLSQISQLQRLLAQQQRAQSQRSVPSGNRPQQDQQGRPLSVQQQMMQQSRQLDPNLLVKQQTPPSQQQPLHQPAMKSFLDNVMPHTTPELQKGPSPINAFSNFPIGLNSNLNVNMDMNSIKEPQSRLRKWTTVDSISVNTSLDQNSSKHGAISSGFRLEESPFVPYDFMNSSTSPASPPGSIGDGWPRAKSPNGSSSVNWPPEFRPGEPWKGYPNIDPETDPYVTPGSVINNLSINTVREVDHLRDRNSGSSSSLNTTLPSTSAWSSIRASNYNVPLSSTAQSTSARNSDSKLTWSPGSVTNTSLAHELWKVPLPPKNITAPSRPPPGLTGQKPPLSTWDNSPLRIGGGWGNSDARYTPGSSWGESSSGRITNWLVLKNLTPQIDGSTLRTLCMQHGPLITFHLNLPHGNALVRYSSKEEVVKAQKSLHMCVLGNTTILAEFASEEEISRFFAQSQSLTPSPGWQSLGSSQSRLGSLDCSHSFSSRTDLNHWNGAGLSGTNCGDLHGTSLWGTPHYSTSLWGPPSSSDPRGISSPSPINAFLSVDHLGGGGESM

SEQ ID NO: 6970 - protein, 1913 aa, Homo sapiens
MRELEAKATKDVERNLSRDLVQEEEQLMEEKKKKKDDKKKKEAAQKKATEQKIKVPEQIKPSVSQPQPANSNNGTSTATSTNNNAKRATANNQQPQQQQQQQQPQQQQPQQQPQPQPQQQQPQQQPQALPRYPREVPPRFRHQEHKQLLKRGQHFPVIAANLGSAVKVLNSQSESSALTNQQPQNNGEVQNSKNQSDINHSTSGSHYENSQRGPVSSTSDSSTNCKNAVVSDLSEKEAWPSAPGSDPELASECMDADSASSSESERNITIMASGNTGGEKDGLRNSTGLGSQNKFVVGSSSNNVGHGSSTGPWGFSHGAIISTCQVSVDAPESKSESSNNRMNAWGTVSSSSNGGLNPSTLNSASNHGAWPVLENNGLALKGPVGSGSSGINIQCSTIGQMPNNQSINSKVSGGSTHGTWGSLQETCESEVSGTQKVSFSGQPQNITTEMTGPNNTTNFMTSSLPNSGSVQNNELPSSNTGAWRVSTMNHPQMQAPSGMNGTSLSHLSNGESKSGGSYGTTWGAYGSNYSGDKCSGPNGQANGDTVNATLMQPGVNGPMGTNFQVNTNKGGGVWESGAANSQSTSWGSGNGANSGGSRRGWGTPAQNTGTNLPSVEWNKLPSNQHSNDSANGNGKTFTNGWKSTEEEDQGSATSQTNEQSSVWAKTGGTVESDGSTESTGRLEEKGTGESQSRDRRKIDQHTLLQSIVNRTDLDPRVLSNSGWGQTPIKQNTAWDTETSPRGERKTDNGTEAWGSSATQTFNSGACIDKTSPNGNDTSSVSGWGDPKPALRWGDSKGSNCQGGWEDDSAATGMVKSNQWGNCKEEKAAWNDSQKNKQGWGDGQKSSQGWSVSASDNWGETSRNNHWGEANKKSSSGGSDSDRSVSGWNELGKTSSFTWGNNINPNNSSGWDESSKPTPSQGWGDPPKSNQSLGWGDSSKPVSSPDWNKQQDIVGSWGIPPATGKPPGTGWLGGPIPAPAKEEEPTGWEEPSPESIRRKMEIDDGTSAWGDPSKYNYKNVNMWNKNVPNGNSRSDQQAQVHQLLTPASAISNKEASSGSGWGEPWGEPSTPATTVDNGTSAWGKPIDSGPSWGEPIAAASSTSTWGSSSVGPQALSKSGPKSMQDGWCGDDMPLPGNRPTGWEEEEDVEIGMWNSNSSQELNSSLNWPPYTKKMSSKGLSGKKRRRERGMMKGGNKQEEAWINPFVKQFSNISFSRDSPEENVQSNKMDLSGGMLQDKRMEIDKHSLNIGDYNRTVGKGPGSRPQISKESSMERNPYFDKNGNPSMFGVGNTAAQPRGMQQPPAQPLSSSQPNLRAQVPPPLLSPQVPVSLLKYAPNNGGLNPLFGPQQVAMLNQLSQLNQLSQISQLQRLLAQQQRAQSQRSVPSGNRPQQDQQGRPLSVQQQMMQQSRQLDPNLLVKQQTPPSQQQPLHQPAMKSFLDNVMPHTTPELQKGPSPINAFSNFPIGLNSNLNVNMDMNSIKEPQSRLRKWTTVDSISVNTSLDQNSSKHGAISSGFRLEESPFVPYDFMNSSTSPASPPGSIGDGWPRAKSPNGSSSVNWPPEFRPGEPWKGYPNIDPETDPYVTPGSVINNLSINTVREVDHLRDRNSGSSSSLNTTLPSTSAWSSIRASNYNVPLSSTAQSTSARNSDSKLTWSPGSVTNTSLAHELWKVPLPPKNITAPSRPPPGLTGQKPPLSTWDNSPLRIGGGWGNSDARYTPGSSWGESSSGRITNWLVLKNLTPQIDGSTLRTLCMQHGPLITFHLNLPHGNALVRYSSKEEVVKAQKSLHMCVLGNTTILAEFASEEEISRFFAQSQSLTPSPGWQSLGSSQSRLGSLDCSHSFSSRTDLNHWNGAGLSGTNCGDLHGTSLWGTPHYSTSLWGPPSSSDPRGISSPSPINAFLSVDHLGGGGESM

SEQ ID NO: 6971 - protein, 100 aa, Homo sapiens
METRQVSRSPRVRLLLLLLLLLVVPWGVRTASGVALPPVGVLSLRPPGRAWADPATPRPRRSLALADDAAFRERARLLAALERRHWLNSYMHKLLVLDAP

SEQ ID NO: 6972 - protein, 655 aa, Homo sapiens
MGTSPSSSTALASCSRIARRATATMIAGSLLLLGFLSTTTAQPEQKASNLIGTYRHVDRATGQVLTCDKCPAGTYVSEHCTNTSLRVCSSCPVGTFTRHENGIEKCHDCSQPCPWPMIEKLPCAALTDRECTCPPGMFQSNATCAPHTVCPVGWGVRKKGTETEDVRCKQCARGTFSDVPSSVMKCKAYTDCLSQNLVVIKPGTKETDNVCGTLPSFSSSTSPSPGTAIFPRPEHMETHEVPSSTYVPKGMNSTESNSSASVRPKVLSSIQEGTVPDNTSSARGKEDVNKTLPNLQVVNHQQGPHHRHILKLLPSMEATGGEKSSTPIKGPKRGHPRQNLHKHFDINEHLPWMIVLFLLLVLVVIVVCSIRKSSRTLKKGPRQDPSAIVEKAGLKKSMTPTQNREKWIYYCNGHGIDILKLVAAQVGSQWKDIYQFLCNASEREVAAFSNGYTADHERAYAALQHWTIRGPEASLAQLISALRQHRRNDVVEKIRGLMEDTTQLETDKLALPMSPSPLSPSPIPSPNAKLENSALLTVEPSPQDKNKGFFVDESEPLLRCDSTSSGSSALSRNGSFITKEKKDTVLRQVRLDPCDLQPIFDDMLHFLNPEELRVIEEIPQAEDKLDRLFEIIGVKSQEASQTLLDSVYSHLPDLL

SEQ ID NO: 6973 - protein, 115 aa, Homo sapiens
MLFSSLLCVFVAFSYSGSSVAQKVTQAQSSVSMPVRKAVTLNCLYETSWWSYYIFWYKQLPSKEMIFLIRQGSDEQNAKSGRYSVNFKKAAKSVALTISALQLEDSAKYFCALGE

SEQ ID NO: 6974 - protein, 115 aa, Homo sapiens
MAGTVLGVGAGVFILALLWVAVLLLCVLLSRASGAARFSVIFLFFGAVIITSVLLLFPRAGEFPAPEVEVKIVDDFFIGRYVLLAFLSAIFLGGLFLVLIHYVLEPIYAKPLHSY

SEQ ID NO: 6975 - protein, 642 aa, Homo sapiens
MATAMDWLPWSLLLFSLMCETSAFYVPGVAPINFHQNDPVEIKAVKLTSSRTQLPYEYYSLPFCQPSKITYKAENLGEVLRGDRIVNTPFQVLMNSEKKCEVLCSQSNKPVTLTVEQSRLVAERITEDYYVHLIADNLPVATRLELYSNRDSDDKKKEKDVQFEHGYRLGFTDVNKIYLHNHLSFILYYHREDMEEDQEHTYRVVRFEVIPQSIRLEDLKADEKSSCTLPEGTNSSPQEIDPTKENQLYFTYSVHWEESDIKWASRWDTYLTMSDVQIHWFSIINSVVVVFFLSGILSMIIIRTLRKDIANYNKEDDIEDTMEESGWKLVHGDVFRPPQYPMILSSLLGSGIQLFCMILIVIFVAMLGMLSPSSRGALMTTACFLFMFMGVFGGFSAGRLYRTLKGHRWKKGAFCTATLYPGVVFGICFVLNCFIWGKHSSGAVPFPTMVALLCMWFGISLPLVYLGYYFGFRKQPYDNPVRTNQIPRQIPEQRWYMNRFVGILMAGILPFGAMFIELFFIFSAIWENQFYYLFGFLFLVFIILVVSCSQISIVMVYFQLCAEDYRWWWRNFLVSGGSAFYVLVYAIFYFVNKLDIVEFIPSLLYFGYTALMVLSFWLLTGTIGFYAAYMFVRKIYAAVKID

SEQ ID NO: 6976 - protein, 133 aa, Homo sapiens
MRDLSERRLGQPELKAEQQMPLEPVRARLSVGLACCCSHTTAEASSLEHGDKVFGQGFPSPLEEIKRLLKISRALQARSVPSTQEKAKCLSGEPGQPEGKGQETYPGPGKVEGKAEPAMRKDDVCPGMKCISG

SEQ ID NO: 6977 - protein, 583 aa, Homo sapiens
MAGDGRRAEAVREGWGVYVTPRAPIREGRGRLAPQNGGSSDAPAYRTPPSRQGRREVRFSDEPPEVYGDFEPLVAKERSPVGKRTRLEEFRSDSAKEEVRESAYYLRSRQRRQPRPQETEEMKTRRTTRLQQQHSEQPPLQPSPVMTRRGLRDSHSSEEDEASSQTDLSQTISKKTVRSIQEAPVSEDLVIRLRRPPLRYPRYEATSVQQKVNFSEEGETEEDDQDSSHSSVTTVKARSRDSDESGDKTTRSSSQYIESFWQSSQSQNFTAHDKQPSVLSSGYQKTPQEWAPQTARIRTRMQNDSILKSELGNQSPSTSSRQVTGQPQNASFVKRNRWWLLPLIAALASGSFWFFSTPEVETTAVQEFQNQMNQLKNKYQGQDEKLWKRSQTFLEKHLNSSHPRSQPAILLLTAARDAEEALRCLSEQIADAYSSFRSVRAIRIDGTDKATQDSDTVKLEVDQELSNGFKNGQNAAVVHRFESFPAGSTLIFYKYCDHENAAFKDVALVLTVLLEEETLGTSLGLKEVEEKVRDFLKVKFTNSNTPNSYNHMDPDKLNGLWSRISHLVLPVQPENALKRGICL

SEQ ID NO: 6978 - protein, 379 aa, Homo sapiens
MAGDGRRAEAVREGWGVYVTPRAPIREGRGRLAPQNGGSSDAPAYRTPPSRQGRREVRFSDEPPEVYGDFEPLVAKERSPVGKRTRLEEFRSDSAKEEVRESAYYLRSRQRRQPRPQETEEMKTRRTTRLQQQHSEQPPLQPSPVMTRRGLRDSHSSEEDEASSQTDLSQTISKKTVRSIQEAPAVSEDLVIRLRRPPLRYPRYEATSVQQKVNFSEEGETEEDDQDSSHSSVTTVKARSRDSDESGDKTTRSSSQYIESFWQSSQSQNFTAHDKQPSVLSSGSTLIFYKYCDHENAAFKDVALVLTVLLEEETLGTSLGLKEVEEKVRDFLKVKFTNSNTPNSYNHMDPDKLNGLWSRISHLVLPVQPENALKRGICL

SEQ ID NO: 6979 - protein, 584 aa, Homo sapiens
MAGDGRRAEAVREGWGVYVTPRAPIREGRGRLAPQNGGSSDAPAYRTPPSRQGRREVRFSDEPPEVYGDFEPLVAKERSPVGKRTRLEEFRSDSAKEEVRESAYYLRSRQRRQPRPQETEEMKTRRTTRLQQQHSEQPPLQPSPVMTRRGLRDSHSSEEDEASSQTDLSQTISKKTVRSIQEAPAVSEDLVIRLRRPPLRYPRYEATSVQQKVNFSEEGETEEDDQDSSHSSVTTVKARSRDSDESGDKTTRSSSQYIESFWQSSQSQNFTAHDKQPSVLSSGYQKTPQEWAPQTARIRTRMQNDSILKSELGNQSPSTSSRQVTGQPQNASFVKRNRWWLLPLIAALASGSFWFFSTPEVETTAVQEFQNQMNQLKNKYQGQDEKLWKRSQTFLEKHLNSSHPRSQPAILLLTAARDAEEALRCLSEQIADAYSSFRSVRAIRIDGTDKATQDSDTVKLEVDQELSNGFKNGQNAAVVHRFESFPAGSTLIFYKYCDHENAAFKDVALVLTVLLEEETLGTSLGLKEVEEKVRDFLKVKFTNSNTPNSYNHMDPDKLNGLWSRISHLVLPVQPENALKRGICL

SEQ ID NO: 6980 - protein, 369 aa, Homo sapiens
MGLRKKSTKNPPVLSQEFILQNHADIVSCVGMFFLLGLVFEGTAEASIVFLTLQHSVAVPAAEEQATGSKSLYYYGVKDLATVFFYMLVAIIIHATIQEYVLDKINKRMQFTKAKQNKFNESGQFSVFYFFSCIWGTFILISENCLSDPTLIWKARPHSMMTFQMKFFYISQLAYWFHAFPELYFQKTKKQDIPRQLVYIGLHLFHITGAYLLYLNHLGLLLLVLHYFVELLSHMCGLFYFSDEKYQKGISLWAIVFILGRLVTLIVSVLTVGFHLAGSQNRNPDALTGNVNVLAAKIAVLSSSCTIQAYVTWNLITLWLQRWVEDSNIQASCMKKKRSRSSKKRTENGVGVETSNRVDCPPKRKEKSS

SEQ ID NO: 6981 - protein, 477 aa, Homo sapiens [sequence omitted]

SEQ ID NO: 6982 - protein, 64 aa, Homo sapiens
MSGREGGKKKPLKQPKKQAKEMDEEDKAFKQKQKEEQKKLEELKAKAAGKGPLATGGIKKSGKK

SEQ ID NO: 6983 - protein, 452 aa, Homo sapiens
MNSGISQVFQRELTCPICLNYFIDPVTIDCGHSFCRPCFYLNWQDIPILTQCFECLKTTQQRNLKTNIRLKKMASRARKASLWLFLSSEEQMCGTHRETKKIFCEVDRSLLCLLCSSSLEHRYHRHCPAEWAAEEHREKLLKKMQSLWEKVCENQRNLNVETTRISHWKDYVNVRLEAIRAEYQKMPAFHHEEEKHNLEMLKKKGKDIFHRLHLSKAKMAHRREILRGTYAELMKMCHKPDVELLQAFGDILHRSESVLLHMPQPLNLELRAGPITGLRDRLNQFRVDITLPHNEANSHIFRRGDLRSICIGCDRQNAPHITATPTSFLAWGAQTFTSGKYYWEVHVGDSWNWAFGVCNKYWKGTNQNGNIHGEEGLFSLGCVKNDIQCSLFTTSPLTLQYVPRPTNHVGLFLDCEARTVSFVDVNQSSPIHTIPNCSFSPPLRPIFCCVHL

SEQ ID NO: 6984 - protein, 247 aa, Homo sapiens
MLRFIQKFSQASSKILKYSFPVGLRTSRTDILSLKMSLQQNFSPCPRPWLSSSFPAYMSKTQCYHTSPCSFKKQQKQALLARPSSTITYLTDSPKPALCVTLAGLIPFVAPPLVMLMTKTYIPILAFTQMAYGASFLSFLGGIRWGFALPEGSPAKPDYLNLASSAAPLFFSWFAFLISERLSEAIVTVIMGMGVAFHLELFLLPHYPNWFKALRIVVTLLATFSFIITLVVKSSFPEKGHKRPGQV

SEQ ID NO: 6985 - protein, 288 aa, Homo sapiens
MSDSGEQNYGERESRSASRSGSAHGSGKSARHTPARSRSKEDSRRSRSKSRSRSESRSRSRRSSRRHYTRSRSRSRSHRRSRSRSYSRDYRRRHSHSHSPMSTRRRHVGNRANPDPNCCLGVFGLSLYTTERDLREVFSKYGPIADVSIVYDQQSRRSRGFAFVYFENVDDAKEAKERANGMELDGRRIRVDFSITKRPHTPTPGIYMGRPTYGSSRRRDYYDRGYDRGYDDRDYYSRSYRGGGGGGGGWRAAQDRDQIYRRRSPSPYYSRGGYRSRSRSRSYSPRRY

SEQ ID NO: 6986 - protein, 38 aa, Homo sapiens
MSDSGEQNYGERVNVEEGKCGSRHLTSFINEYLKLRNK

SEQ ID NO: 6987 - protein, 188 aa, Homo sapiens
MSTRRRHVGNRANPDPNCCLGVFGLSLYTTERDLREVFSKYGPIADVSIVYDQQSRRSRGFAFVYFENVDDAKEAKERANGMELDGRRIRVDFSITKRPHTPTPGIYMGRPTYGSSRRRDYYDRGYDRGYDDRDYYSRSYRGGGGGGGGWRAAQDRDQIYRRRSPSPYYSRGGYRSRSRSRSYSPRRY

SEQ ID NO: 6988 - protein, 113 aa, Homo sapiens
MAGPAAAFRRLGALSGAAALGFASYGAHGAQFPDAYGKELFDKANKHHFLHSLALLGVPHCRKPLWAGLLLASGTTLFCTSFYYQALSGDPSIQTLAPAGGTLLLLGWLALAL

SEQ ID NO: 6989 - protein, 108 aa, Homo sapiens
MEDEEKAVEILGNTEAAHPPSPIRCCWLRLRCLAATSIICGCSCLGVMALVFAIKAEERHKAGRSEEAVRWGARARKLILASFAVWLAVLILGPLLLWLLSYAIAQAE

SEQ ID NO: 6990 - protein, 322 aa, Homo sapiens
MEGISNFKTPSKLSEKKKSVLCSTPTINIPASPFMQKLGFGTGVNVYLMKRSPRGLSHSPWAVKKINPICNDHYRSVYQKRLMDEAKILKSLHHPNIVGYRAFTEANDGSLCLAMEYGGEKSLNDLIEERYKASQDPFPAAIILKVALNMARGLKYLHQEKKLLHGDIKSSNVVIKGDFETIKICDVGVSLPLDENMTVTDPEACYIGTEPWKPKEAVEENGVITDKADIFAFGLTLWEMMTLSIPHINLSNDDDDEDKTFDESDFDDEAYYAALGTRPPINMEELDESYQKVIELFSVCTNEDPKDRPSAAHIVEALETDV

SEQ ID NO: 6991 - protein, 333 aa, Homo sapiens
MEGISNFKTPSKLSEKKKSVLCSTPTINIPASPFMQKLGFGTGVNVYLMKRSPRGLSHSPWAVKKINPICNDHYRSVYQKRLMDEAKILKSLHHPNIVGYRAFTEANDGSLCLAMEYGGEKSLNDLIEERYKASQDPFPAAIILKVALNMARGLKYLHQEKKLLHGDIKSSNVVIKGDFETIKICDVGVSLPLDENMTAPAFITILLVSVTDPEACYIGTEPWKPKEAVEENGVITDKADIFAFGLTLWEMMTLSIPHINLSNDDDDEDKTFDESDFDDEAYYAALGTRPPINMEELDESYQKVIELFSVCTNEDPKDRPSAAHIVEALETDV

SEQ ID NO: 6992 - protein, 1045 aa, Homo sapiens
MGSQPPLGSPLSREEGEAPPPAPASEGRRRSRRVRLRGSCRHRPSFLGCRELAASAPARPAPASSEIMASAAKEFKMDNFSPKAGTSKLQQTVPADASPDSKCPICLDRFDNVSYLDRCLHKFCFRCVQEWSKNKAECPLCKQPFDSIFHSVRAEDDFKEYVLRPSYNGSFVTPDRRFRYRTTLTRERNASVYSPSGPVNRRTTTPPDSGVLFEGLGISTRPRDVEIPQFMRQIAVRRPTTADERSLRKIQEQDIINFRRTLYRAGARVRNIEDGGRYRDISAEFFRRNPACLHRLVPWLKRELTVLFGAHGSLVNIVQHIIMSNVTRYDLESQAFVSDLRPFLLNRTEHFIHEFISFARSPFNMAAFDQHANYDCPAPSYEEGSHSDSSVITISPDEAETQELDINVATVSQAPWDDETPGPSYSSSEQVHVTMSSLLNTSDSSDEELVTGGATSQIQGVQTNDDLNNDSDDSSDNCVIVGFVKPLAERTPELVELSSDSEDLGSYEKMETVKTQEQEQSYSSGDSDVSRCSSPHSVLGKDEQINKGHCDSSTRIKSKKEEKRSTSLSSPRNLNSSVRGDRVYSPYNHRHRKRGRSRSSDSRSQSRSGHDQKNHRKHHGKKRMKSKRSRSRESSRPRGRRDKKRSRTRDSSWSRRSQTLSLSSESTSRSRSRSSDHGKRRSRSRNRDRYYLRNNYGSRYKWEYTYYSRNKDRDGYESSYRRRTLSRAHYSRQSSSPEFRVQSFSERTNARKKNNHSERKYYYYERHRSRSLSSNRSRTASTGTDRVRNEKPGGKRKYKTRHLEGTNEVAQPSREFASKAKDSHYQKSSSKLDGNYKNESDTFSDSRSSDRETKHKRRKRKTRSLSVEIVYEGKATDTTKHHKKKKKKHKKKHKKHHGDNASRSPVVITIDSDSDKDSEVKEDTECDNSGPQDPLQNEFLAPSLEPFETKDVVTIEAEFGVLDKECDIATLSNNLNNANKTVDNIPPLAASVEQTLDVREESTFVSDLENQPSNIVSLQTEPSRQLPSPRTSLMSVCLGRDCDMS

SEQ ID NO: 6993 - protein, 980 aa, Homo sapiens
MIMASAAKEFKMDNFSPKAGTSKLQQTVPADASPDSKCPICLDRFDNVSYLDRCLHKFCFRCVQEWSKNKAECPLCKQPFDSIFHSVRAEDDFKEYVLRPSYNGSFVTPDRRFRYRTTLTRERNASVYSPSGPVNRRTTTPPDSGVLFEGLGISTRPRDVEIPQFMRQIAVRRPTTADERSLRKIQEQDIINFRRTLYRAGARVRNIEDGGRYRDISAEFFRRNPACLHRLVPWLKRELTVLFGAHGSLVNIVQHIIMSNVTRYDLESQAFVSDLRPFLLNRTEHFIHEFISFARSPFNMAAFDQHANYDCPAPSYEEGSHSDSSVITISPDEAETQELDINVATVSQAPWDDETPGPSYSSSEQVHVTMSSLLNTSDSSDEELVTGGATSQIQGVQTNDDLNNDSDDSSDNCVIVGFVKPLAERTPELVELSSDSEDLGSYEKMETVKTQEQEQSYSSGDSDVSRCSSPHSVLGKDEQINKGHCDSSTRIKSKKEEKRSTSLSSPRNLNSSVRGDRVYSPYNHRHRKRGRSRSSDSRSQSRSGHDQKNHRKHHGKKRMKSKRSRSRESSRPRGRRDKKRSRTRDSSWSRRSQTLSLSSESTSRSRSRSSDHGKRRSRSRNRDRYYLRNNYGSRYKWEYTYYSRNKDRDGYESSYRRRTLSRAHYSRQSSSPEFRVQSFSERTNARKKNNHSERKYYYYERHRSRSLSSNRSRTASTGTDRVRNEKPGGKRKYKTRHLEGTNEVAQPSREFASKAKDSHYQKSSSKLDGNYKNESDTFSDSRSSDRETKHKRRKRKTRSLSVEIVYEGKATDTTKHHKKKKKKHKKKHKKHHGDNASRSPVVITIDSDSDKDSEVKEDTECDNSGPQDPLQNEFLAPSLEPFETKDVVTIEAEFGVLDKECDIATLSNNLNNANKTVDNIPPLAASVEQTLDVREESTFVSDLENQPSNIVSLQTEPSRQLPSPRTSLMSVCLGRDCDMS

SEQ ID NO: 6994 - protein, 454 aa, Homo sapiens
MAAWKSWTALRLCATVVVLDMVVCKGFVEDLDESFKENRNDDIWLVDFYAPWCGHCKKLEPIWNEVGLEMKSIGSPVKVGKMDATSYSSIASEFGVRGYPTIKLLKGDLAYNYRGPRTKDDIIEFAHRVSGALIRPLPSQQMFEHMQKRHRVFFVYVGGESPLKEKYIDAASELIVYTYFFSASEEVVPEYVTLKEMPAVLVFKDETYFVYDEYEDGDLSSWINRERFQNYLAMDGFLLYELGDTGKLVALAVIDEKNTSVEHTRLKSIIQEVARDYRDLFHRDFQFGHMDGNDYINTLLMDELTVPTVVVLNTSNQQYFLLDRQIKNVEDMVQFINNILDGTVEAQGGDSILQRLKRIVFDAKSTIVSIFKSSPLMGCFLFGLPLGVISIMCYGIYTADTDGGYIEERYEVSKSENENQEQIEESKEQQEPSSGGSVVPTVQEPKDVLEKKKD

SEQ ID NO: 6995 - protein, 195 aa, Homo sapiens
MAAWKSWTALRLCATVVVLDMVVCKGFVEDLDESFKENRNDDIWLVDFYAPWCGHCKKLEPIWNEVGLEMKSIGSPVKVGKMDATSYSSIASEFGVRGYPTIKLLKGDLAYNYRGPRTKDDIIEFAHRVSGALIRPLPSQQMFEHMQKRHRVFFVYVGGESPLKEKYIDAASELIVYTYFFSASEEVVPEVIFKI

SEQ ID NO: 6996 - protein, 1378 aa, Homo sapiens
MSLERELRQLSKAKAKAQRAGQRREEAALCHQLGELLAGHGRYAEALEQHWQELQLRERADDPLGCAVAHRKIGERLAEMEDYPAALQHQHQYLELAHSLRNHTELQRAWATIGRTHLDIYDHCQSRDALLQAQAAFEKSLAIVDEELEGTLAQGELNEMRTRLYLNLGLTFESLQQTALCNDYFRKSIFLAEQNHLYEDLFRARYNLGTIHWRAGQHSQAMRCLEGARECAHTMRKRFMESECCVVIAQVLQDLGDFLAAKRALKKAYRLGSQKPVQRAAICQNLQHVLAVVRLQQQLEEAEGRDPQGAMVICEQLGDLFSKAGDFPRAAEAYQKQLRFAELLDRPGAERAIIHVSLATTLGDMKDHHGAVRHYEEELRLRSGNVLEEAKTWLNIALSREEAGDAYELLAPCFQKALSCAQQAQRPQLQRQVLQHLHTVQLRLQPQEAPETETRLRELSVAEDEDEEEEAEEAAATAESEALEAGEVELSEGEDDTDGLTPQLEEDEELQGHLGRRKGSKWNRRNDMGETLLHRACIEGQLRRVQDLVRQGHPLNPRDYCGWTPLHEACNYGHLEIVRFLLDHGAAVDDPGGQGCEGITPLHDALNCGHFEVAELLLERGASVTLRTRKGLSPLETLQQWVKLYRRDLDLETRQKARAMEMLLQAAASGQDPHSSQAFHTPSSLLFDPETSPPLSPCPEPPSNSTRLPEASQAHVRVSPGQAAPAMARPRRSRHGPASSSSSSEGEDSAGPARPSQKRPRCSATAQRVAAWTPGPASNREAATASTSRAAYQAAIRGVGSAQSRLGPGPPRGHSKALAPQAALIPEEECLAGDWLELDMPLTRSRRPRPRGTGDNRRPSSTSGSDSEESRPRARAKQVRLTCMQSCSAPVNAGPSSLASEPPGSPSTPRVSEPSGDSSAAGQPLGPAPPPPIRVRVQVQDHLFLIPVPHSSDTHSVAWLAEQAAQRYYQTCGLLPRLTLRKEGALLAPQDLIPDVLQSNDEVLAEVTSWDLPPLTDRYRRACQSLGQGEHQQVLQAVELQGLGLSFSACSLALDQAQLTPLLRALKLHTALRELRLAGNRLGDKCVAELVAALGTMPSLALLDLSSNHLGPEGLRQLAMGLPGQATLQSLEELDLSMNPLGDGCGQSLASLLHACPLLSTLRLQACGFGPSFFLSHQTALGSAFQDAEHLKTLSLSYNALGAPALARTLQSLPAGTLLHLELSSVAAGKGDSDLMEPVFRYLAKEGCALAHLTLSANHLGDKAVRDLCRCLSLCPSLISLDLSANPEISCASLEELLSTLQKRPQGLSFLGLSGCAVQGPLGLGLWDKIAAQLRELQLCSRRLCAEDRDALRQLQPSRPGPGECTLDHGSKLFFRRL

SEQ ID NO: 6997 - protein, 1378 aa, Homo sapiens
MSLERELRQLSKAKAKAQRAGQRREEAALCHQLGELLAGHGRYAEALEQHWQELQLRERADDPLGCAVAHRKIGERLAEMEDYPAALQHQHQYLELAHSLRNHTELQRAWATIGRTHLDIYDHCQSRDALLQAQAAFEKSLAIVDEELEGTLAQGELNEMRTRLYLNLGLTFESLQQTALCNDYFRKSIFLAEQNHLYEDLFRARYNLGTIHWRAGQHSQAMRCLEGARECAHTMRKRFMESECCVVIAQVLQDLGDFLAAKRALKKAYRLGSQKPVQRAAICQNLQHVLAVVRLQQQLEEAEGRDPQGAMVICEQLGDLFSKAGDFPRAAEAYQKQLRFAELLDRPGAERAIIHVSLATTLGDMKDHHGAVRHYEEELRLRSGNVLEEAKTWLNIALSREEAGDAYELLAPCFQKALSCAQQAQRPQLQRQVLQHLHTVQLRLQPQEAPETETRLRELSVAEDEDEEEEAEEAAATAESEALEAGEVELSEGEDDTDGLTPQLEEDEELQGHLGRRKGSKWNRRNDMGETLLHRACIEGQLRRVQDLVRQGHPLNPRDYCGWTPLHEACNYGHLEIVRFLLDHGAAVDDPGGQGCEGITPLHDALNCGHFEVAELLLERGASVTLRTRKASARWRRCSSGVKLYRRDLDLETRQKARAMEMLLQAAASGQDPHSSQAFHTPSSLLFDPETSPPLSPCPEPPSNSTRLPEASQAHVRVSPGQAAPAMARPRRSRHGPASSSSSSEGEDSAGPARPSQKRPRCSATAQRVAAWTPGPASNREAATASTSRAAYQAAIRGVGSAQSRLGPGPPRGHSKALAPQAALIPEEECLAGDWLELDMPLTRSRRPRPRGTGDNRRPSSTSGSDSEESRPRARAKQVRLTCMQSCSAPVNAGPSSLASEPPGSPSTPRVSEPSGDSSAAGQPLGPAPPPPIRVRVQVQDHLFLIPVPHSSDTHSVAWLAEQAAQRYYQTCGLLPRLTLRKEGALLAPQDLIPDVLQSNDEVLAEVTSWDLPPLTDRYRRACQSLGQGEHQQVLQAVELQGLGLSFSACSLALDQAQLTPLLRALKLHTALRELRLAGNRLGDKCVAELVAALGTMPSLALLDLSSNHLGPEGLRQLAMGLPGQATLQSLEELDLSMNPLGDGCGQSLASLLHACPLLSTLRLQACGFGPSFFLSHQTALGSAFQDAEHLKTLSLSYNALGAPALARTLQSLPAGTLLHLELSSVAAGKGDSDLMEPVFRYLAKEGCALAHLTLSANHLGDKAVRDLCRCLSLCPSLISLDLSANPEISCASLEELLSTLQKRPQGLSFLGLSGCAVQGPLGLGLWDKIAAQLRELQLCSRRLCAEDRDALRQLQPSRPGPGECTLDHGSKLFFRRL

SEQ ID NO: 6998 - protein, 236 aa, Homo sapiens
MSEAPRAETFVFLDLEATGLPSVEPEIAELSLFAVHRSSLENPEHDESGALVLPRVLDKLTLCMCPERPFTAKASEITGLSSEGLARCRKAGFDGAVVRTLQAFLSRQAGPICLVAHNGFDYDFPLLCAELRRLGARLPRDTVCLDTLPALRGLDRAHSHGTRARGRQGYSLGSLFHRYFRAEPSAAHSAEGDVHTLLLIFLHRAAELLAWADEQARGWAHIEPMYLPPDDPSLEA

SEQ ID NO: 6999 - protein, 279 aa, Homo sapiens
MGRAGSPLPRSSWPRMDDCGSRSRCSPTLCSSLRTCYPRGNITMSEAPRAETFVFLDLEATGLPSVEPEIAELSLFAVHRSSLENPEHDESGALVLPRVLDKLTLCMCPERPFTAKASEITGLSSEGLARCRKAGFDGAVVRTLQAFLSRQAGPICLVAHNGFDYDFPLLCAELRRLGARLPRDTVCLDTLPALRGLDRAHSHGTRARGRQGYSLGSLFHRYFRAEPSAAHSAEGDVHTLLLIFLHRAAELLAWADEQARGWAHIEPMYLPPDDPSLEA

SEQ ID NO: 7000 - protein, 698 aa, Homo sapiens
MRLAVGALLVCAVLGLCLAVPDKTVRWCAVSEHEATKCQSFRDHMKSVIPSDGPSVACVKKASYLDCIRAIAANEADAVTLDAGLVYDAYLAPNNLKPVVAEFYGSKEDPQTFYYAVAVVKKDSGFQMNQLRGKKSCHTGLGRSAGWNIPIGLLYCDLPEPRKPLEKAVANFFSGSCAPCADGTDFPQLCQLCPGCGCSTLNQYFGYSGAFKCLKDGAGDVAFVKHSTIFENLANKADRDQYELLCLDNTRKPVDEYKDCHLAQVPSHTVVARSMGGKEDLIWELLNQAQEHFGKDKSKEFQLFSSPHGKDLLFKDSAHGFLKVPPRMDAKMYLGYEYVTAIRNLREGTCPEAPTDECKPVKWCALSHHERLKCDEWSVNSVGKIECVSAETTEDCIAKIMNGEADAMSLDGGFVYIAGKCGLVPVLAENYNKSDNCEDTPEAGYFAIAVVKKSASDLTWDNLKGKKSCHTAVGRTAGWNIPMGLLYNKINHCRFDEFFSEGCAPGSKKDSSLCKLCMGSGLNLCEPNNKEGYYGYTGAFRCLVEKGDVAFVKHQTVPQNTGGKNPDPWAKNLNEKDYELLCLDGTRKPVEEYANCHLARAPNHAVVTRKDKEACVHKILRQQQHLFGSNVTDCSGNFCLFRSETKDLLFRDDTVCLAKLHDRNTYEKYLGEEYVKAVGNLRKCSTSSLLEACTFRRP

SEQ ID NO: 7001 - protein, 156 aa, Homo sapiens
MAGWPGAGPLCVLGGAALGVCLAGVAGQLVEPSTAPPKPKPPPLTKETVVFWDMRLWHVVGIFSLFVLSIIITLCCVFNCRVPRTRKEIEARYLQRKAAKMYTDKLETVPPLNELTEVPGEDKKKKKKKKKDSVDTVAIKVEEDEKNEAKKKKGEK

SEQ ID NO: 7002 - protein, 366 aa, Homo sapiens
MALPPGPAALRHTLLLLPALLSSGWGELEPQIDGQTWAERALRENERHAFTCRVAGGPGTPRLAWYLDGQLQEASTSRLLSVGGEAFSGGTSTFTVTAHRAQHELNCSLQDPRSGRSANASVILNVQFKPEIAQVGAKYQEAQGPGLLVVLFALVRANPPANVTWIDQDGPVTVNTSDFLVLDAQNYPWLTNHTVQLQLRSLAHNLSVVATNDVGVTSASLPAPGLLATRVEVPLLGIVVAAGLALGTLVGFSTLVACLVCRKEKKTKGPSRHPSLISSDSNNLKLNNVRLPRENMSLPSNLQLNDLTPDSRAVKPADRQMAQNNSRPELLDPEPGGLLTSQGFIRLPVLGYIYRVSSVSSDEIWL

SEQ ID NO: 7003 - protein, 322 aa, Homo sapiens
MALPPGPAALRHTLLLLPALLSSGWGELEPQIDGQTWAERALRENERHAFTCRVAGGPGTPRLAWYLDGQLQEASTSRLLSVGGEAFSGGTSTFTVTAHRAQHELNCSLQDPRSGRSANASVILNVQFKPEIAQVGAKYQEAQGPGLLVVLFALVRANPPANVTWIDQDGPVTVNTSDFLVLDAQNYPWLTNHTVQLQLRSLAHNLSVVATNDVGVTSASLPAPGPSRHPSLISSDSNNLKLNNVRLPRENMSLPSNLQLNDLTPDSRAVKPADRQMAQNNSRPELLDPEPGGLLTSQGFIRLPVLGYIYRVSSVSSDEIWL

SEQ ID NO: 7004 - protein, 218 aa, Homo sapiens
MALPPGPAALRHTLLLLPALLSSVKPEIAQVGAKYQEAQGPGLLVVLFALVRANPPANVTWIDQDGPVTVNTSDFLVLDAQNYPWLTNHTVQLQLRSLAHNLSVVATNDVGVTSASLPAPGPSRHPSLISSDSNNLKLNNVRLPRENMSLPSNLQLNDLTPDSRAVKPADRQMAQNNSRPELLDPEPGGLLTSQGFIRLPVLGYIYRVSSVSSDEIWL

SEQ ID NO: 7005 - protein, 351 aa, Homo sapiens
MALPPGPAALRHTLLLLPALLSSGWGELEPQIDGQTWAERALRENERHAFTCRVAGGPGTPRLAWYLDGQLQEASTSRLLSVGGEAFSGGTSTFTVTAHRAQHELNCSLQDPRSGRSANASVILNVQFKPEIAQVGAKYQEAQGPGLLVVLFALVRANPPANVTWIDQDGPVTVNTSDFLVLDAQNYPWLTNHTVQLQLRSLAHNLSVVATNDVGVTSASLPAPGLLATRVEVPLLGIVVAAGLALGTLVGFSTLVACLVCRKEKKTKGPSRHPSLISSDSNNLKLNNVRLPRENMSLPSNLQLNDLTPDSRAVKPADRQMAQNNSRPELLDPEPGGLLTSQGRRNQDKDA

SEQ ID NO: 7006 - protein, 306 aa, Homo sapiens
MALPPGPAALRHTLLLLPALLSSGWGELEPQIDGQTWAERALRENERHAFTCRVAGGPGTPRLAWYLDGQLQEASTSRLLSVGGEAFSGGTSTFTVTAHRAQHELNCSLQDPRSGRSANASVILNVQFKPEIAQVGAKYQEAQGPGLLVVLFALVRANPPANVTWIDQDGPVTVNTSDFLVLDAQNYPWLTNHTVQLQLRSLAHNLSVVATNDVGVTSASLPAPGPSRHPSLISSDSNNLKLNNVRLPRENMSLPSNLQLNDLTPDSRVKPADRQMAQNNSRPELLDPEPGGLLTSQGRRNQDKDA

SEQ ID NO: 7007 - protein, 400 aa, Homo sapiens
MAANYSSTSTRREHVKVKTSSQPGFLERLSETSGGMFVGLMAFLLSFYLIFTNEGRALKTATSLAEGLSLVVSPDSIHSVAPENEGRLVHIIGALRTSKLLSDPNYGVHLPAVKLRRHVEMYQWVETEESREYTEDGQVKKETRYSYNTEWRSEIINSKNFDREIGHKNPSAMAVESFMATAPFVQIGRFFLSSGLIDKVDNFKSLSLSKLEDPHVDIIRRGDFFYHSENPKYPEVGDLRVSFSYAGLSGDDPDLGPAHVVTVIARQRGDQLVPFSTKSGDTLLLLHHGDFSAEEVFHRELRSNSMKTWGLRAAGWMAMFMGLNLMTRILYTLVDWFPVFRDLVNIGLKAFAFCVATSLTLLTVAAGWLFYRPLWALLIAGLALVPILVARTRVPAKKLE

SEQ ID NO: 7008 - protein, 275 aa, Homo sapiens; identical to SEQ ID NO: 6034

SEQ ID NO: 7009 - protein, 266 aa, Homo sapiens
MLNLLLLALPVLASRAYAAPAPGQALQRVGIVGGQEAPRSKWPWQVSLRVHGPYWMHFCGGSLIHPQWVLTAAHCVGPVQLREQHLYYQDQLLPVSRIIVHPQFYTAQIGADIALLELEEPVNVSSHVHTVTLPPASETFPPGMPCWVTGWGDVDNDERLPPPFPLKQVKVPIMENHICDAKYHLGAYTGDDVRIVRDDMLCAGNTRRDSCQGDSGGPLVCKVNGTWLQAGVVSWGEGCAQPNRPGIYTRVTYYLDWIHHYVPKKP

SEQ ID NO: 7010 - protein, 277 aa, Homo sapiens
MASAELDYTIEIPDQPCWSQKNSPSPGGKEAETRQPVVILLGWGGCKDKNLAKYSAIYHKRGCIVIRYTAPWHMVFFSESLGIPSLRVLAQKLLELLFDYEIEKEPLLFHVFSNGGVMLYRYVLELLQTRRFCRLRVVGTIFDSAPGDSNLVGALRALAAILERRAAMLRLLLLVAFALVVVLFHVLLAPITALFHTHFYDRLQDAGSRWPELYLYSRADEVVLARDIERMVEARLARRVLARSVDFVSSAHVSHLRDYPTYYTSLCVDFMRNCVRC

SEQ ID NO: 7011 - protein, 204 aa, Homo sapiens
MVFFSESLGIPSLRVLAQKLLELLFDYEIEKEPLLFHVFSNGGVMLYRYVLELLQTRRFCRLRVVGTIFDSAPGDSNLVGALRALAAILERRAAMLRLLLLVAFALVVVLFHVLLAPITALFHTHFYDRLQDAGSRWPELYLYSRADEVVLARDIERMVEARLARRVLARSVDFVSSAHVSHLRDYPTYYTSLCVDFMRNCVRC

SEQ ID NO: 7012 - protein, 118 aa, Homo sapiens
MRWALLVLLAFLSPASQKSSNLEGGTKSVTRPTRSSAEITCDLTVINAFYIHWYLHQEGKAPQRLLYYDVSNSKDVLESGLSPGKYYTHTPRRWSWILILRNLIENDSGVYYCATWDR

SEQ ID NO: 7013 - protein, 304 aa, Homo sapiens
MCGPDDRCPARWPGPGRAVKCGKGLAAARPGRVERGGAQRGGAGLELHPLLGGRTWRAARDADGCEALGTVAVPFDDDDKIVGGYTCEENSLPYQVSLNSGSHFCGGSLISEQWVVSAAHCYKTRIQVRLGEHNIKVLEGNEQFINAAKIIRHPKYNRDTLDNDIMLIKLSSPAVINARVSTISLPTTPPAAGTECLISGWGNTLSFGADYPDELKCLDAPVLTQAECKASYPGKITNSMFCVGFLEGGKDSCQRDSGGPVVCNGQLQGVVSWGHGCAWKNRPGVYTKVYNYVDWIKDTIAANS

SEQ ID NO: 7014 - protein, 260 aa, Homo sapiens
MELHPLLGGRTWRAARDADGCEALGTVAVPFDDDDKIVGGYTCEENSLPYQVSLNSGSHFCGGSLISEQWVVSAAHCYKTRIQVRLGEHNIKVLEGNEQFINAAKIIRHPKYNRDTLDNDIMLIKLSSPAVINARVSTISLPTTPPAAGTECLISGWGNTLSFGADYPDELKCLDAPVLTQAECKASYPGKITNSMFCVGFLEGGKDSCQRDSGGPVVCNGQLQGVVSWGHGCAWKNRPGVYTKVYNYVDWIKDTIAANS

SEQ ID NO: 7015 - protein, 247 aa, Homo sapiens
MNPFLILAFVGAAVAVPFDDDDKIVGGYTCEENSLPYQVSLNSGSHFCGGSLISEQWVVSAAHCYKTRIQVRLGEHNIKVLEGNEQFINAAKIIRHPKYNRDTLDNDIMLIKLSSPAVINARVSTISLPTTPPAAGTECLISGWGNTLSFGADYPDELKCLDAPVLTQAECKASYPGKITNSMFCVGFLEGGKDSCQRDSGGPVVCNGQLQGVVSWGHGCAWKNRPGVYTKVYNYVDWIKDTIAANS

SEQ ID NO: 7016 - protein, 261 aa, Homo sapiens
MHMRETSGFTLKKGRSAPLVFHPPDALIAVPFDDDDKIVGGYTCEENSLPYQVSLNSGSHFCGGSLISEQWVVSAAHCYKTRIQVRLGEHNIKVLEGNEQFINAAKIIRHPKYNRDTLDNDIMLIKLSSPAVINARVSTISLPTTPPAAGTECLISGWGNTLSFGADYPDELKCLDAPVLTQAECKASYPGKITNSMFCVGFLEGGKDSCQRDSGGPVVCNGQLQGVVSWGHGCAWKNRPGVYTKVYNYVDWIKDTIAANS

SEQ ID NO: 7017 - protein, 240 aa, Homo sapiens
MGPAGEVAVPFDDDDKIVGGYTCEENSLPYQVSLNSGSHFCGGSLISEQWVVSAAHCYKTRIQVRLGEHNIKVLEGNEQFINAAKIIRHPKYNRDTLDNDIMLIKLSSPAVINARVSTISLPTTPPAAGTECLISGWGNTLSFGADYPDELKCLDAPVLTQAECKASYPGKITNSMFCVGFLEGGKDSCQRDSGGPVVCNGQLQGVVSWGHGCAWKNRPGVYTKVYNYVDWIKDTIAANS

SEQ ID NO: 7018 - protein, 772 aa, Homo sapiens
MNRLRNAKIYVERAVKQKKIFTIQGCYPVIRCLLRRRGWVEKKMVHRSGPTLLPPQKDLDSSAMGDSDTTEDEDEDEDEEFQPSQLFDFDDLLKFDDLDGTHALMVGLCLNLRNLPWFDEVDANSFFPRCYCLGAEDDKKAFIEDFWLTAARNVLKLVVKSEWKSYPIQAVEEEASGDKQPKKQEKNPVLVSPEFVDEALCACEEYLSNLAHMDIDKDLEAPLYLTPEGWSLFLQRYYQVVHEGAELRHLDTQVQRCEDILQQLQAVVPQIDMEGDRNIWIVKPGAKSRGRGIMCMDHLEEMLKLVNGNPVVMKDGKWVVQKYIERPLLIFGTKFDLRQWFLVTDWNPLTVWFYRDSYIRFSTQPFSLKNLDNSVHLCNNSIQKHLENSCHRHPLLPPDNMWSSQRFQAHLQEMGAPNAWSTIIVPGMKDAVIHALQTSQDTVQCRKASFELYGADFVFGEDFQPWLIEINASPTMAPSTAVTARLCAGVQADTLRVVIDRMLDRNCDTGAFELIYKQPAVEVPQYVGIRLLVEGFTIKKPMAMCHRRMGVRPAVPLLTQRGSGEARHHFPSLHTKAQLPSPHVLRHQGQVLRRQHSKLVGTKALSTTGKALRTLPTAKVFISLPPNLDFKVAPSILKPRKAPALLCLRGPQLEVPCCLCPLKSEQFLAPVGRSRPKANSRPDCDKPRAEACPMKRLSPLKPLPLVGTFQRRRGLGDMKLGKPLLRFPTALVLDPTPNKKKQVKYLGLDSIAVGGSRVDGARPCTPGSTARA

SEQ ID NO: 7019 - protein, 352 aa, Homo sapiens
MDIDKDLEAPLYLTPEGWSLFLQRYYQVVHEGAELRHLDTQVQRCEDILQQLQAVVPQIDMEGDRNIWIVKPGAKSRGRGIMCMDHLEEMLKLVNGNPVVMKDGKWVVQKYIERPLLIFGTKFDLRQWFLVTDWNPLTVWFYRDSYIRFSTQPFSLKNLDNSVHLCNNSIQKHLENSCHRHPLLPPDNMWSSQRFQAHLQEMGAPNAWSTIIVPGMKDAVIHALQTSQDTVQCRKASFELYGADFVFGEDFQPWLIEINASPTMAPSTAVTARLCAGVQADTLRVVIDRMLDRNCDTGAFELIYKQPVTTSPASTPRPSCLLPMYSDTRARSSDDSTASWWALRPCRPQARP

SEQ ID NO: 7020 - protein, 434 aa, Homo sapiens
MDIDKDLEAPLYLTPEGWSLFLQRYYQVVHEGAELRHLDTQVQRCEDILQQLQAVVPQIDMEGDRNIWIVKPGAKSRGRGIMCMDHLEEMLKLVNGNPVVMKDGKWVVQKYIERPLLIFGTKFDLRQWFLVTDWNPLTVWFYRDSYIRFSTQPFSLKNLDNSVHLCNNSIQKHLENSCHRHPLLPPDNMWSSQRFQAHLQEMGAPNAWSTIIVPGMKDAVIHALQTSQDTVQCRKASFELYGADFVFGEDFQPWLIEINASPTMAPSTAVTARLCAGVQADTLRVVIDRMLDRNCDTGAFELIYKQPAVEVPQYVGIRLLVEGFTIKKPMAMCHRRMGVRPAVPLLTQRGSGEARHHFPSLHTKAQLPSPHVLRHQGQVLRRQHSKLVGTKALSTTGKALRTLPTAKVFISLPPNLDFKVAPSILKPRKVGLDL

SEQ ID NO: 7021 - protein, 292 aa, Homo sapiens
MEGDRNIWIVKPGAKSRGRGIMCMDHLEEMLKLVNGNPVVMKDGKWVVQKYIERPLLIFGTKFDLRQWFLVTDWNPLTVWFYRDSYIRFSTQPFSLKNLDNSVHLCNNSIQKHLENSCHRHPLLPPDNMWSSQRFQAHLQEMGAPNAWSTIIVPGMKDAVIHALQTSQDTVQCRKASFELYGADFVFGEDFQPWLIEINASPTMAPSTAVTARLCAGVQADTLRVVIDRMLDRNCDTGAFELIYKQPVTTSPASTPRPSCLLPMYSDTRARSSDDSTASWWALRPCRPQARP

SEQ ID NO: 7022 - protein, 138 aa, Homo sapiens
MTALFLMSMLFGLTCGQAMSFCIPTEYTMHIERRECAYCLTINTTICAGYCMTRDINGKLFLPKYALSQDVCTYRDFIYRTVEIPGCPLHVAPYFSYPVALSCKCGKCNTDYSDCIHEAIKTNYCTKPQKSYLVGFSV

SEQ ID NO: 7023 - protein, 93 aa, Homo sapiens
MLSFLFFPQDINGKLFLPKYALSQDVCTYRDFIYRTVEIPGCPLHVAPYFSYPVALSCKCGKCNTDYSDCIHEAIKTNYCTKPQKSYLVGFSV

SEQ ID NO: 7024 - protein, 273 aa, Homo sapiens
MSGDKLLSELGYKLGRTIGEGSYSKVKVATSKKYKGTVAIKVVDRRRAPPDFVNKFLPRELSILRGVRHPHIVHVFEFIEVCNGKLYIVMEAAATDLLQAVQRNGRIPGVQARDLFAQIAGAVRYLHDHHLVHRDLKCENVLLSPDERRVKLTDFGFGRQAHGYPDLSTTYCGSAAYASPEVLLGIPYDPKKYDVWSMGVVLYVMVTGCMPFDDSDIAGLPRRQKRGVLYPEGLELSERCKALIAELLQFSPSARPSAGQVARNCWLRAGDSG

SEQ ID NO: 7025 - protein, 270 aa, Homo sapiens
MHYYRYSNAKVSCWYKYLLFSYNIIFWLAGVVFLGVGLWAWSEKGVLSDLTKVTRMHGIDPVVLVLMVGVVMFTLGFAGCVGALRENICLLNFFCGTIVLIFFLELAVAVLAFLFQDWVRDRFREFFESNIKSYRDDIDLQNLIDSLQKANQCCGAYGPEDWDLNVYFNCSGASYSREKCGVPFSCCVPDPAQKVVNTQCGYDVRIQLKSKWDESIFTKGCIQALESWLPRNIYIVAGVFIAISLLQIFGIFLARTLISDIEAVKAGHHF

SEQ ID NO: 7026 - protein, 253 aa, Homo sapiens
MHYYRYSNAKVSCWYKYLLFSYNIIFWGVLSDLTKVTRMHGIDPVVLVLMVGVVMFTLGFAGCVGALRENICLLNFFCGTIVLIFFLELAVAVLAFLFQDWVRDRFREFFESNIKSYRDDIDLQNLIDSLQKANQCCGAYGPEDWDLNVYFNCSGASYSREKCGVPFSCCVPDPAQKVVNTQCGYDVRIQLKSKWDESIFTKGCIQALESWLPRNIYIVAGVFIAISLLQIFGIFLARTLISDIEAVKAGHHF

SEQ ID NO: 7027 - protein, 147 aa, Homo sapiens
MHYYRYSNAKVSCWYKYLLFSYNIIFWNQCCGAYGPEDWDLNVYFNCSGASYSREKCGVPFSCCVPDPAQKVVNTQCGYDVRIQLKSKWDESIFTKGCIQALESWLPRNIYIVAGVFIAISLLQIFGIFLARTLISDIEAVKAGHHF

SEQ ID NO: 7028 - protein, 115 aa, Homo sapiens
MAGAPTVSLPELRSLLASGRARLFDVRSREEAAAGTIPGALNIPVSELESALQMEPAAFQALYSAEKPKLEDEHLVFFCQMGKRGLQATQLARSLGYTGARNYAGAYREWLEKES

SEQ ID NO: 7029 - protein, 74 aa, Homo sapiens
MAGVSELESALQMEPAAFQALYSAEKPKLEDEHLVFFCQMGKRGLQATQLARSLGYTGARNYAGAYREWLEKES

SEQ ID NO: 7030 - protein, 109 aa, Homo sapiens
MAGAPTVSLPELRSLLASGRARLFDVRSREEAAAGTIPGALNIPVSELESALQMEPAAFQALYSAEKPKLEDEHLVFFCQMGKRGLQATQLARSLGYTGYGEVWLLAGR

SEQ ID NO: 7031 - protein, 122 aa, Homo sapiens
MAGGCRAPSSAPTVSLPELRSLLASGRARLFDVRSREEAAAGTIPGALNIPVSELESALQMEPAAFQALYSAEKPKLEDEHLVFFCQMGKRGLQATQLARSLGYTGARNYAGAYREWLEKES

SEQ ID NO: 7032 - protein, 372 aa, Homo sapiens
MSKAFGLLRQICQSILAESSQSPADLEEKKEEDSNMKREQPRERPRAWDYPHGLVGLHNIGQTCCLNSLIQVFVMNVDFTRILKRITVPRGADEQRRSVPFQMLLLLEKMQDSRQKAVRPLELAYCLQKCNVPLFVQHDAAQLYLKLWNLIKDQITDVHLVERLQALYTIRVKDSLICVDCAMESSRNSSMLTLPLSLFDVDSKPLKTLEDALHCFFQPRELSSKSKCFCENCGKKTRGKQVLKLTHLPQTLTIHLMRFSIRNSQTRKICHSLYFPQSLDFSQILPMKRESCDAEEQSGGQYELFAVIAHVGMADSGHYCVYIRNAVDGKWFCFNDSNICLVSWEDIQCTYGNPNYHWQETAYLLVYMKMEC

SEQ ID NO: 7033 - protein, 357 aa, Homo sapiens
MAESSQSPADLEEKKEEDSNMKREQPRERPRAWDYPHGLVGLHNIGQTCCLNSLIQVFVMNVDFTRILKRITVPRGADEQRRSVPFQMLLLLEKMQDSRQKAVRPLELAYCLQKCNVPLFVQHDAAQLYLKLWNLIKDQITDVHLVERLQALYTIRVKDSLICVDCAMESSRNSSMLTLPLSLFDVDSKPLKTLEDALHCFFQPRELSSKSKCFCENCGKKTRGKQVLKLTHLPQTLTIHLMRFSIRNSQTRKICHSLYFPQSLDFSQILPMKRESCDAEEQSGGQYELFAVIAHVGMADSGHYCVYIRNAVDGKWFCFNDSNICLVSWEDIQCTYGNPNYHWQETAYLLVYMKMEC

SEQ ID NO: 7034 - protein, 534 aa, Homo sapiens
MATGLQVPLPWLATGLLLLLSVQPWAESGKVLVVPIDGSHWLSMREVLRELHARGHQAVVLTPEVNMHIKEENFFTLTTYAISWTQDEFDRHVLGHTQLYFETEHFLKKFFRSMAMLNNMSLVYHRSCVELLHNEALIRHLNATSFDVVLTDPVNLCAAVLAKYLSIPTVFFLRNIPCDLDFKGTQCPNPSSYIPRLLTTNSDHMTFMQRVKNMLYPLALSYICHAFSAPYASLASELFQREVSVVDILSHASVWLFRGDFVMDYPRPIMPNMVFIGGINCANRKPLSQEFEAYINASGEHGIVVFSLGSMVSEIPEKKAMAIADALGKIPQTVLWRYTGTRPSNLANNTILVKWLPQNDLLGHPMTRAFITHAGSHGVYESICNGVPMVMMPLFGDQMDNAKRMETKGAGVTLNVLEMTSEDLENALKAVINDKSYKENIMRLSSLHKDRPVEPLDLAVFWVEFVMRHKGAPHLRPAAHDLTWYQYHSLDVIGFLLAVVLTVAFITFKCCAYGYRKCLGKKGRVKKAHKSKTH

SEQ ID NO: 7035 - protein, 445 aa, Homo sapiens
MATGLQVPLPWLATGLLLLLSVQPWAESGKVLVVPIDGSHWLSMREVLRELHARGHQAVVLTPEVNMHIKEENFFTLTTYAISWTQDEFDRHVLGHTQLYFETEHFLKKFFRSMAMLNNMSLVYHRSCVELLHNEALIRHLNATSFDVVLTDPVNLCAAVLAKYLSIPTVFFLRNIPCDLDFKGTQCPNPSSYIPRLLTTNSDHMTFMQRVKNMLYPLALSYICHAFSAPYASLASELFQREVSVVDILSHASVWLFRGDFVMDYPRPIMPNMVFIGGINCANRKPLSQEFEAYINASGEHGIVVFSLGSMVSEIPEKKAMAIADALGKIPQTVLWRYTGTRPSNLANNTILVKWLPQNDLLGHPMTRAFITHAGSHGVYESICNGVPMVMMPLFGDQMDNAKRMETKGAGVTLNVLEMTSEDLENALKAVINDKRKKQQSGRQM

SEQ ID NO: 7036 - protein, 823 aa, Homo sapiens
MGKKRTKGKTVPIDDSSETLEPVCRHIRKGLEQGNLKKALVNVEWNICQDCKTDNKVKDKAEEETEEKPSVWLCLKCGHQGCGRNSQEQHALKHYLTPRSEPHCLVLSLDNWSVWCYVCDNEVQYCSSNQLGQVVDYVRKQASITTPKPAEKDNGNIELENKKLEKESKNEQEREKKENMAKENPPMNSPCQITVKGLSNLGNTCFFNAVMQNLSQTPVLRELLKEVKMSGTIVKIEPPDLALTEPLEINLEPPGPLTLAMSQFLNEMQETKKGVVTPKELFSQVCKKAVRFKGYQQQDSQELLRYLLDGMRAEEHQRVSKGILKAFGNSTEKLDEELKNKVKDYEKKKSMPSFVDRIFGGELTSMIMCDQCRTVSLVHESFLDLSLPVLDDQSGKKSVNDKNLKKTVEDEDQDSEEEKDNDSYIKERSDIPSGTSKHLQKKAKKQAKKQAKNQRRQQKIQGKVLHLNDICTIDHPEDSEYEAEMSLQGEVNIKSNHISQEGVMHKEYCVNQKDLNGQAKMIESVTDNQKSTEEVDMKNINMDNDLEVLTSSPTRNLNGAYLTEGSNGEVDISNGFKNLNLNAALHPDEINIEILNDSHTPGTKVYEVVNEDPETAFCTLANREVFNTDECSIQHCLYQFTRNEKLRDANKLLCEVCTRRQCNGPKANIKGERKHVYTNAKKQMLISLAPPVLTLHLKRFQQAGFNLRKVNKHIKFPEILDLAPFCTLKCKNVAEENTRVLYSLYGVVEHSGTMRSGHYTAYAKARTANSHLSNLVLHGDIPQDFEMESKGQWFHISDTHVQAVPTTKVLNSQAYLLFYERIL

SEQ ID NO: 7037 - protein, 822 aa, Homo sapiens
MGKKRTKGKTVPIDDSSETLEPVCRHIRKGLEQGNLKKALVNVEWNICQDCKTDNKVKDKAEEETEEKPSVWLCLKCGHQGCGRNSQEQHALKHYLTPRSEPHCLVLSLDNWSVWCYVCDNEVQYCSSNQLGQVVDYVRKQASITTPKPEKDNGNIELENKKLEKESKNEQEREKKENMAKENPPMNSPCQITVKGLSNLGNTCFFNAVMQNLSQTPVLRELLKEVKMSGTIVKIEPPDLALTEPLEINLEPPGPLTLAMSQFLNEMQETKKGVVTPKELFSQVCKKAVRFKGYQQQDSQELLRYLLDGMRAEEHQRVSKGILKAFGNSTEKLDEELKNKVKDYEKKKSMPSFVDRIFGGELTSMIMCDQCRTVSLVHESFLDLSLPVLDDQSGKKSVNDKNLKKTVEDEDQDSEEEKDNDSYIKERSDIPSGTSKHLQKKAKKQAKKQAKNQRRQQKIQGKVLHLNDICTIDHPEDSEYEAEMSLQGEVNIKSNHISQEGVMHKEYCVNQKDLNGQAKMIESVTDNQKSTEEVDMKNINMDNDLEVLTSSPTRNLNGAYLTEGSNGEVDISNGFKNLNLNAALHPDEINIEILNDSHTPGTKVYEVVNEDPETAFCTLANREVFNTDECSIQHCLYQFTRNEKLRDANKLLCEVCTRRQCNGPKANIKGERKHVYTNAKKQMLISLAPPVLTLHLKRFQQAGFNLRKVNKHIKFPEILDLAPFCTLKCKNVAEENTRVLYSLYGVVEHSGTMRSGHYTAYAKARTANSHLSNLVLHGDIPQDFEMESKGQWFHISDTHVQAVPTTKVLNSQAYLLFYERIL

SEQ ID NO: 7038 - protein, 808 aa, Homo sapiens
MGSVAVEPVCRHIRKGLEQGNLKKALVNVEWNICQDCKTDNKVKDKAEEETEEKPSVWLCLKCGHQGCGRNSQEQHALKHYLTPRSEPHCLVLSLDNWSVWCYVCDNEVQYCSSNQLGQVVDYVRKQASITTPKPEKDNGNIELENKKLEKESKNEQEREKKENMAKENPPMNSPCQITVKGLSNLGNTCFFNAVMQNLSQTPVLRELLKEVKMSGTIVKIEPPDLALTEPLEINLEPPGPLTLAMSQFLNEMQETKKGVVTPKELFSQVCKKAVRFKGYQQQDSQELLRYLLDGMRAEEHQRVSKGILKAFGNSTEKLDEELKNKVKDYEKKKSMPSFVDRIFGGELTSMIMCDQCRTVSLVHESFLDLSLPVLDDQSGKKSVNDKNLKKTVEDEDQDSEEEKDNDSYIKERSDIPSGTSKHLQKKAKKQAKKQAKNQRRQQKIQGKVLHLNDICTIDHPEDSEYEAEMSLQGEVNIKSNHISQEGVMHKEYCVNQKDLNGQAKMIESVTDNQKSTEEVDMKNINMDNDLEVLTSSPTRNLNGAYLTEGSNGEVDISNGFKNLNLNAALHPDEINIEILNDSHTPGTKVYEVVNEDPETAFCTLANREVFNTDECSIQHCLYQFTRNEKLRDANKLLCEVCTRRQCNGPKANIKGERKHVYTNAKKQMLISLAPPVLTLHLKRFQQAGFNLRKVNKHIKFPEILDLAPFCTLKCKNVAEENTRVLYSLYGVVEHSGTMRSGHYTAYAKARTANSHLSNLVLHGDIPQDFEMESKGQWFHISDTHVQAVPTTKVLNSQAYLLFYERIL

SEQ ID NO: 7039 - protein, 513 aa, Homo sapiens
MRAEEHQRVSKGILKAFGNSTEKLDEELKNKVKDYEKKKSMPSFVDRIFGGELTSMIMCDQCRTVSLVHESFLDLSLPVLDDQSGKKSVNDKNLKKTVEDEDQDSEEEKDNDSYIKERSDIPSGTSKHLQKKAKKQAKKQAKNQRRQQKIQGKVLHLNDICTIDHPEDSEYEAEMSLQGEVNIKSNHISQEGVMHKEYCVNQKDLNGQAKMIESVTDNQKSTEEVDMKNINMDNDLEVLTSSPTRNLNGAYLTEGSNGEVDISNGFKNLNLNAALHPDEINIEILNDSHTPGTKVYEVVNEDPETAFCTLANREVFNTDECSIQHCLYQFTRNEKLRDANKLLCEVCTRRQCNGPKANIKGERKHVYTNAKKQMLISLAPPVLTLHLKRFQQAGFNLRKVNKHIKFPEILDLAPFCTLKCKNVAEENTRVLYSLYGVVEHSGTMRSGHYTAYAKARTANSHLSNLVLHGDIPQDFEMESKGQWFHISDTHVQAVPTTKVLNSQAYLLFYERIL

SEQ ID NO: 7040 - protein, 408 aa, Homo sapiens
MGKKRTKGKTVPIDDSSETLEPVCRHIRKGLEQGNLKKALVNVEWNICQDCKTDNKVKDKAEEETEEKPSVWLCLKCGHQGCGRNSQEQHALKHYLTPRSEPHCLVLSLDNWSVWCYVCDNEVQYCSSNQLGQVVDYVRKQASITTPKPAEKDNGNIELENKKLEKESKNEQEREKKENMAKENPPMNSPCQITVKGLSNLGNTCFFNAVMQNLSQTPVLRELLKEVKMSGTIVKIEPPDLALTEPLEINLEPPGPLTLAMSQFLNEMQETKKGVVTPKELFSQVCKKAVRFKGYQQQDSQELLRYLLDGMRAEEHQRVSKGILKAFGNSTEKLDEELKNKVKDYEKKKSMPSFVDRIFGGELTSMIMCDQCRTVSLVHESFLDLSLPVLDDQVRLLNLFYSSRFFFL

SEQ ID NO: 7041 - protein, 318 aa, Homo sapiens
METRYNLKSPAVKRLMKEAAELKDPTDHYHAQPLEDNLFEWHFTVRGPPDSDFDGGVYHGRIVLPPEYPMKPPSIILLTANGRFEVGKKICLSISGHHPETWQPSWSIRTALLAIIGFMPTKGEGAIGSLDYTPEERRALAKKSQDFCCEGCGSAMKDVLLPLKSGSDSSQADQEAKELARQISFKAEVNSSGKTISESDLNHSFSLTDLQDDIPTTFQGATASTSYGLQNSSAASFHQPTQPVAKNTSMSPRQRRAQQQSQRRLSTSPDVIQGHQPRDNHTDHGGSAVLIVILTLALAALIFRRIYLANEYIFDFEL

SEQ ID NO: 7042 - protein, 258 aa, Homo sapiens
MASAAAAEAEKGSPVVVGLLVVGNIIILLSGLSLFAETIWVTADQYRVYPLMGVSGKDDVFAGAWIAIFCGFSFFMVASFGVGAALCRRRSMVLTYLVLMLIVYIFECASCITSYTHRDYMVSNPSLITKQMLTFYSADTDQGQELTRLWDRVMIEQECCGTSGPMDWVNFTSAFRAATPEVVFPWPPLCCRRTGNFIPLNEEGCRLGHMDYLFTKGCFEHIGHAIDSYTWGISWFGFAILMWTLPVMLIAMYFYTML

SEQ ID NO: 7043 - protein, 273 aa, Homo sapiens
MASAAAAEAEKGSPVVVGLLVVGNIIILLSGLSLFAETIWVTADQYRVYPLMGVSGKDDVFAGAWIAIFCGFSFFMVASFGVGAALCRRRSMVLTYLVLMLIVYIFECASCITSYTHRDYMVSNPSLITKQMLTFYSADTDQGQELTRLWDRVMIEQECCGTSGPMDWVNFTSAFRAATPEVVFPWPPLCCRRTGNFIPLNEEGCRLGHMDYLFTKAGVQWHNLSSLQRLPPGFKGFSHLSFQSSWDYRAASNTSATPSTATRGVSRGLGLPS

SEQ ID NO: 7044 - protein, 534 aa, Homo sapiens
MAQLGKLLKEQKYDRQLRLWGDHGQEALESAHVCLINATATGTEILKNLVLPGIGSFTIIDGNQVSGEDAGNNFFLQRSSIGKNRAEAAMEFLQELNSDVSGSFVEESPENLLDNDPSFFCRFTVVVATQLPESTSLRLADVLWNSQIPLLICRTYGLVGYMRIIIKEHPVIESHPDNALEDLRLDKPFPELREHFQSYDLDHMEKKDHSHTPWIVIIAKYLAQWYSETNGRIPKTYKEKEDFRDLIRQGILKNENGAPEDEENFEEAIKNVNTALNTTQIPSSIEDIFNDDRCINITKQTPSFWILARALKEFVAKEGQGNLPVRGTIPDMIADSGKYIKLQNVYREKAKKDAAAVGNHVAKLLQSIGQAPESISEKELKLLCSNSAFLRVVRCRSLAEEYGLDTINKDEIISSMDNPDNEIVLYLMLRAVDRFHKQQGRYPGVSNYQVEEDIGKLKSCLTGFLQEYGLSVMVKDDYVHEFCRYGAAEPHTIAAFLGGAAAQEVIKIITKQFVIFNNTYIYSGMSQTSATFQL

SEQ ID NO: 7045 - protein, 528 aa, Homo sapiens
MDAQQTKTNEARLWGDHGQEALESAHVCLINATATGTEILKNLVLPGIGSFTIIDGNQVSGEDAGNNFFLQRSSIGKNRAEAAMEFLQELNSDVSGSFVEESPENLLDNDPSFFCRFTVVVATQLPESTSLRLADVLWNSQIPLLICRTYGLVGYMRIIIKEHPVIESHPDNALEDLRLDKPFPELREHFQSYDLDHMEKKDHSHTPWIVIIAKYLAQWYSETNGRIPKTYKEKEDFRDLIRQGILKNENGAPEDEENFEEAIKNVNTALNTTQIPSSIEDIFNDDRCINITKQTPSFWILARALKEFVAKEGQGNLPVRGTIPDMIADSGKYIKLQNVYREKAKKDAAAVGNHVAKLLQSIGQAPESISEKELKLLCSNSAFLRVVRCRSLAEEYGLDTINKDEIISSMDNPDNEIVLYLMLRAVDRFHKQQGRYPGVSNYQVEEDIGKLKSCLTGFLQEYGLSVMVKDDYVHEFCRYGAAEPHTIAAFLGGAAAQEVIKIITKQFVIFNNTYIYSGMSQTSATFQL

SEQ ID NO: 7046 - protein, 445 aa, Homo sapiens
MEFLQELNSDVSGSFVEESPENLLDNDPSFFCRFTVVVATQLPESTSLRLADVLWNSQIPLLICRTYGLVGYMRIIIKEHPVIESHPDNALEDLRLDKPFPELREHFQSYDLDHMEKKDHSHTPWIVIIAKYLAQWYSETNGRIPKTYKEKEDFRDLIRQGILKNENGAPEDEENFEEAIKNVNTALNTTQIPSSIEDIFNDDRCINITKQTPSFWILARALKEFVAKEGQGNLPVRGTIPDMIADSGKYIKLQNVYREKAKKDAAAVGNHVAKLLQSIGQAPESISEKELKLLCSNSAFLRVVRCRSLAEEYGLDTINKDEIISSMDNPDNEIVLYLMLRAVDRFHKQQGRYPGVSNYQVEEDIGKLKSCLTGFLQEYGLSVMVKDDYVHEFCRYGAAEPHTIAAFLGGAAAQEVIKIITKQFVIFNNTYIYSGMSQTSATFQL

SEQ ID NO: 7047 - protein, 537 aa, Homo sapiens
MAQLGKLLKEQKYDRQLRLWGDHGQEALESAHVCLINATATGTEILKNLVLPGNVGIGSFTIIDGNQVSGEDAGNNFFLQRSSIGKNRAEAAMEFLQELNSDVSGSFVEESPENLLDNDPSFFCRFTVVVATQLPESTSLRLADVLWNSQIPLLICRTYGLVGYMRIIIKEHPVIESHPDNALEDLRLDKPFPELREHFQSYDLDHMEKKDHSHTPWIVIIAKYLAQWYSETNGRIPKTYKEKEDFRDLIRQGILKNENGAPEDEENFEEAIKNVNTALNTTQIPSSIEDIFNDDRCINITKQTPSFWILARALKEFVAKEGQGNLPVRGTIPDMIADSGKYIKLQNVYREKAKKDAAAVGNHVAKLLQSIGQAPESISEKELKLLCSNSAFLRVVRCRSLAEEYGLDTINKDEIISSMDNPDNEIVLYLMLRAVDRFHKQQGRYPGVSNYQVEEDIGKLKSCLTGFLQEYGLSVMVKDDYVHEFCRYGAAEPHTIAAFLGGAAAQEVIKIITKQFVIFNNTYIYSGMSQTSATFQL

SEQ ID NO: 7048 - protein, 1275 aa, Homo sapiens
MENFILYEEIGRGSKTVVYKGRRKGTINFVAILCTDKCKRPEITNWVRLTREIKHKNIVTFHEWYETSNHLWLVVELCTGGSLKTVIAQDENLPEDVVREFGIDLISGLHHLHKLGILFCDISPRKILLEGPGTLKFSNFCLAKVEGENLEEFFALVAAEEGGGDNGENVLKKSMKSRVKGSPVYTAPEVVRGADFSISSDLWSLGCLLYEMFSGKPPFFSESISELTEKILCEDPLPPIPKDSSRPKASSDFINLLDGLLQRDPQKRLTWTRLLQHSFWKKAFAGADQESSVEDLSLSRNTMECSGPQDSKELLQNSQSRQAKGHKSGQPLGHSFRLENPTEFRPKSTLEGQLNESMFLLSSRPTPRTSTAVEVSPGEDMTHCSPQKTSPLTKITSGHLSQQDLESQMRELIYTDSDLVVTPIIDNPKIMKQPPVKFDAKILHLPTYSVDKLLFLKDQDWNDFLQQVCSQIDSTEKSMGASRAKLNLLCYLCVVAGHQEVATRLLHSPLFQLLIQHLRIAPNWDIRAKVAHVIGLLASHTAELQENTPVVEAIVLLTELIRENFRNSKLKQCLLPTLGELIYLVATQEEKKKNPRECWAVPLAAYTVLMRCLREGEERVVNHMAAKIIENVCTTFSAQSQGFITGEIGPILWYLFRHSTADSLRITAVSALCRITRHSPTAFQNVIEKVGLNSVINSLASAICKVQQYMLTLFAAMLSCGIHLQRLIQEKGFVSTIIRLLDSPSTCIRAKAFLVLLYILIYNREMLLLSCQARLVMYIERDSRKTTPGKEQQSGNEYLSKCLDLLICHIVQELPRILGDILNSLANVSGRKHPSTVQVKQLKLCLPLMPVVLHLVTSQVFRPQVVTEEFLFSYGTILSHIKSVDSGETNIDGAIGLTASEEFIKITLSAFEAIIQYPILLKDYRSTVVDYILPPLVSLVQSQNVEWRLFSLRLLSETTSLLVNQEFGDGKEKASVDSDSNLLALIRDVLLPQYEHILLEPDPVPAYALKLLVAMTEHNPTFTRLVEESKLIPLIFEVTLEHQESILGNTMQSVIALLSNLVACKDSNMELLYEQGLVSHICNLLTETATLCLDVDNKNNNEMAAPLLFSLLDILHSMLTYTSGIVRLALQAQKSGSGEDPQAAEDLLLLNRPLTDLISLLIPLLPNEDPEIFDVSSKCLSILVQLYGGENPDSLSPENVEIFAHLLTSKEDPKEQKLLLRILRRMITSNEKHLESLKNAGSLLRALERLAPGSGSFADSAVAPLALEILQAVGH

SEQ ID NO: 7049 - protein, 527 aa, Homo sapiens
MLNNLLLFSLQISLIGTTLGGNVLIWPMEGSHWLNVKIIIDELIKKEHNVTVLVASGALFITPTSNPSLTFEIYRVPFGKERIEGVIKDFVLTWLENRPSPSTIWRFYQEMAKVIKDFHMVSQEICDGVLKNQQLMAKLKKSKFEVLVSDPVFPCGDIVALKLGIPFMYSLRFSPASTVEKHCGKVPYPPSYVPAVLSELTDQMSFTDRIRNFISYHLQDYMFETLWKSWDSYYSKALGRPTTLCETMGKAEIWLIRTYWDFEFPRPYLPNFEFVGGLHCKPAKPLPKEMEEFIQSSGKNGVVVFSLGSMVKNLTEEKANLIASALAQIPQKVLWRYKGKKPATLGNNTQLFDWIPQNDLLGHPKTKAFITHGGTNGIYEAIYHGVPMVGVPMFADQPDNIAHMKAKGAAVEVNLNTMTSVDLLSALRTVINEPSYKENAMRLSRIHHDQPVKPLDRAVFWIEFVMRHKGAKHLRVAAHDLTWFQYHSLDVIGFLLVCVTTAIFLVIQCCLFSCQKFGKIGKKKKRE

SEQ ID NO: 7050 - protein, 693 aa, Homo sapiens
MLNNLLLFSLQISLIGTTLGGNVLIWPMEGSHWLNVKIIIDELIKKEHNVTVLVASGALFITPTSNPSLTFEIYRVPFGKERIEGVIKDFVLTWLENRPSPSTIWRFYQEMAKVIKDFHMVSQEICDGVLKNQQLMAKLKKSKFEVLVSDPVFPCGDIVALKLGIPFMYSLRFSPASTVEKHCGKVPYPPSYVPAVLSELTDQMSFTDRIRNFISYHLQDYMFETLWKSWDSYYSKALDGSHWLNIKIILEELIQRNHNVTVLASSATLFINSNPDSPVNFEVIPVSYKKSNIDSLIEHMIMLWIDHRPTPLTIWAFYKELGKLLDTFFQINIQLCDGVLKNPKLMARLQKGGFDVLVADPVTICGDLVALKLGIPFMYTLRFSPASTVERHCGKIPAPVSYVPAALSELTDQMTFGERIKNTISYSLQDYIFQSYWGEWNSYYSKILGRPTTLCETMGKAEIWLIRTYWDFEFPRPYLPNFEFVGGLHCKPAKPLPKVLWRYKGKKPATLGNNTQLFDWIPQNDLLGHPKTKAFITHGGTNGIYEAIYHGVPMVGVPMFADQPDNIAHMKAKGAAVEVNLNTMTSVDLLSALRTVINEPSYKENAMRLSRIHHDQPVKPLDRAVFWIEFVMRHKGAKHLRVAAHDLTWFQYHSLDVIGFLLVCVTTAIFLVIQCCLFSCQKFGKIGKKKKRE

SEQ ID NO: 7051 - protein, 527 aa, Homo sapiens
MLNNLLLFSLQISLIGTTLGGNVLIWPMEGSHWLNVKIIIDELIKKEHNVTVLVASGALFITPTSNPSLTFEIYRVPFGKERIEGVIKDFVLTWLENRPSPSTIWRFYQEMAKVIKDFHMVSQEICDGVLKNQQLMAKLKKSKFEVLVSDPVFPCGDIVALKLGIPFMYSLRFSPASTVEKHCGKVPYPPSYVPAVLSELTDQMSFTDRIRNFISYHLQDYMFETLWKSWDSYYSKALGGLLLCCPGWSAVADLGSLQPLLPGFKRFSRLSLHCSWDYRLPAGRPTTLCETMGKAEIWLIRTYWDFEFPRPYLPNFEFVGGLHCKPAKPLPKVLWRYKGKKPATLGNNTQLFDWIPQNDLLGHPKTKAFITHGGTNGIYEAIYHGVPMVGVPMFADQPDNIAHMKAKGAAVEVNLNTMTSVDLLSALRTVINEPSYKENAMRLSRIHHDQPVKPLDRAVFWIEFVMRHKGAKHLRVAAHDLTWFQYHSLDVIGFLLVCVTTAIFLVIQCCLFSCQKFGKIGKKKKRE

SEQ ID NO: 7052 - protein, 124 aa, Homo sapiens
MSYIPGQPVTAVVQRVEIHKLRQGENLILGFSIGGGIDQDPSQNPFSEDKTDKGIYVTRVSEGGPAEIAGLQIGDKIMQVNGWDMTMVTHDQARKRLTKRSEEVVRLLVTRQSLQKAVQQSMLS

SEQ ID NO: 7053 - protein, 520 aa, Homo sapiens
MSSPLASLSKTRKVPLPSEPMNPGRRGIRIYGDEDEVDMLSDGCGSEEKISVPSCYGGIGAPVSRQVPASHDSELMAFMTRKLWDLEQQVKAQTDEILSKDQKIAALEDLVQTLRPHPAEATLQRQEELETMCVQLQRQVREMERFLSDYGLQWVGEPMDQEDSESKTVSEHGERDWMTAKKFWKPGDSLAPPEVDFDRLLASLQDLSELVVEGDTQVTPVPGGARLRTLEPIPLKLYRNGIMMFDGPFQPFYDPSTQRCLRDILDGFFPSELQRLYPNGVPFKVSDLRNQVYLEDGLDPFPGEGRVVGRQLMHKALDRVEEHPGSRMTAEKFLNRLPKFVIRQGEVIDIRGPIRDTLQNCCPLPARIQEIVVETPTLAAERERSQESPNTPAPPLSMLRIKSENGEQAFLLMMQPDNTIGDVRALLAQARVMDASAFEIFSTFPPTLYQDDTLTLQAAGLVPKAALLLRARRAPKSSLKFSPGPCPGPGPGPSPGPGPGPSPGPGPGPSPCPGPSPSPQ

SEQ ID NO: 7054 - protein, 487 aa, Homo sapiens
MSSPLASLSKTRKVPLPSEPMNPGRRGIRIYGDVPASHDSELMAFMTRKLWDLEQQVKAQTDEILSKDQKIAALEDLVQTLRPHPAEATLQRQEELETMCVQLQRQVREMERFLSDYGLQWVGEPMDQEDSESKTVSEHGERDWMTAKKFWKPGDSLAPPEVDFDRLLASLQDLSELVVEGDTQVTPVPGGARLRTLEPIPLKLYRNGIMMFDGPFQPFYDPSTQRCLRDILDGFFPSELQRLYPNGVPFKVSDLRNQVYLEDGLDPFPGEGRVVGRQLMHKALDRVEEHPGSRMTAEKFLNRLPKFVIRQGEVIDIRGPIRDTLQNCCPLPARIQEIVVETPTLAAERERSQESPNTPAPPLSMLRIKSENGEQAFLLMMQPDNTIGDVRALLAQARVMDASAFEIFSTFPPTLYQDDTLTLQAAGLVPKAALLLRARRAPKSSLKFSPGPCPGPGPGPSPGPGPGPSPGPGPGPSPCPGPSPSPQ

SEQ ID NO: 7055 - protein, 400 aa, Homo sapiens
MSSPLASLSKTRKVPLPSEPMNPGRRGIRIYGDEDEVDMLSDGCGSEEKISVPSCYGGIGAPVSRQGDSLAPPEVDFDRLLASLQDLSELVVEGDTQVTPVPGGARLRTLEPIPLKLYRNGIMMFDGPFQPFYDPSTQRCLRDILDGFFPSELQRLYPNGVPFKVSDLRNQVYLEDGLDPFPGEGRVVGRQLMHKALDRVEEHPGSRMTAEKFLNRLPKFVIRQGEVIDIRGPIRDTLQNCCPLPARIQEIVVETPTLAAERERSQESPNTPAPPLSMLRIKSENGEQAFLLMMQPDNTIGDVRALLAQARVMDASAFEIFSTFPPTLYQDDTLTLQAAGLVPKAALLLRARRAPKSSLKFSPGPCPGPGPGPSPGPGPGPSPGPGPGPSPCPGPSPSPQ

SEQ ID NO: 7056 - protein, 482 aa, Homo sapiens
MLSDGCGSEEKISVPSCYGGIGAPVSRQVPASHDSELMAFMTRKLWDLEQQVKAQTDEILSKDQKIAALEDLVQTLRPHPAEATLQRQEELETMCVQLQRQVREMERFLSDYGLQWVGEPMDQEDSESKTVSEHGERDWMTAKKFWKPGDSLAPPEVDFDRLLASLQDLSELVVEGDTQVTPVPGGARLRTLEPIPLKLYRNGIMMFDGPFQPFYDPSTQRCLRDILDGFFPSELQRLYPNGVPFKVSDLRNQVYLEDGLDPFPGEGRVVGRQLMHKALDRVEEHPGSRMTAEKFLNRLPKFVIRQGEVIDIRGPIRDTLQNCCPLPARIQEIVVETPTLAAERERSQESPNTPAPPLSMLRIKSENGEQAFLLMMQPDNTIGDVRALLAQARVMDASAFEIFSTFPPTLYQDDTLTLQAAGLVPKAALLLRARRAPKSSLKFSPGPCPGPGPGPSPGPGPGPSPGPGPGPSPCPGPSPSPQ

SEQ ID NO: 7057 - protein, 208 aa, Homo sapiens
MHKALDRVEEHPGSRMTAEKFLNRLPKFVIRQGEVIDIRGPIRDTLQNCCPLPARIQEIVVETPTLAAERERSQESPNTPAPPLSMLRIKSENGEQAFLLMMQPDNTIGDVRALLAQARVMDASAFEIFSTFPPTLYQDDTLTLQAAGLVPKAALLLRARRAPKSSLKFSPGPCPGPGPGPSPGPGPGPSPGPGPGPSPCPGPSPSPQ

SEQ ID NO: 7058 - protein, 324 aa, Homo sapiens
MSSPLASLSKTRKVPLPSEPMNPGRRGIRIYGDEDEVDMLSDGCGSEEKISVPSCYGGIGAPVSRQVPASHDSELMAFMTRKLWDLEQQVKAQTDEILSKDQKIAALEDLVQTLRPHPAEATLQRQEELETMCVQLQRQVREMERFLSDYGLQWVGEPMDQEDSESKTVSEHGERDWMTAKKFWKPGDSLAPPEVDFDRLLASLQDLSELVVEGDTQVTPVPGGARLRTLEPIPLKLYRNGIMMFDGPFQPFYDPSTQRCLRDILDGFFPSELQRLYPNGVPFKVISCSSNHTFGDFEGSGDTQPPQTPPILRGSRCTPWGTPV

SEQ ID NO: 7059 - protein, 291 aa, Homo sapiens
MSSPLASLSKTRKVPLPSEPMNPGRRGIRIYGDVPASHDSELMAFMTRKLWDLEQQVKAQTDEILSKDQKIAALEDLVQTLRPHPAEATLQRQEELETMCVQLQRQVREMERFLSDYGLQWVGEPMDQEDSESKTVSEHGERDWMTAKKFWKPGDSLAPPEVDFDRLLASLQDLSELVVEGDTQVTPVPGGARLRTLEPIPLKLYRNGIMMFDGPFQPFYDPSTQRCLRDILDGFFPSELQRLYPNGVPFKVISCSSNHTFGDFEGSGDTQPPQTPPILRGSRCTPWGTPV

SEQ ID NO: 7060 - protein, 445 aa, Homo sapiens
MAFMTRKLWDLEQQVKAQTDEILSKDQKIAALEDLVQTLRPHPAEATLQRQEELETMCVQLQRQVREMERFLSDYGLQWVGEPMDQEDSESKTVSEHGERDWMTAKKFWKPGDSLAPPEVDFDRLLASLQDLSELVVEGDTQVTPVPGGARLRTLEPIPLKLYRNGIMMFDGPFQPFYDPSTQRCLRDILDGFFPSELQRLYPNGVPFKVSDLRNQVYLEDGLDPFPGEGRVVGRQLMHKALDRVEEHPGSRMTAEKFLNRLPKFVIRQGEVIDIRGPIRDTLQNCCPLPARIQEIVVETPTLAAERERSQESPNTPAPPLSMLRIKSENGEQAFLLMMQPDNTIGDVRALLAQARVMDASAFEIFSTFPPTLYQDDTLTLQAAGLVPKAALLLRARRAPKSSLKFSPGPCPGPGPGPSPGPGPGPSPGPGPGPSPCPGPSPSPQ

SEQ ID NO: 7061 - protein, 139 aa, Homo sapiens
MPWRAGNGVGLEAQAGTQEAGPEEYCQEELGAEEEMAARAAWPVLRSVNSRELSRIIICNHSPRIVLPVWLNYYGKLLPYLTLLPGRDFRIHNFRSHPWLFRDARTHDKLLVNQTELFVPSSNVNGQPVFANITLQCIP

SEQ ID NO: 7062 - protein, 168 aa, Homo sapiens
MSPTTGPQPNPRAWECHHTTGPQPNPRAWECHRMKGPQPNPRAWECHLRRVHNLTPEPGNVTIRGVHILTPEPGNVTIRGVHNLTPEPGNVTERGVHNLTPEPGNVTERGVHNLIPEPGNVTVKRGPQPNPRAWECHRTRGPQPNPRAWECHRTRGPQPNPRAWECHR

SEQ ID NO: 7063 - protein, 689 aa, Homo sapiens
MSISALGGRTKGKPLPPGEEERNNVLKQMKVRTTLKGDKSWITKQDESEGRTIELPSGRSRATSFSSAGEVPKPRPPSTRAPTGYIIRGVFTKPIDSSSQPQQQFPKANGTPKSAASLVRTANAGPPRPSSSGYKMTTEDYKKLAPYNIRRSSTSGDTEEEEEEEVVPFSSDEQKRRSEAASGVLRRTAPREHSYVLSAAKKSTGPTQETQAPFIAKRVEVVEEDGPSEKSQDPPALARSTPGSNSADGGRTKASRAIWIECLPSMPSPAGSQELSSRGEEIVRLQILTPRAGLRLVAPDVEGMRSSPGNKDKEAPCSRELQRDLAGEEAFRAPNTDAARSSAQLSDGNVGSGATGSRPEGLAAVDIGSERGSSSATSVSAVPADRKSNSTAAQEDAKADPKGALADYEGKDVATRVGEAWQERPGAPRGGQGDPAVPAQQPADPSTPERQSSPSGSEQLVRRESCGSSVLTDFEGKDVATKVGEAWQDRPGAPRGGQGDPAVPTQQPADPSTPEQQNSPSGSEQFVRRESCTSRVRSPSSCMVTVTVTATSEQPHIYIPAPASELDSSSTTKGILFVKEYVNASEVSSGKPVSARYSNVSSIEDSFAMEKKPPCGSTPYSERTTGGICTYCNREIRDCPKITLEHLGICCHEYCFKCGICSKPMGDLLDQIFIHRDTIHCGKCYEKLF

SEQ ID NO: 7064 - protein, 452 aa, Homo sapiens
MQRQAPYNIRRSSTSGDTEEEEEEEVVPFSSDEQKRRSEAASGVLRRTAPREHSYVLSAAKKSTGSPTQETQAPFIAKRVEVVEEDGPSEKSQDPPALARSTPGSNSSRGEEIVRLQILTPRAGLRLVAPDVEGMSSSATSVSAVPADRKSNSTAAQEDAKADPKGALADYEGKDVATRVGEAWQERPGAPRGGQGDPAVPAQQPADPSTPERQSSPSGSEQLVRRESCGSSVLTDFEGKDVATKVGEAWQDRPGAPRGGQGDPAVPTQQPADPSTPEQQNSPSGSEQFVRRESCTSRVRSPSSCMVTVTVTATSEQPHIYIPAPASELDSSSTTKGILFVKEYVNASEVSSGKPVSARYSNVSSIEDSFAMEKKPPCGSTPYSERTTGGICTYCNREIRDCPKITLEHLGICCHEYCFKCGICSKPMGDLLDQIFIHRDTIHCGKCYEKLF

SEQ ID NO: 7065 - protein, 690 aa, Homo sapiens
MSISALGGRTKGKPLPPGEEERNNVLKQMKVRTTLKGDKSWITKQDESEGRTIELPSGRSRATSFSSAGEVPKPRPPSTRAPTGYIIRGVFTKPIDSSSQPQQQFPKANGTPKSAASLVRTANAGPPRPSSSGYKMTTEDYKKLAPYNIRRSSTSGDTEEEEEEEVVPFSSDEQKRRSEAASGVLRRTAPREHSYVLSAAKKSTGSPTQETQAPFIAKRVEVVEEDGPSEKSQDPPALARSTPGSNSADGGRTKASRAIWIECLPSMPSPAGSQELSSRGEEIVRLQILTPRAGLRLVAPDVEGMRSSPGNKDKEAPCSRELQRDLAGEEAFRAPNTDAARSSAQLSDGNVGSGATGSRPEGLAAVDIGSERGSSSATSVSAVPADRKSNSTAAQEDAKADPKGALADYEGKDVATRVGEAWQERPGAPRGGQGDPAVPAQQPADPSTPERQSSPSGSEQLVRRESCGSSVLTDFEGKDVATKVGEAWQDRPGAPRGGQGDPAVPTQQPADPSTPEQQNSPSGSEQFVRRESCTSRVRSPSSCMVTVTVTATSEQPHIYIPAPASELDSSSTTKGILFVKEYVNASEVSSGKPVSARYSNVSSIEDSFAMEKKPPCGSTPYSERTTGGICTYCNREIRDCPKITLEHLGICCHEYCFKCGICSKPMGDLLDQIFIHRDTIHCGKCYEKLF

SEQ ID NO: 7066 - protein, 630 aa, Homo sapiens
MSISALGGRTKGKPLPPGEEERNNVLKQMKVRTTLKGDKSWITKQDESEGRTIELPSGRSRATSFSSAGEVPKPRPPSTRAPTGYIIRGVFTKPIDSSSQPQQQFPKANGTPKSAASLVRTANAGPPRPSSSGYKMTTEDYKKLAPYNIRRSSTSGDTEEEEEEEVVPFSSDEQKRRSEAASGVLRRTAPREHSYVLSAAKKSTGPTQETQAPFIAKRVEVVEEDGPSEKSQDPPALARSTPGSNRSSPGNKDKEAPCSRELQRDLAGEEAFRAPNTDAARSSAQLSDGNVGSGATGSRPEGLAAVDIGSERGSSSATSVSAVPADRKSNSTAAQEDAKADPKGALADYEGKDVATRVGEAWQERPGAPRGGQGDPAVPAQQPADPSTPERQSSPSGSEQLVRRESCGSSVLTDFEGKDVATKVGEAWQDRPGAPRGGQGDPAVPTQQPADPSTPEQQNSPSGSEQFVRRESCTSRVRSPSSCMVTVTVTATSEQPHIYIPAPASELDSSSTTKGILFVKEYVNASEVSSGKPVSARYSNVSSIEDSFAMEKKPPCGSTPYSERTTGGICTYCNREIRDCPKITLEHLGICCHEYCFKCGICSKPMGDLLDQIFIHRDTIHCGKCYEKLF

SEQ ID NO: 7067 - protein, 468 aa, Homo sapiens
MTTEDYKKLAPYNIRRSSTSGDTEEEEEEEVVPFSSDEQKRSSPTQETQAPFIAKRVEVVEEDGPSEKSQDPPALARSTPGSNRSSPGNKDKEAPCSRELQRDLAGEEAFRAPNTDAARSSAQLSDGNVGSGATGSRPEGLAAVDIGSERGSSSATSVSAVPADRKSNSTAAQEDAKADPKGALADYEGKDVATRVGEAWQERPGAPRGGQGDPAVPAQQPADPSTPERQSSPSGSEQLVRRESCGSSVLTDFEGKDVATKVGEAWQDRPGAPRGGQGDPAVPTQQPADPSTPEQQNSPSGSEQFVRRESCTSRVRSPSSCMVTVTVTATSEQPHIYIPAPASELDSSSTTKGILFVKEYVNASEVSSGKPVSARYSNVSSIEDSFAMEKKPPCGSTPYSERTTGGICTYCNREIRDCPKITLEHLGICCHEYCFKCGICSKPMGDLLDQIFIHRDTIHCGKCYEKLF

SEQ ID NO: 7068 - protein, 721 aa, Homo sapiens
MSISALGGRTKGKPLPPGEEERNNVLKQMKVRTTLKGDKSWITKQDESEGRTIELPSGRSRATSFSSAGEVPKPRPPSTRAPTGYIIRGVFTKPIDSSSQPQQQFPKANGTPKSAASLVRTANAGPPRPSSSGYKMTTEDYKKLAPYNIRRSSTSGDTEEEEEEEVVPFSSDEQKRRSEAASGVLRRTAPREHSYVLSAAKKSTGPTQETQAPFIAKRVEVVEEDGPSEKSQDPPALARSTPGSNSADGGRTKASRAIWIECLPSMPSPAGSQELSSRGEEIVRLQILTPRAGLRLVAPDVEGMRSSPGNKDKEAPCSRELQRDLAGEEAFRAPNTDAARSSAQLSDGNVGSGATGSRPEGLAAVDIGSERGRLCAAASFASFLEDQDGHSANSQSCKPRPAAISSSATSVSAVPADRKSNSTAAQEDAKADPKGALADYEGKDVATRVGEAWQERPGAPRGGQGDPAVPAQQPADPSTPERQSSPSGSEQLVRRESCGSSVLTDFEGKDVATKVGEAWQDRPGAPRGGQGDPAVPTQQPADPSTPEQQNSPSGSEQFVRRESCTSRVRSPSSCMVTVTVTATSEQPHIYIPAPASELDSSSTTKGILFVKEYVNASEVSSGKPVSARYSNVSSIEDSFAMEKKPPCGSTPYSERTTGGICTYCNREIRDCPKITLEHLGICCHEYCFKCGICSKPMGDLLDQIFIHRDTIHCGKCYEKLF

SEQ ID NO: 7069 - protein, 660 aa, Homo sapiens
MSISALGGRTKGKPLPPGEEERNNVLKQMKVRTTLKGDKSWITKQDESEGRTIELPSGRSRATSFSSAGEVPKPRPPSTRAPTGYIIRGVFTKPIDSSSQPQQQFPKANGTPKSAASLVRTANAGPPRPSSSGYKMTTEDYKKLAPYNIRRSSTSGDTEEEEEEEVVPFSSDEQKRRSEAASGVLRRTAPREHSYVLSAAKKSTGPTQETQAPFIAKRVEVVEEDGPSEKSQDPPALARSTPGSNSADGGRTKASRAIWIECLPSMPSPAGSQELRSSPGNKDKEAPCSRELQRDLAGEEAFRAPNTDAARSSAQLSDGNVGSGATGSRPEGLAAVDIGSERGSSSATSVSAVPADRKSNSTAAQEDAKADPKGALADYEGKDVATRVGEAWQERPGAPRGGQGDPAVPAQQPADPSTPERQSSPSGSEQLVRRESCGSSVLTDFEGKDVATKVGEAWQDRPGAPRGGQGDPAVPTQQPADPSTPEQQNSPSGSEQFVRRESCTSRVRSPSSCMVTVTVTATSEQPHIYIPAPASELDSSSTTKGILFVKEYVNASEVSSGKPVSARYSNVSSIEDSFAMEKKPPCGSTPYSERTTGGICTYCNREIRDCPKITLEHLGICCHEYCFKCGICSKPMGDLLDQIFIHRDTIHCGKCYEKLF

SEQ ID NO: 7070 - protein, 692 aa, Homo sapiens
MSISALGGRTKGKPLPPGEEERNNVLKQMKVRTTLKGDKSWITKQDESEGRTIELPSGRSRATSFSSAGEVPKPRPPSTRAPTGYIIRGVFTKPIDSSSQPQQQFPKANGTPKSAASLVRTANAGPPRPSSSGYKMTTEDYKKLAPYNIRRSSTSGDTEEEEEEEVVPFSSDEQKRRSEAASGVLRRTAPREHSYVLSAAKKSTGPTQETQAPFIAKRVEVVEEDGPSEKSQDPPALARSTPGSNSADGGRTKASRAIWIECLPSMPSPAGSQELRSSPGNKDKEAPCSRELQRDLAGEEAFRAPNTDAARSSAQLSDGNVGSGATGSRPEGLAAVDIGSERGRLCAAASFASFLEDQDGHSANSQSCKPRPAAISSSATSVSAVPADRKSNSTAAQEDAKADPKGALADYEGKDVATRVGEAWQERPGAPRGGQGDPAVPAQQPADPSTPERQSSPSGSEQLVRRESCGSSVLTDFEGKDVATKVGEAWQDRPGAPRGGQGDPAVPTQQPADPSTPEQQNSPSGSEQFVRRESCTSRVRSPSSCMVTVTVTATSEQPHIYIPAPASELDSSSTTKGILFVKEYVNASEVSSGKPVSARYSNVSSIEDSFAMEKKPPCGSTPYSERTTGGICTYCNREIRDCPKITLEHLGICCHEYCFKCGICSKPMGDLLDQIFIHRDTIHCGKCYEKLF

SEQ ID NO: 7071 - protein, 327 aa, Homo sapiens
MAARDELGLGGDSLEAMPVPAARGRPRITNGPEELAAPSPAALADYEGKDVATRVGEAWQERPGAPRGGQGDPAVPAQQPADPSTPERQSSPSGSEQLVRRESCGSSVLTDFEGKDVATKVGEAWQDRPGAPRGGQGDPAVPTQQPADPSTPEQQNSPSGSEQFVRRESCTSRVRSPSSCMVTVTVTATSEQPHIYIPAPASELDSSSTTKGILFVKEYVNASEVSSGKPVSARYSNVSSIEDSFAMEKKPPCGSTPYSERTTGGICTYCNREIRDCPKITLEHLGICCHEYCFKCGICSKPMGDLLDQIFIHRDTIHCGKCYEKLF

SEQ ID NO: 7072 - protein, 458 aa, Homo sapiens
MASTITGSQDCIVNHRGEVDGEPELDISPCQQWGEASSPISRNRDSVMTLQSGCFENIESETYLPLKVSSQIDTQDSSVKFCKNEPQDHQESRRLFVMEESTERKVIKGESCSENLQVKLVSDGQELASPLLNGEATCQNGQLKESLDPIDCNCKDIHGWKSQVVSCSQQRAHTEEKPCDHNNCGKILNTSPDGHPYEKIHTAEKQYECSQCGKNFSQSSELLLHQRDHTEEKPYKCEQCGKGFTRSSSLLIHQAVHTDEKPYKCDKCGKGFTRSSSLLIHHAVHTGEKPYKCDKCGKGFSQSSKLHIHQRVHTGEKPYECEECGMSFSQRSNLHIHQRVHTGERPYKCGECGKGFSQSSNLHIHRCIHTGEKPYQCYECGKGFSQSSDLRIHLRVHTGEKPYHCGKCGKGFSQSSKLLIHQRVHTGEKPYECSKCGKGFSQSSNLHIHQRVHKKDPR

SEQ ID NO: 7073 - protein, 474 aa, Homo sapiens
MTTFKEAVTFKDVAVFFTEEELGLLDPAQRKLYQDVMLENFTNLLSVGHQPFHPFHFLREEKFWMMETATQREGNSGGKTIAEAGPHEDCPCQQIWEQTASDLTQSQDSIINNSHFFEQGDVPSQVEAGLSIIHTGQKPSQNGKCKQSFSDVAIFDPPQQFHSGEKSHTCNECGKSFCYISALRIHQRVHLREKLSKCDMRGKEFSQSSCLQTRERVHTGEKPFKCEQCGKGFRCRAILQVHCKLHTGEKPYICEKCGRAFIHDFQLQKHQIIHTGEKPFKCEICGKSFCLRSSLNRHCMVHTAEKLYKSEECGKGFTDSLDLHKHQIIHTGQKPYNCKECGKSFRWSSYLLIHQRIHSGEKPYRCEECGKGYISKSGLNLHQRVHTGERPYNCKECGKSFSRASSILNHKKLHCRKKPFKCEDCGKRLVHRSFCKDQQGDHNGENSSKCEDCGKRYKRRLNLDIILSLFLNDM

SEQ ID NO: 7074 - protein, 167 aa, Homo sapiens
MLTVALLALLCASASGNAIQARSSSYSGEYGGGGGKRFSHSGNQLDGPITALRVRVNTYYIVGLQVRYGKVWSDYVGGRNGDLEEIFLHPGESVIQVSGKYKWYLKKLLFVTDKGRYLSFGKDSGTSFNAVPLHPNTVLRFISGRSGSLIDAIGLHWDVYPSSCSRC

SEQ ID NO: 7075 - protein, 671 aa, Homo sapiens
MQFVSTRPQPQQLGIQGLGLDSGSWSWAQALPPEEVCHQEPALRGEMAEGMPPMQAQEWDMDARRPMPFQFPPFPDRAPVFPDRMMREPQLPTAEISLWTVVAAIQAVERKVDAQASQLLNLEGRTGTAEKKLADCEKTAVEFGNHMESKWAVLGTLLQEYGLLQRRLENLENLLRNRNFWVLRLPPGSKGEAPKVPVTFVDIAVYFSEDEWKNLDEWQKELYNNLVKENYKTLMSLDAEGSVPKPDAPVQAEPREEPCVWEQRHPEEREIPMDPEAGAEPLVPAQDASSQVKREDTLCVRGQRGLEERAIPTESITDSPISAQDLLSRIKQEEHQCVWDQQDLADRDIPTDPNSESLISAHDILSWIKQEEQPYPWGPRDSMDGELGLDSGPSDSLLMVKNPPPAPPQPQPQPQPPQPQLQSQPQPQSLPPIAVAENPGGPPSRGLLDDGFQVLPGERGSGEAPPGGDRSTGGGGGDGGGGGGGAEAGTGAGGGCGSCCPGGLRRSLLLHGARSKPYSCPECGKSFGVRKSLIIHHRSHTKERPYECAECEKSFNCHSGLIRHQMTHRGERPYKCSECEKTYSRKEHLQNHQRLHTGERPFQCALCGKSFIRKQNLLKHQRIHTGERPYTCGECGKSFRYKESLKDHLRVHSGGPGPGAPRQLPPPPERD

SEQ ID NO: 7076 - protein, 463 aa, Homo sapiens
MQFVSTRPQPQQLGIQGLGLDSGSWSWAQALPPEEVCHQEPALRGEMAEGMPPMQAQEWDMDARRPMPFQFPPFPDRAPVFPDRMMREPQLPTAEISLWTVVAAIQAVERKVDAQASQLLNLEGRTGTAEKKLADCEKTAVEFGNHMESKWAVLGTLLQEYGLLQRRLENLENLLRNRNFWVLRLPPGSKGEAPKVPVTFVDIAVYFSEDEWKNLDEWQKELYNNLVKENYKTLMSLDAEGSVPKPDAPVQAEPREEPCVWEQRHPEEREIPMDPEAGAEPLVPAQDASSQVKREDTLCVRGQRGLEERAIPTESITDSPISAQDLLSRIKQEEHQCVWDQQDLADRDIPTDPNSESLISAHDILSWIKQEEQPYPWGPRDSMDGELGLDSGPSDSLLMVKNPPPAPPQPQPQPQPPQPQLQSQPQPQSLPPIAVAENPGGPPSRGLLDDGFQPHQGAALRVR

SEQ ID NO: 7077 - protein, 284 aa, Homo sapiens
MGQPWAAGSTDGAPAQLPLVLTALWAAAVGLELAYVLVLGPGPPPLGPLARALQLALAAFQLLNLLGNVGLFLRSDPSIRGVMLAGRGLGQGWAYCYQCQSQVPPRSGHCSACRVCILRRDHHCRLLGRCVGFGNYRPFLCLLLHAAGVLLHVSVLLGPALSALLRAHTPLHMAALLLLPWLMLLTGRVSLAQFALAFVTDTCVAGALLCGAGLLFHGMLLLRGQTTWEWARGQHSYDLGPCHNLQAALGPRWALVWLWPFLASPLPGDGITFQTTADVGHTAS

SEQ ID NO: 7078 - protein, 485 aa, Homo sapiens
MATEPKKAAAQNSPEDEGLLIVKIEEEEFIHGQDTCLQRSELLKQELCRQLFRQFCYQDSPGPREALSRLRELCCQWLKPEIHTKEQILELLVLEQFLTILPGDLQAWVHEHYPESGEEAVTILEDLERGTDEAVLQVQAHEHGQEIFQKKVSPPGPALNVKLQPVETKAHFDSSEPQLLWDCDNESENSRSMPKLEIFEKIESQRIISGRISGYISEASGESQDICKSAGRVKRQWEKESGESQRLSSAQDEGFGKILTHKNTVRGEIISHDGCERRLNLNSNEFTHQKSCKHGTCDQSFKWNSDFINHQIIYAGEKNHQYGKSFKSPKLAKHAAVFSGDKTHQCNECGKAFRHSSKLARHQRIHTGERCYECNECGKSFAESSDLTRHRRIHTGERPFGCKECGRAFNLNSHLIRHQRIHTREKPYECSECGKTFRVSSHLIRHFRIHTGEKPYECSECGRAFSQSSNLSQHQRIHMRENLLM

SEQ ID NO: 7079 - protein, 712 aa, Homo sapiens
MGMRIKLQSTNHPNNLLKELNKCRLSETMCDVTIVVGSRSFPAHKAVLACAAGYFQNLFLNTGLDAARTYVVDFITPANFEKVLSFVYTSELFTDLINVGVIYEVAERLGMEDLLQACHSTFPDLESTARAKPLTSTSESHSGTLSCPSAEPAHPLGELRGGGDYLGADRNYVLPSDAGGSYKEEEKNVASDANHSLHLPQPPPPPPKTEDHDTPAPFTSIPSMMTQPLLGTVSTGIQTSTSSCQPYKVQSNGDFSKNSFLTPDNAVDITTGTNSCLSNSEHSKDPGFGQMDELQLEDLGDDDLQFEDPAEDIGTTEEVIELSDDSEDELAFGENDNRENKAMPCQVCKKVLEPNIQLIRQHARDHVDLLTGNCKVCETHFQDRNSRVTHVLSHIGIFLFSCDMCETKFFTQWQLTLHRRDGIFENNIIVHPNDPLPGKLGLFSGAASPELKCAACGKVLAKDFHVVRGHILDHLNLKGQACSVCDQRHLNLCSLMWHTLSHLGISVFSCSVCANSFVDWHLLEKHMAVHQSLEDALFHCRLCSQSFKSEAAYRYHVSQHKCNSGLDARPGFGLQHPALQKRKLPAEEFLGEELALQGQPGNSKYSCKVCGKRFAHTSEFNYHRRIHTGEKPYQCKVCHKFFRGRSTIKCHLKTHSGALMYRCTVCGHYSSTLNLMSKHVGVHKGSLPPDFTIEQTFMYIIHSKEADKNPDS

SEQ ID NO: 7080 - protein, 97 aa, Homo sapiens
MGSIPSKPCNNPEGPLLQGMEAADWTGIGVCLPPGGARGHIYCCTRLCHQRAASAHRSLLLPRTVQTGGTEREKPGPGQRKRGAHCSACKRSSTRPS

SEQ ID NO: 7081 - protein, 487 aa, Homo sapiens
MSLPPIRLPSPYGSDRLVQLAARLRPALCDTLITVGSQEFPAHSLVLAGVSQQLGRRGQWALGEGISPSTFAQLLNFVYGESVELQPGELRPLQEAARALGVQSLEEACWRARGDRAKKPDPGLKKHQEEPEKPSRNPERELGDPGEKQKPEQVSRTGGREQEMLHKHSPPRGRPEMAGATQEAQQEQTRSKEKRLQAPVGQRGADGKHGVLTWLRENPGGSEESLRKLPGPLPPAGSLQTSVTPRPSWAEAPWLVGGQPALWSILLMPPRYGIPFYHSTPTTGAWQEVWREQRIPLSLNAPKGLWSQNQLASSSPTPGSLPQGPAQLSPGEMEESDQGHTGALATCAGHEDKAGCPPRPHPPPAPPARSRPYACSVCGKRFSLKHQMETHYRVHTGEKPFSCSLCPQRSRDFSAMTKHLRTHGAAPYRCSLCGAGCPSLASMQAHMRGHSPSQLPPGWTIRSTFLYSSSRPSRPSTSPCCPSSSTT

SEQ ID NO: 7082 - protein, 1048 aa, Homo sapiens
MQSKVTGNMPTQSLLMYMDGPEVIGSSLGSPMEMEDALSMKGTAVVPFRATQEKNVIQIEGYMPLDCMFCSQTFTHSEDLNKHVLMQHRPTLCEPAVLRVEAEYLSPLDKSQVRTEPPKEKNCKENEFSCEVCGQTFRVAFDVEIHMRTHKDSFTYGCNMCGRRFKEPWFLKNHMRTHNGKSGARSKLQQGLESSPATINEVVQVHAAESISSPYKICMVCGFLFPNKESLIEHRKVHTKKTAFGTSSAQTDSPQGGMPSSREDFLQLFNLRPKSHPETGKKPVRCIPQLDPFTTFQAWQLATKGKVAICQEVKESGQEGSTDNDDSSSEKELGETNKGSCAGLSQEKEKCKHSHGEAPSVDADPKLPSSKEKPTHCSECGKAFRTYHQLVLHSRVHKKDRRAGAESPTMSVDGRQPGTCSPDLAAPLDENGAVDRGEGGSEDGSEDGLPEGIHLDKNDDGGKIKHLTSSRECSYCGKFFRSNYYLNIHLRTHTGEKPYKCEFCEYAAAQKTSLRYHLERHHKEKQTDVAAEVKNDGKNQDTEDALLTADSAQTKNLKRFFDGAKDVTGSPPAKQLKEMPSVFQNVLGSAVLSPAHKDTQDFHKNAADDSADKVNKNPTPAYLDLLKKRSAVETQANNLICRTKADVTPPPDGSTTHNLEVSPKEKQTETAADCRYRPSVDCHEKPLNLSVGALHNCPAISLSKSLIPSITCPFCTFKTFYPEVLMMHQRLEHKYNPDVHKNCRNKSLLRSRRTGCPPALLGKDVPPLSSFCKPKPKSAFPAQSKSLPSAKGKQSPPGPGKAPLTSGIDSSTLAPSNLKSHRPQQNVGVQGAATRQQQSEMFPKTSVSPAPDKTKRPETKLKPLPVAPSQPTLGSSNINGSIDYPAKNDSPWAPPGRDYFCNRSASNTAAEFGEPLPKRLKSSVVALDVDQPGANYRRGYDLPKYHMVRGITSLLPQDCVYPSQALPPKPRFLSSSEVDSPNVLTVQKPYGGSGPLYTCVPAGSPASSSTLEGKRPVSYQHLSNSMAQKRNYENFIGNAHYRPNDKKT

SEQ ID NO: 7083 - protein, 227 aa, Homo sapiens
MGDAGSERSKAPSLPPRCPCGFWGSSKTMNLCSKCFADFQKKQPDDDSAPSTSNSQSDLFSEETTSDNNNTSITTPTLSPSQQPLPTELNVTSPSKEECGPCTDTAHVSLITPTKRSCGTDSQSENEASPVKRPRLLENTERSEETSRSKQKSRRRCFQCQTKLELVQQELGSCRCGYVFCMLHRLPEQHDCTFDHMGRGREEAIMKMVKLDRKVGRSCQRIGEGCS

SEQ ID NO: 7084 - protein, 839 aa, Homo sapiens
MALTQGQVTFRDVAIEFSQEEWTCLDPAQRTLYRDVMLENYRNLASLGISCFDLSIISMLEQGKEPFTLESQVQIAGNPDGWEWIKAVITALSSEFVMKDLLHKGKSNTGEVFQTVMLERQESQDIEGCSFREVQKNTHGLEYQCRDAEGNYKGVLLTQEGNLTHGRDEHDKRDARNKLIKNQLGLSLQSHLPELQLFQYEGKIYECNQVEKSFNNNSSVSPPQQMPYNVKTHISKKYLKDFISSLLLTQGQKANNWGSPYKSNGCGMVFPQNSHLASHQRSHTKEKPYKCYECGKAFRTRSNLTTHQVIHTGEKRYKCNECGKVFSRNSQLSQHQKIHTGEKPYKCNECGKVFTQNSHLVRHRGIHTGEKPYKCNECGKAFRARSSLAIHQATHSGEKPYKCNECGKVFTQNSHLTNHWRIHTGEKPYKCNECGKAFGVRSSLAIHLVIHTGEKPYKCHECGKVFRRNSHLARHQLIHTGEKPYKCNECGKAFRAHSNLTTHQVIHTGEKPYKCNECGKVFTQNSHLANHQRIHTGVKPYMCNECGKAFSVYSSLTTHQVIHTGEKPYKCNECGKVFTQNSHLARHRGIHTGEKPYKCNECGKVFRHNSYLSRHQRIHTGEKPYKYNEYGKAFSEHSNLTTHQVIHTGEKPYKCNECGKVFTQNSHLARHRRVHTGGKPYQCNECGKAFSQTSKLARHQRVHTGEKPYECNQCGKAFSVRSSLTTHQAIHTGKKPYKCNECGKVFTQNSHLARHRGIHTGEKPYKCNECGKAFSQTSKLARHQRIHTGEKPYECGKPFSICSSLTTHQTIHTGGKPYKCNVWKVLKSEFKPCKPSQNS

SEQ ID NO: 7085 - protein, 840 aa, Homo sapiens
MALTQGQVTFRDVAIEFSQEEWTCLDPAQRTLYRDVMLENYRNLASLAGISCFDLSIISMLEQGKEPFTLESQVQIAGNPDGWEWIKAVITALSSEFVMKDLLHKGKSNTGEVFQTVMLERQESQDIEGCSFREVQKNTHGLEYQCRDAEGNYKGVLLTQEGNLTHGRDEHDKRDARNKLIKNQLGLSLQSHLPELQLFQYEGKIYECNQVEKSFNNNSSVSPPQQMPYNVKTHISKKYLKDFISSLLLTQGQKANNWGSPYKSNGCGMVFPQNSHLASHQRSHTKEKPYKCYECGKAFRTRSNLTTHQVIHTGEKRYKCNECGKVFSRNSQLSQHQKIHTGEKPYKCNECGKVFTQNSHLVRHRGIHTGEKPYKCNECGKAFRARSSLAIHQATHSGEKPYKCNECGKVFTQNSHLTNHWRIHTGEKPYKCNECGKAFGVRSSLAIHLVIHTGEKPYKCHECGKVFRRNSHLARHQLIHTGEKPYKCNECGKAFRAHSNLTTHQVIHTGEKPYKCNECGKVFTQNSHLANHQRIHTGVKPYMCNECGKAFSVYSSLTTHQVIHTGEKPYKCNECGKVFTQNSHLARHRGIHTGEKPYKCNECGKVFRHNSYLSRHQRIHTGEKPYKYNEYGKAFSEHSNLTTHQVIHTGEKPYKCNECGKVFTQNSHLARHRRVHTGGKPYQCNECGKAFSQTSKLARHQRVHTGEKPYECNQCGKAFSVRSSLTTHQAIHTGKKPYKCNECGKVFTQNSHLARHRGIHTGEKPYKCNECGKAFSQTSKLARHQRIHTGEKPYECGKPFSICSSLTTHQTIHTGGKPYKCNVWKVLKSEFKPCKPSQNS

SEQ ID NO: 7086 - protein, 585 aa, Homo sapiens
MELLTFRDVAIEFSPEEWKCLDPAQQNLYRDVMLENYRNLISLGVAISNPDLVIYLEQRKEPYKVKIHETVAKHPAVCSHFTQDFLPVQGIEDSFHKLILRRYEKCGHENLELRKSCKRKVQKGGYNEFNQCLSTIQSKIFQCNVHVKVFSTFSNSNQRRIRHTGEKHFKECGKSFQKFSDLTQHQGIHAGEKPYTCEECGKDFKWYLIFNEYEIIHTGEKPFTCEECGNIFTTSSNFAKHKVHTGEKSYKYEECGKAFNRSSTLTKHKRIHAEEKPFTCEECGKIITSSSNVAKHKKIHTGEKLYKCQECGKVFNRSTTLTKHNRIHTGEKPYTCEECGKAFSRSSVLNEHKRIHTGEKPYKCEQCGKAFRQSATLNKHKSIHTGEKPYTCEECGKAFSRFTTLNEHKRIHTGERPHKCEECGKAFGWSTDLNKHKIIHTGEKPYKCEECGKAFGWSAYLSKHKKIHTGEKPYRCEECGKAFLCSRALNKHKTIHTGEKPYECEECGKAFGWSTYLSKHKKIHTGEKPYRCEECGKAFRRSRVLNKYKTIHTGDKTPKCKGCGKAFKWSSYLNQHNKIYTGEKL

SEQ ID NO: 7087 - protein, 463 aa, Homo sapiens
MAQGLVTFADVAIDFSQEEWACLNSAQRDLYWDVMLENYSNLVSLDLESAYENKSLPTEKNIHEIRASKRNSDRRSKSLGRNWICEGTLERPQRSRGRYVNQMIINYVKRPATREGTPPRTHQRHHKENSFECKDCGKAFSRGYQLSQHQKIHTGEKPYECKECKKAFRWGNQLTQHQKIHTGEKPYECKDCGKAFRWGSSLVIHKRIHTGEKPYECKDCGKAFRRGDELTQHQRFHTGEKDYECKDCGKTFSRVYKLIQHKRIHSGEKPYECKDCGKAFICGSSLIQHKRIHTGEKPYECQECGKAFTRVNYLTQHQKIHTGEKPHECKECGKAFRWGSSLVKHERIHTGEKPYKCTECGKAFNCGYHLTQHERIHTGETPYKCKECGKAFIYGSSLVKHERIHTGVKPYGCTECGKSFSHGHQLTQHQKTHSGAKSYECKECGKACNHLNHLREHQRIHNS

SEQ ID NO: 7088 - protein, 64 aa, Homo sapiens
MMITRGWEGWGRRGARGAGTGTGLGGPGTPESSVTPPEFPLPPATRITPNFPNTLDPAISRSSS

SEQ ID NO: 7089 - protein, 127 aa, Homo sapiens
MAGVRARAPLPLALLLSLPAAPGGRDPSASRARFPQRLGRAPCFEVGLRKPPPPPLLSPPSFSSGSSRPLQRPRGPKDGAGRKVCAKLVKRLPGESGSCEDGQSAPAQPPRRRTGTRACPPRAPLWR

SEQ ID NO: 7090 - protein, 341 aa, Homo sapiens
MRLCLIPRNTGTPQRVLPPVVWSTPSRKKPVLSARNSMMFGHLSPMRIPHLRGKFNLQLPSLDEQVIPARLPKTEVRAEEPKEATEVKDQVETQEQEDNKRGPCSNGEAASTSRPLETQGNLTSSWYNPRPLEGNVHLKSLTEKNQTDKAQVHAVSFYSKGHGVASSHSPAGGILPFGRPDSLPTVLPAPVPGCSLWPEKAALKVLGKDYLPSSPGLLMVGEDMQPKDPAALGSSRSSPPKAAGHRSHKRKLSGPPLQLQPTPPLQLRWDRDEGPPPAKLPCLSPEALLVGQASQREGHLQQGNMHKNMRVLSRTSKFRRLRQLLRRRKKRRQGRCGGSRL

SEQ ID NO: 7091 - protein, 819 aa, Homo sapiens
MMNLEKNFDKTTLFNHMRTDKRGKCSDLNEYGTSCDKTTAVEYNKVHMAMTHYECNERGINFSRKSPLTQSQRTITGWSAFESNKCEENFSQSSAHIVHQKTQAGDKFGEHNECTDALYQKLDFTAHQRIHTDFTAHQKFYLSDEHGKCRKSFYWKAHLIQHERPHSGEKTYQYEECAKSFCSSSHPIQHPGTYVGFKLYECNECGKAFCQNSNLSKHLRIHTKEKPCDNNGCGRSYKSPLIGHQKTDAEMELCGGSEYGKTSHLKGHQRILMGEKPYECIECGKTFSKTSHLRAHQRIHTGEKPYECVECEKTFSHKTHLSVHQRVHTGEKPYECNDCGKSFTYNSALRAHQRIHTGEKPYECSDCEKTFAHNSALRAHHRIHTGEKPYECNECGRSFAHISVLKAHQRIHTREKPYECNECGRSFTYNSALRAHQRIHTGRKPYECSDCEKTFAHNSALKIHQRIHTGEKPYKCNECEKTFAHNSALRAHQNIHTGEKLYECSECGKTFFQKTRLSTHRRIHTGEKPYECSKCGKTFSQKSYLSGHERIHTGEKPYECNVCGKTFVYKAALIVHQRIHTGEKPYECNECGKTFSQRTHLCAHQRIHTGEKPYECNECGKTFADNSALRAHHRIHTGEKPYECNDCGKTFSKTSHLRAHLRTRSGEKPYECSECGKTFSEKSYVSAHQRVHTGEKPYECNVCGKPFAHNSTLRVHQRIHTGEKSYECNDCGKTFSQKSHLSAHQRIHTGEKPYECNECGKAFAQNSTLRVHQRIHTGEKPYECDECGKTFVRKAALRVHHTRMHTREKTLACNGFGKS

SEQ ID NO: 7092 - protein, 155 aa, Homo sapiens
MEEAAAAPISPWTMAATIQAMERKIESQAAHLLSLEGQTGMAEKKLADCEKTAVEFGNQLEGKWAVLGTLLQEYGLLQRRLENVENLLHNRNFWILRLPPGSKGESPKTTPSPSPRSSPRLNKGRSPATGAALTPRFQMFLWTPVQMQKLRPSRD

SEQ ID NO: 7093 - protein, 118 aa, Homo sapiens
MEEAAAAPISPWTMAATIQAMERKIESQAAHLLSLEGQTGMAEKKLADCEKTAVEFGNQLEGKWAVLGTLLQEYGLLQRRLENVENLLHNRNFWILRLPPGSKGESPKVPMTFDDVAV

SEQ ID NO: 7094 - protein, 374 aa, Homo sapiens
MEPGGEPTGAKESSTLMESLAAVKAAFLAQAPSGSRSAEVQAAQSTEPAAEAGAPEGEGHRGGPPRALGSLGLCENQEARERPGGSPRGPVTSEKTGGQSGLESDVPPNAGPGAEGGGSWKGRPFPCGACGRSFKCSSDAAKHRSIHSGEKPYECSDCGKAFIHSSHVVRHQRAHSGERPYACAECGKAFGQSFNLLRHQRVHTGEKPYACADCGKAFGQRSDAAKHRRTHTGERLYACGECGKRFLHSSNVVRHRRTHHGENPYECRECGQAFSQSSNLLQHQRVHTGERPFACQDCGRAFSRSSFLREHRRIHTGEKPHQCGHCGRAFRALSGFFRHQRLHTGEKPFRCTECGRAFRLSFHLIQHRRVHGAE

SEQ ID NO: 7095 - protein, 871 aa, Homo sapiens
MSFSEMNRRTLAFRGGGLVTASGGGSTNNNAGGEASAWPPQPQPRQPPPPAPPALQPPNGRGADEEVELEGLEPQDLEASAGPAAGAAEEAKELLLPQDAGGPTSLGGGAGGPLLAERNRRTLAFRGGGGGGLGNNGSSRGRPETSVWPLRHFNGRGPATVDLELDALEGKELMQDGASLSDSTEDEEEGASLGDGSGAEGGSCSSSRRSGGDGGDEVEGSGVGAGEGETVQHFPLARPKSLMQKLQCSFQTSWLKDFPWLRYSKDTGLMSCGWCQKTPADGGSVDLPPVGHDELSRGTRNYKKTLLLRHHVSTEHKLHEANAQESEIPSEEGYCDFNSRPNENSYCYQLLRQLNEQRKKGILCDVSIVVSGKIFKAHKNILVAGSRFFKTLYCFSNKESPNQNNTTHLDIAAVQGFSVILDFLYSGNLVLTSQNAIEVMTVASYLQMSEVVQTCRNFIKDALNISIKSEAPESVVVDYNNRKPVNRDGLSSSRDQKIASFWATRNLTNLASNVKIENDGCNVDEGQIENYQMNDSSWVQDGSPEMAENESEGQTKVFIWNNMGSQGIQETGKTRRKNQTTKRFIYNIPPNNETNLEDCSVMQPPVAYPEENTLLIKEEPDLDGALLSGPDGDRNVNANLLAEAGTSQDGGDAGTSHDFKYGLMPGPSNDFKYGLIPGTSNDFKYGLIPGASNDFKYGLLPESWPKQETWENGESSLIMNKLKCPHCSYVAKYRRTLKRHLLIHTGVRSFSCDICGKLFTRREHVKRHSLVHKKDKKYKCMVCKKIFMLAASVGIRHGSRRYGVCVDCADKSQPGGQEGVDQGQDTEFPRDEEYEENEVGEADEELVDDGEDQNDPSRWDESGEVCMSLDD

SEQ ID NO: 7096 - protein, 847 aa, Homo sapiens
MSFSEMNRRTLAFRGGGLVTASGGGSTNNNAGGEASAWPPQPQPRQPPPPAPPALQPPNGRGADEEVELEGLEPQDLEASAGPAAGAAEEAKELLLPQDAGGPTSLGGGAGGPLLAERNRRTLAFRGGGGGGLGNNGSSRGRPETSVWPLRHFNGRGPATVDLELDALEGKELMQDGASLSDSTEDEEEGASLGDGSGAEGGSCSSSRRSGGDGGDEVEGSGVGAGEGETVQHFPLARPKSLMQKLQCSFQTSWLKDFPWLRYSKDTGLMSCGWCQKTPADGGSVDLPPVGHDELSRGTRNYKKTLLLRHHVSTEHKLHEANAQESEIPSEEGYCDFNSRPNENSYCYQLLRQLNEQRKKGILCDVSIVVSGKIFKAHKNILVAGSRFFKTLYCFSNKESPNQNNTTHLDIAAVQGFSVILDFLYSGNLVLTSQNAIEVMTVASYLQMSEVVQTCRNFIKDALNISIKSEAPESVVVDYNNRKPVNRDGLSSSRDQKIASFWATRNLTNLASNVKIENDGCNVDEGQIENYQMNDSSWVQDGSPEMAENESEGQTKVFIWNNMGSQGIQETGKTRRKNQTTKRFIYNIPPNNETNLEDCSVMQPPVAYPEENTLLIKEEPDLDGALLSGPDGDRNVNANLLAEAGTSQDGGDAGTSHDFKYGLMPGASNDFKYGLLPESWPKQETWENGESSLIMNKLKCPHCSYVAKYRRTLKRHLLIHTGVRSFSCDICGKLFTRREHVKRHSLVHKKDKKYKCMVCKKIFMLAASVGIRHGSRRYGVCVDCADKSQPGGQEGVDQGQDTEFPRDEEYEENEVGEADEELVDDGEDQNDPSRWDESGEVCMSLDD

SEQ ID NO: 7097 - protein, 698 aa, Homo sapiens
MQDGASLSDSTEDEEEGASLGDGSGAEGGSCSSSRRSGGDGGDEVEGSGVGAGEGETVQHFPLARPKSLMQKLQCSFQTSWLKDFPWLRYSKDTGLMSCGWCQKTPADGGSVDLPPVGHDELSRGTRNYKKTLLLRHHVSTEHKLHEANAQESEIPSEEGYCDFNSRPNENSYCYQLLRQLNEQRKKGILCDVSIVVSGKIFKAHKNILVAGSRFFKTLYCFSNKESPNQNNTTHLDIAAVQGFSVILDFLYSGNLVLTSQNAIEVMTVASYLQMSEVVQTCRNFIKDALNISIKSEAPESVVVDYNNRKPVNRDGLSSSRDQKIASFWATRNLTNLASNVKIENDGCNVDEGQIENYQMNDSSWVQDGSPEMAENESEGQTKVFIWNNMGSQGIQETGKTRRKNQTTKRFIYNIPPNNETNLEDCSVMQPPVAYPEENTLLIKEEPDLDGALLSGPDGDRNVNANLLAEAGTSQDGGDAGTSHDFKYGLMPGPSNDFKYGLIPGTSNDFKYGLIPGASNDFKYGLLPESWPKQETWENGESSLIMNKLKCPHCSYVAKYRRTLKRHLLIHTGVRSFSCDICGKLFTRREHVKRHSLVHKKDKKYKCMVCKKIFMLAASVGIRHGSRRYGVCVDCADKSQPGGQEGVDQGQDTEFPRDEEYEENEVGEADEELVDDGEDQNDPSRWDESGEVCMSLDD

SEQ ID NO: 7098 - protein, 579 aa, Homo sapiens
MTRLERSSHRTVICKVPGELVAREGKCASRARESEIPSEEGYCDFNSRPNENSYCYQLLRQLNEQRKKGILCDVSIVVSGKIFKAHKNILVAGSRFFKTLYCFSNKESPNQNNTTHLDIAAVQGFSVILDFLYSGNLVLTSQNAIEVMTVASYLQMSEVVQTCRNFIKDALNISIKSEAPESVVVDYNNRKPVNRDGLSSSRDQKIASFWATRNLTNLASNVKIENDGCNVDEGQIENYQMNDSSWVQDGSPEMAENESEGQTKVFIWNNMGSQGIQETGKTRRKNQTTKRFIYNIPPNNETNLEDCSVMQPPVAYPEENTLLIKEEPDLDGALLSGPDGDRNVNANLLAEAGTSQDGGDAGTSHDFKYGLMPGPSNDFKYGLIPGTSNDFKYGLIPGASNDFKYGLLPESWPKQETWENGESSLIMNKLKCPHCSYVAKYRRTLKRHLLIHTGVRSFSCDICGKLFTRREHVKRHSLVHKKDKKYKCMVCKKIFMLAASVGIRHGSRRYGVCVDCADKSQPGGQEGVDQGQDTEFPRDEEYEENEVGEADEELVDDGEDQNDPSRWDESGEVCMSLDD

SEQ ID NO: 7099 - protein, 170 aa, Homo sapiens
MLENYQNLVWLGLSISKSVISLLEKRKLPWIMAKEEIRGPLPGYFKVSEMTISQEPKAKTRTLFGKDVPGAEIKELSAKRAINEVLSQFDTVIKCTRNVCKECGNLYCHNMQLTLHKRNHTQKKCNQCLDCGKYFTRQSTLIQHQRIHTGERPYKCNECIKTFNQRAHLT

SEQ ID NO: 7100 - protein, 146 aa, Homo sapiens
MLENYQNLVWLGLSISKSVISLLEKRKLPWIMAKEEIRGPLPDVPGAEIKELSAKRAINEVLSQFDTVIKCTRNVCKECGNLYCHNMQLTLHKRNHTQKKCNQCLDCGKYFTRQSTLIQHQRIHTGERPYKCNECIKTFNQRAHLT

SEQ ID NO: 7101 - protein, 450 aa, Homo sapiens
MPSPLGPPCLPVMDPETTLEEPETARLRFRGFCYQEVAGPREALARLRELCCQWLQPEAHSKEQMLEMLVLEQFLGTLPPEIQAWVRGQRPGSPEEAAALVEGLQHDPGQLLGWITAHVLKQEVLPAAQKTEEPLGSPHPSGTVESPGEGPQDTRIEGSVQLSCSVKEEPNVDGQEVAPSSPPLAAQSPEGNHGHQEPASTSFHPPRIQEEWGLLDRSQKELYWDAMLEKYGTVVSLGLPPHQPEAQAQSELGMLLTGTGVCRSLRSGNESEGPPGCPEAQPPQGPGPAAWEGLSGAATPAPTVRPGTPPVPTQPTPAETRLEPAATPRKPYTCEQCGRGFDWKSVFVIHHRTHTSGPGVQSPGLATGESTEKPPQGEVAFPHHPRRSLTGPRSYPCEECGCSFSWKSQLVIHRKSHTGQRRHFCSDCGRAFDWKSQLVIHRKGHRPEVP

SEQ ID NO: 7102 - protein, 422 aa, Homo sapiens
MPSPLGPPCLPVMDPETTLEEPETARLRFRGFCYQEVAGPREALARLRELCCQWLQPEAHSKEQMLEMLVLEQFLGTLPPEIQAWVRGQRPGSPEEAAALVEGLQHDPGQLLGWITAHVLKQEVLPAAQKTEEPLGSPHPSGTVESPGEGPQDTRIEGSVQLSCSVKEEPNVDGQEVAPSSPPLAAQSPEGNHGHQEPASTSFHPPRIQEEWGLLDRSQKELYWDAMLEKYGTVVSLGLPPHQPEAQAQSELGMLLTGTGVCRSLRSGNESEGPPGCPEAQPPQGPGPAAWEGLSGAATPAPTVRPGTPPVPTQPTPAETRLEPAATPRKPYTCEQCGRGFDWKSVFVIHHRTHTSGPGVQSPGLATGESTEKPPQGEVAFPHHPRRSLTGPRSYPCEECGCSFSWKSQLVIHRKSHRPEVP

SEQ ID NO: 7103 - protein, 575 aa, Homo sapiens
MAAAVPRRPTQQGTVTFEDVAVNFSQEEWCLLSEAQRCLYRDVMLENLALISSLGCWCGSKDEEAPCKQRISVQRESQSRTPRAGVSPKKAHPCEMCGLILEDVFHFADHQETHHKQKLNRSGACGKNLDDTAYLHQHQKQHIGEKFYRKSVREASFVKKRKLRVSQEPFVFREFGKDVLPSSGLCQEEAAVEKTDSETMHGPPFQEGKTNYSCGKRTKAFSTKHSVIPHQKLFTRDGCYVCSDCGKSFSRYVSFSNHQRDHTAKGPYDCGECGKSYSRKSSLIQHQRVHTGQTAYPCEECGKSFSQKGSLISHQLVHTGEGPYECRECGKSFGQKGNLIQHQQGHTGERAYHCGECGKSFRQKFCFINHQRVHTGERPYKCGECGKSFGQKGNLVHHQRGHTGERPYECKECGKSFRYRSHLTEHQRLHTGERPYNCRECGKLFNRKYHLLVHERVHTGERPYACEVCGKLFGNKHSVTIHQRIHTGERPYECSECGKSFLSSSALHVHKRVHSGQKPYKCSECGKSFSECSSLIKHRRIHTGERPYECTKCGKTFQRSSTLLHHQSSHRRKAL

SEQ ID NO: 7104 - protein, 574 aa, Homo sapiens
MAAAVPRRPTQGTVTFEDVAVNFSQEEWCLLSEAQRCLYRDVMLENLALISSLGCWCGSKDEEAPCKQRISVQRESQSRTPRAGVSPKKAHPCEMCGLILEDVFHFADHQETHHKQKLNRSGACGKNLDDTAYLHQHQKQHIGEKFYRKSVREASFVKKRKLRVSQEPFVFREFGKDVLPSSGLCQEEAAVEKTDSETMHGPPFQEGKTNYSCGKRTKAFSTKHSVIPHQKLFTRDGCYVCSDCGKSFSRYVSFSNHQRDHTAKGPYDCGECGKSYSRKSSLIQHQRVHTGQTAYPCEECGKSFSQKGSLISHQLVHTGEGPYECRECGKSFGQKGNLIQHQQGHTGERAYHCGECGKSFRQKFCFINHQRVHTGERPYKCGECGKSFGQKGNLVHHQRGHTGERPYECKECGKSFRYRSHLTEHQRLHTGERPYNCRECGKLFNRKYHLLVHERVHTGERPYACEVCGKLFGNKHSVTIHQRIHTGERPYECSECGKSFLSSSALHVHKRVHSGQKPYKCSECGKSFSECSSLIKHRRIHTGERPYECTKCGKTFQRSSTLLHHQSSHRRKAL

SEQ ID NO: 7105 - protein, 314 aa, Homo sapiens
MEKRNLTVVREFVLLGLPSSAEQQHLLSVLFLCMYLATTLGNMLIIATIGFDSHLHSPMYFFLSNLAFVDICFTSTTVPQMVVNILTGTKTISFAGCLTQLFFFVSFVNMDSLLLCVMAYDRYVAICHPLHYTARMNLCLCVQLVAGLWLVTYLHALLHTVLIAQLSFCASNIIHHFFCDLNPLLQLSCSDVSFNVMIIFAVGGLLALTPLVCILVSYGLIFSTVLKITSTQGKQRAVSTCSCHLSVVVLFYGTAIAVYFSPSSPHMPESDTLSTIMYSMVAPMLNPFIYTLRNRDMKRGLQKMLLKCTVFQQQ

SEQ ID NO: 7106 - protein, 414 aa, Homo sapiens
MLILTKTAGVFFKPSKRKVYEFLRSFNFHPGTLFLHKIVLGIETSCDDTAAAVVDETGNVLGEAIHSQTEVHLKTGGIVPPAAQQLHRENIQRIVQEALSASGVSPSDLSAIATTIKPGLALSLGVGLSFSLQLVGQLKKPFIPIHHMEAHALTIRLTNKVEFPFLVLLISGGHCLLALVQGVSDFLLLGKSLDIAPGDMLDKVARRLSLIKHPECSTMSGGKAIEHLAKQGNRFHFDIKPPLHHAKNCDFSFTGLQHVTDKIIMKKEKEEGIEKGQILSSAADIAATVQHTMACHLVKRTHRAILFCKQRDLLPQNNAVLVASGGVASNFYIRRALEILTNATQCTLLCPPPRLCTDNGIMIAWNGIERLRAGLGILHDIEGIRYEPKCPLGVDISKEVGEASIKVPQLKMEI

SEQ ID NO: 7107 - protein, 364 aa, Homo sapiens
MLILTKTAGVFFKPSKRKVYEFLRSFNFHPGTLFLHKIVLGIETSCDDTAAAVVDETGNVLGEAIHSQTEVHLKTGGIVPPAAQQLHRENIQRIVQEALSASGVSPSDLSAIATTIKPGLALSLGVGLSFSLQLVGQLKKPFIPIHHMEAHALTIRLTNKVEFPFLVLLISGGHCLLALVQGVSDFLLLGKSLDIAPGDMLDKVARRLSLIKHPECSTMSGGKAIEHLAKQGNRFHFDIKPPLHHAKNCDFSFTGLQHVTDKIIMKKEKEEGIEKGQILSSAADIAATVQHTMACHLVKRTHRAILFCKQRDLLPQNNAVLVASGGVASNFYIRRALEILTNATQCTLLCPPPRLCTDNGIMIA

SEQ ID NO: 7108 - protein, 298 aa, Homo sapiens
MLILTKTAGVFFKPSKRKVYEFLRSFNFHPGTLFLHKIVLGIETSCDDTAAAVVDETGNVLGEAIHSQTEVHLKTGGIVPPAAQQLHRENIQRIVQEALSASGVSPSDLSAIATTIKPGLALSLGVGLSFSLQLVGQLKKPFIPIHHMEAHALTIRLTNKVEFPFLVLLISGGHCLLALVQGVSDFLLLGKSLDIAPGDMLDKVARRLSLIKHPECSTMSGGKAIEHLAKQGNRFHFDIKPPLHHAKNCDFSFTGLQHVTDKIIMKKEKEEGIFLISKVEQINIPGLCLKIAAHFCRY

SEQ ID NO: 7109 - protein, 326 aa, Homo sapiens
MKQDASRNAAYTVDCEDYVHVVEFNPFENGDSGNLIAYGGNNYVVIGTCTFQEEEADVEGIQYKTLRTFHHGVRVDGIAWSPETRLDSLPPVIKFCTSAADMKIRLFTSDLQDKNEYKVLEGHTDFINGLVFDPKEGQEIASVSDDHTCRIWNLEGVQTAHFVLHSPGMSVCWHPEETFKLMVAEKNGTIRFYDLLAQQAILSLESEQVPLMSAHWCLKNTFKVGAVAGNDWLIWDITRSSYPQNKRPVHMDRACLFRWSTISENLFATTGYPGKMASQFQIHHLGHPQPILMGSVAVGSGLSWHRTLPLCVIGGDHKLLFWVTEV

SEQ ID NO: 7110 - protein, 252 aa, Homo sapiens
MGSELIGRLAPRLGLAEPDMLRKAEEYLRLSRVKCVGLSARTTETSSAVMCLDLAASWMKCPLDRAYLIKLSGLNKETYQSCLKSFECLLGLNSNIGIRDLAVQFSCIEAVNMASKILKSYESSLPQTQQVDLDLSRPLFTSAALLSACKILKLKVDKNKMVATSGVKKAIFDRLCKQLEKIGQQVDREPGDVATPPRKRKKIVVEAPAKEMEKVEEMPHKPQKDEDLTQDYEEWKRKILENAASAQKATAE

SEQ ID NO: 7111 - protein, 819 aa, Homo sapiens
MDTEGFGELLQQAEQLAAETEGISELPHVERNLQEIQQAGERLRSRTLTRTSQETADVKASVLLGSRGLDISHISQRLESLSAATTFEPLEPVKDTDIQGFLKNEKDNALLSAIEESRKRTFGMAEEYHRESMLVEWEQVKQRILHTLLASGEDALDFTQESEPSYISDVGPPGRSSLDNIEMAYARQIYIYNEKIVNGHLQPNLVDLCASVAELDDKSISDMWTMVKQMTDVLLTPATDALKNRSSVEVRMEFVRQALAYLEQSYKNYTLVTVFGNLHQAQLGGVPGTYQLVRSFLNIKLPAPLPGLQDGEVEGHPVWALIYYCMRCGDLLAASQVVNRAQHQLGEFKTWFQEYMNSKDRRLSPATENKLRLHYRRALRNNTDPYKRAVYCIIGRCDVTDNQSEVADKTEDYLWLKLNQVCFDDDGTSSPQDRLTLSQFQKQLLEDYGESHFTVNQQPFLYFQVLFLTAQFEAAVAFLFRMERLRCHAVHVALVLFELKLLLKSSGQSAQLLSHEPGDPPCLRRLNFVRLLMLYTRKFESTDPREALQYFYFLRDEKDSQGENMFLRCVSELVIESREFDMILGKLENDGSRKPGVIDKFTSDTKPIINKVASVAENKGLFEEAAKLYDLAKNADKVLELMNKLLSPVVPQISAPQSNKERLKNMALSIAERYRAQGISANKFVDSTFYLLLDLITFFDEYHSGHIDRAFDIIERLKLVPLNQESVEERVAAFRNFSDEIRHNLSEVLLATMNILFTQFKRLKGTSPSSSSRPQRVIEDRDSQLRSQARTLITFAGMIPYRTSGDTNARLVQMEVLMN

SEQ ID NO: 7112 - protein, 696 aa, Homo sapiens
MAEEYHRESMLVEWEQVKQRILHTLLASGEDALDFTQESEPSYISDVGPPGRSSLDNIEMAYARQIYIYNEKIVNGHLQPNLVDLCASVAELDDKSISDMWTMVKQMTDVLLTPATDALKNRSSVEVRMEFVRQALAYLEQSYKNYTLVTVFGNLHQAQLGGVPGTYQLVRSFLNIKLPAPLPGLQDGEVEGHPVWALIYYCMRCGDLLAASQVVNRAQHQLGEFKTWFQEYMNSKDRRLSPATENKLRLHYRRALRNNTDPYKRAVYCIIGRCDVTDNQSEVADKTEDYLWLKLNQVCFDDDGTSSPQDRLTLSQFQKQLLEDYGESHFTVNQQPFLYFQVLFLTAQFEAAVAFLFRMERLRCHAVHVALVLFELKLLLKSSGQSAQLLSHEPGDPPCLRRLNFVRLLMLYTRKFESTDPREALQYFYFLRDEKDSQGENMFLRCVSELVIESREFDMILGKLENDGSRKPGVIDKFTSDTKPIINKVASVAENKGLFEEAAKLYDLAKNADKVLELMNKLLSPVVPQISAPQSNKERLKNMALSIAERYRAQGISANKFVDSTFYLLLDLITFFDEYHSGHIDRAFDIIERLKLVPLNQESVEERVAAFRNFSDEIRHNLSEVLLATMNILFTQFKRLKGTSPSSSSRPQRVIEDRDSQLRSQARTLITFAGMIPYRTSGDTNARLVQMEVLMN

SEQ ID NO: 7113 - protein, 310 aa, Homo sapiens
MDPQNYSLVSEFVLHGLCTSRHLQNFFFIFFFGVYVAIMLGNLLILVTVISDPCLHSSPMYFLLGNLAFLDMWLASFATPKMIRDFLSDQKLISFGGCMAQIFFLHFTGGAEMVLLVSMAYDRYVAICKPLHYMTLMSWQTCIRLVLASWVVGFVHSISQVAFTVNLPYCGPNEVDSFFCDLPLVIKLACMDTYVLGIIMISDSGLLSLSCFLLLLISYTVILLAIRQRAAGSTSKALSTCSAHIMVVTLFFGPCIFVYVRPFSRFSVDKLLSVFYTIFTPLLNPIIYTLRNEEMKAAMKKLQNRRVTFQ

SEQ ID NO: 7114 - protein, 312 aa, Homo sapiens
MSVLNNSEVKLFLLIGIPGLEHAHIWFSIPICLMYLLAIMGNCTILFIIKTEPSLHEPMYYFLAMLAVSDMGLSLSSLPTMLRVFLFNAMGISPNACFAQEFFIHGFTVMESSVLLIMSLDRFLAIHNPLRYSSILTSNRVAKMGLILAIRSILLVIPFPFTLRRLKYCQKNLLSHSYCLHQDTMKLACSDNKTNVIYGFFIALCTMLDLALIVLSYVLILKTILSIASLAERLKALNTCVSHICAVLTFYVPIITLAAMHHFAKHKSPLVVILIADMFLLVPPLMNPIVYCVKTRQIWEKILGKLLNVCGR

SEQ ID NO: 7115 - protein, 321 aa, Homo sapiens
MTILLNSSLQRATFFLTGFQGLEGLHGWISIPFCFIYLTVILGNLTILHVICTDATLHGPMYYFLGMLAVTDLGLCLSTLPTVLGIFWFDTREIGIPACFTQLFFIHTLSSMESSVLLSMSIDRYVAVCNPLHDSTVLTPACIVKMGLSSVLRSALLILPLPFLLKRFQYCHSHVLAHAYCLHLEIMKLACSSIIVNHIYGLFVVACTVGVDSLLIFLSYALILRTVLSIASHQERLRALNTCVSHICAVLLFYIPMIGLSLVHRFGEHLPRVVHLFMSYVYLLVPPLMNPIIYSIKTKQIRQRIIKKFQFIKSLRCFWKD

SEQ ID NO: 7116 - protein, 562 aa, Homo sapiens
MSEELAQGPKESPPAPRAGPREVWKKGGRLLSVLLAVNVLLLACTLISGGAFNKVAVYDTDVFALLTAMMLLATLWILFYLLRTVRCPCAVPYRDAHAGPIWLRGGLVLFGICTLIMDVFKTGYYSSFFECQSAIKILHPLIQAVFVIIQTYFLWVSAKDCVHVHLDLTWCGLMFTLTTNLAIWMAAVVDESVHQSHSYSSSHSNASHARLISDQHADNPVGGDSCLCSTAVCQIFQQGYFYLYPFNIEYSLFASTMLYVMWKNVGRFLASTPGHSHTPTPVSLFRETFFAGPVLGLLLFVVGLAVFIIYEVQVSGDGSRTRQALVIYYSFNIVCLGLTTLVSLSGSIIYRFDRRAMDHHKNPTRTLDVALLMGAALGQYAISYYSIVAVVAGTPQDLLAGLNLTHALLMIAQHTFQNMFIIESLHRGPPGAEPHSTHPKEPCQDLTFTNLDALHTLSACPPNPGLVSPSPSDQREAVAIVSTPRSQWRRQCLKDISLFLLLCNVILWIMPAFGARPHFSNTVEVDFYGYSLWAVIVNICLPFGIFYRMHAVSSLLEVYVLS

SEQ ID NO: 7117 - protein, 324 aa, Homo sapiens
MAVGRNNTIVTKFILLGLSDHPQMKIFLFMLFLGLYLLTLAWNLSLIALIKMDSHLHMPMYFFLSNLSFLDICYVSSTAPKMLSDIITEQKTISFVGCATQYFVFCGMGLTECFLLAAMAYDRYAAICNPLLYTVLISHTLCLKMVVGAYVGGFLSSFIETYSVYQHDFCGPYMINHFFCDLPPVLALSCSDTFTSEVVTFIVSVVVGIVSVLVVLISYGYIVAAVVKISSATGRTKAFSTCASHLTAVTLFYGSGFFMYMRPSSSYSLNRDKVVSIFYALVIPVVNPIIYSFRNKEIKNAMRKAMERDPGISHGGPFIFMTLG

SEQ ID NO: 7118 - protein, 309 aa, Homo sapiens
MGLGNESSLMDFILLGFSDHPRLEAVLFVFVLFFYLLTLVGNFTIIIISYLDPPLHTPMYFFLSNLSLLDICFTTSLAPQTLVNLQRPKKTITYGGCVAQLYISLALGSTECILLADMALDRYIAVCKPLHYVVIMNPRLCQQLASISWLSGLASSLIHATFTLQLPLCGNHRLDHFICEVPALLKLACVDTTVNELVLFVVSVLFVVIPPALISISYGFITQAVLRIKSVEARHKAFSTCSSHLTVVIIFYGTIIYVYLQPSDSYAQDQGKFISLFYTMVTPTLNPIIYTLRNKDMKEALRKLLSGKL

SEQ ID NO: 7119 - protein, 305 aa, Homo sapiens
MVTEFIFLGLSDSQELQTFLFMLFFVFYGGIVFGNLLIVITVVSDSHLHSPMYFLLANLSLIDLSLSSVTAPKMITDFFSQRKVISFKGCLVQIFLLHFFGGSEMVILIAMGFDRYIAICKPLHYTTIMCGNACVGIMAVAWGIGFLHSVSQLAFAVHLPFCGPNEVDSFYCDLPRVIKLACTDTYRLDIMVIANSGVLTVCSFVLLIISYTIILMTIQHCPLDKSSKALSTLTAHITVVLLFFGPCVFIYAWPFPIKSLDKFLAVFYSVITPLLNPIIYTLRNKDMKTAIRRLRKWDAHSSVKF

SEQ ID NO: 7120 - protein, 311 aa, Homo sapiens
MNNVIEFILLGLTHNPELQKFLFVMFLITYLITLAGNLFISVIIFISPALGSPMYSFPSYLFIIDIFCSSSIAPKMNFDLISEKNTISFNGCMTQLFTEHFFYYYYYYTLTEIILLSVMAYDHYVAIRKPLHYATIMSQPMCGFLMVVAGILGFVHGGIQTLFIAQLPFCGPNVINHFMCDLVPLLELACTDTHTLGPLIAANSGSLCFLIFSMLVASYVIILCFLRTHSSEGRRKALSSCASHIFIVILFFVPFSYLYLRPTSFPTDKAVTVFCTLFTPMLNPLIYTLKNKEVKNVIKKLWKQIMTTDDK

SEQ ID NO: 7121 - protein, 1069 aa, Homo sapiens
MSDQAPKVPEEMFREVKYYAVGDIDPQVIQLLKAGKAKEVSYNALASHIISEDGDNPEVGEAREVFDLPVVKPSWVILSVQCGTLLPVNGFSPESCQIFFGITACLSQVSSEDRSALWALVTFYGGDCQLTLNKKCTHLIVPEPKGEKYECALKRASIKIVTPDWVLDCVSEKTKKDEAFYHPRLIIYEEEEEEEEEEEEVENEEQDSQNEGSTDEKSSPASSQEGSPSGDQQFSPKSNTEKSKGELMFDDSSDSSPEKQERNLNWTPAEVPQLAAAKRRLPQGKEPGLINLCANVPPVPGNILPPEVRGNLMAAGQNLQSSERSEMIATWSPAVRTLRNITNNADIQQMNRPSNVAHILQTLSAPTKNLEQQVNHSQQGHTNANAVLFSQVKVTPETHMLQQQQQAQQQQQQHPVLHLQPQQIMQLQQQQQQQISQQPYPQQPPHPFSQQQQQQQQAHPHQFSQQQLQFPQQQLHPPQQLHRPQQQLQPFQQQHALQQQFHQLQQHQLQQQQLAQLQQQHSLLQQQQQQQIQQQQLQRMHQQQQQQQMQSQTAPHLSQTSQALQHQVPPQQPPQQQQQQQPPPSPQQHQLFGHDPAVEIPEEGFLLGCVFAIADYPEQMSDKQLLATWKRIIQAHGGTVDPTFTSRCTHLLCESQVSSAYAQAIRERKRCVTAHWLNTVLKKKKMVPPHRALHFPVAFPPGGKPCSQHIISVTGFVDSDRDDLKLMAYLAGAKYTGYLCRSNTVLICKEPTGLKYEKAKEWRIPCVNAQWLGDILLGNFEALRQIQYSRYTAFSLQDPFAPTQHLVLNLLDAWRVPLKVSAELLMSIRLPPKLKQNEVANVQPSSKRARIEDVPPPTKKLTPELTPFVLFTGFEPVQVQQYIKKLYILGGEVAESAQKCTHLIASKVTRTVKFLTAISVVKHIVTPEWLEECFRCQKFIDEQNYILRDAEAEVLFSFSLEESLKRAHVSPLFKAKYFYITPGICPSLSTMKAIVECAGGKVLSKQPSFRKLMEHKQNSSLSEIILISCENDLHLCREYFARGIDVHNAEFVLTGVLTQTLDYESYKFN

SEQ ID NO: 7122 - protein, 1035 aa, Homo sapiens
MVFLQNHVRFFLESLPAFLRVLIQAGALCWSLPELSQGEVGKGACPAEVGKHRDHLPSSDPVLMQAEASVVMCWVSSEDRSALWALVTFYGGDCQLTLNKKCTHLIVPEPKGEKYECALKRASIKIVTPDWVLDCVSEKTKKDEAFYHPRLIIYEEEEEEEEEEEEVENEEQDSQNEGSTDEKSSPASSQEGSPSGDQQFSPKSNTEKSKGELMFDDSSDSSPEKQERNLNWTPAEVPQLAAAKRRLPQGKEPGLINLCANVPPVPGNILPPEVRGNLMAAGQNLQSSERSEMIATWSPAVRTLRNITNNADIQQMNRPSNVAHILQTLSAPTKNLEQQVNHSQQGHTNANAVLFSQVKVTPETHMLQQQQQAQQQQQQHPVLHLQPQQIMQLQQQQQQQISQQPYPQQPPHPFSQQQQQQQQAHPHQFSQQQLQFPQQQLHPPQQLHRPQQQLQPFQQQHALQQQFHQLQQHQLQQQQLAQLQQQHSLLQQQQQQQIQQQQLQRMHQQQQQQQMQSQTAPHLSQTSQALQHQVPPQQPPQQQQQQQPPPSPQQHQLFGHDPAVEIPEEGFLLGCVFAIADYPEQMSDKQLLATWKRIIQAHGGTVDPTFTSRCTHLLCESQVSSAYAQAIRERKRCVTAHWLNTVLKKKKMVPPHRALHFPVAFPPGGKPCSQHIISVTGFVDSDRDDLKLMAYLAGAKYTGYLCRSNTVLICKEPTGLKYEKAKEWRIPCVNAQWLGDILLGNFEALRQIQYSRYTAFSLQDPFAPTQHLVLNLLDAWRVPLKVSAELLMSIRLPPKLKQNEVANVQPSSKRARIEDVPPPTKKLTPELTPFVLFTGFEPVQVQQYIKKLYILGGEVAESAQKCTHLIASKVTRTVKFLTAISVVKHIVTPEWLEECFRCQKFIDEQNYILRDAEAEVLFSFSLEESLKRAHVSPLFKAKYFYITPGICPSLSTMKAIVECAGGKVLSKQPSFRKLMEHKQNSSLSEIILISCENDLHLCREYFARGIDVHNAEFVLTGVLTQTLDYESYKFN

SEQ ID NO: 7123 - protein, 822 aa, Homo sapiens
MFDDSSDSSPEKQERNLNWTPAEVPQLAAAKRRLPQGKEPGLINLCANVPPVPGNILPPEVRGNLMAAGQNLQSSERSEMIATWSPAVRTLRNITNNADIQQMNRPSNVAHILQTLSAPTKNLEQQVNHSQQGHTNANAVLFSQVKVTPETHMLQQQQQAQQQQQQHPVLHLQPQQIMQLQQQQQQQISQQPYPQQPPHPFSQQQQQQQQAHPHQFSQQQLQFPQQQLHPPQQLHRPQQQLQPFQQQHALQQQFHQLQQHQLQQQQLAQLQQQHSLLQQQQQQQIQQQQLQRMHQQQQQQQMQSQTAPHLSQTSQALQHQVPPQQPPQQQQQQQPPPSPQQHQLFGHDPAVEIPEEGFLLGCVFAIADYPEQMSDKQLLATWKRIIQAHGGTVDPTFTSRCTHLLCESQVSSAYAQAIRERKRCVTAHWLNTVLKKKKMVPPHRALHFPVAFPPGGKPCSQHIISVTGFVDSDRDDLKLMAYLAGAKYTGYLCRSNTVLICKEPTGLKYEKAKEWRIPCVNAQWLGDILLGNFEALRQIQYSRYTAFSLQDPFAPTQHLVLNLLDAWRVPLKVSAELLMSIRLPPKLKQNEVANVQPSSKRARIEDVPPPTKKLTPELTPFVLFTGFEPVQVQQYIKKLYILGGEVAESAQKCTHLIASKVTRTVKFLTAISVVKHIVTPEWLEECFRCQKFIDEQNYILRDAEAEVLFSFSLEESLKRAHVSPLFKAKYFYITPGICPSLSTMKAIVECAGGKVLSKQPSFRKLMEHKQNSSLSEIILISCENDLHLCREYFARGIDVHNAEFVLTGVLTQTLDYESYKFN

SEQ ID NO: 7124 - protein, 154 aa, Homo sapiens
MPSRTARYARYSPRQRRRRMLADRSVRFPNDVLFLDHIRQGDLEQVGRFIRTRKVSLATIHPSGLAALHEAVLSGNLECVKLLVKYGADIHQRDEAGWTPLHIACSDGYPDIARYLISLGADRDATNDDGDLPSDLIDPDYKELVELFKGTTMD

SEQ ID NO: 7125 - protein, 480 aa, Homo sapiens
MIRAAPPPLFLLLLLLLLLVSWASRGEAAPDQDEIQRLPGLAKQPSFRQYSGYLKGSGSKHLHYWFVESQKDPENSPVVLWLNGGPGCSSLDGLLTEHGPFLVQPDGVTLEYNPYSWNLIANVLYLESPAGVGFSYSDDKFYATNDTEVAQSNFEALQDFFRLFPEYKNNKLFLTGESYAGIYIPTLAVLVMQDPSMNLQGLAVGNGLSSYEQNDNSLVYFAYYHGLLGNRLWSSLQTHCCSQNKCNFYDNKDLECVTNLQEVARIVGNSGLNIYNLYAPCAGGVPSHFRYEKDTVVVQDLGNIFTRLPLKRMWHQALLRSGDKVRMDPPCTNTTAASTYLNNPYVRKALNIPEQLPQWDMCNFLVNLQYRRLYRSMNSQYLKLLSSQKYQILLYNGDVDMACNFMGDEWFVDSLNQKMEVQRRPWLVKYGDSGEQIAGFVKEFSHIAFLTIKGAGHMVPTDKPLAAFTMFSRFLNKQPY

SEQ ID NO: 7126 - protein, 463 aa, Homo sapiens
MIRAAPPPLFLLLLLLLLLVSWASRGEAAPDQDEIQRLPGLAKQPSFRQYSGYLKGSGSKHLHYWFVESQKDPENSPVVLWLNGGPGCSSLDGLLTEHGPFLIANVLYLESPAGVGFSYSDDKFYATNDTEVAQSNFEALQDFFRLFPEYKNNKLFLTGESYAGIYIPTLAVLVMQDPSMNLQGLAVGNGLSSYEQNDNSLVYFAYYHGLLGNRLWSSLQTHCCSQNKCNFYDNKDLECVTNLQEVARIVGNSGLNIYNLYAPCAGGVPSHFRYEKDTVVVQDLGNIFTRLPLKRMWHQALLRSGDKVRMDPPCTNTTAASTYLNNPYVRKALNIPEQLPQWDMCNFLVNLQYRRLYRSMNSQYLKLLSSQKYQILLYNGDVDMACNFMGDEWFVDSLNQKMEVQRRPWLVKYGDSGEQIAGFVKEFSHIAFLTIKGAGHMVPTDKPLAAFTMFSRFLNKQPY

SEQ ID NO: 7127 - protein, 171 aa, Homo sapiens
MEQDNSPRKIQFTVPLLEPHLDPEAAEQIRRRRPTPATLVLTSDQSSPEIDEDRIPNPHLKSTLAMSPRQRKKMTRITPTMKELQMMVEHHLGQQQQGEEPEGAAESTETQESRPPGIPDTEVESRLGTSGTAKKTAECIPKTHERGSKEPSTKEPSTHIPPLDSKGANSV

SEQ ID NO: 7128 - protein, 873 aa, Homo sapiens
MHPPPPAAAMDFSQNSLFGYMEDLQELTIIERPVRRSLKTPEEIERLTVDEDLSDIERAVYLLSAGQDVQGTSVIANLPFLMRQNPTETLRRVLPKVREALHVAGVEMQLTAAMSFLTILQDESVSIHAYTHSFLQVILLHLEHRDTGVSNAWLETLLSVIEVLPKETLRHEILNPLVSKAQLSQTVQSRLVSCKILGKLTNKFDAHTIKREILPLVKSLCQDVEYEVRSCMCRQLENIAQGIGTELTKSVVLPELIELSRDEGSSVRLAAFETLVNLLDIFDTDDRSQTILPLVKSFCEKSFKADESILISLSFHLGKLCHGLYGIFTPDQHLRFLEFYKKLCTLGLQQENGHNENQIPPQILEQEKKYISVRKNCAYNFPAMIVFVDPKNFHMELYSTFFCLCHDPEVPVRYTIAICFYEVSKLLNSGVYLIHKELITLLQDESLEVLDALIDHLPEILELMSTGGESSVQENKLSSLPDLIPALTAAEQRAAASLKWRTHEKLLQKYACLPHVISSDQIYYRFLQRMFTIMMTNNVLPVQKAASRTLCIFLRYNRKQEQRHEVIQKLIEQLGQGKSYWNRLRFLDTCEFIIEIFSKSFFCKYFFLPAIELTHDPVANVRMKLCYLLPKVKSTLKIPADKHLLQQLEMCVRKLLCQEKDKDVLAIVKRTVLELDRMEMSMDAFQKKFYEKDLLDQEKEREELLLLEMEQLEKEKQQNDGRPMSDKMFEKKRRDTKTPTQSLPKNIPISVPGPSSVTPSTSKEIKKSKLIRSQSFNNQAFHAKYGNLEKCASKSSTTGYTTSVSGLGKTSVLSLADDSFRTRNASSVPSSFSPNTPLPSTSRGTGNSVDPKSSGSKDTQPRKATLKSRKSNP

SEQ ID NO: 7129 - protein, 120 aa, Homo sapiens
MHPPPPAAAMDFSQNSLFGYMEDLQELTIIERPVRRSLKTPEEIERLTVDEDLSDIERAVYLLSAGQDVQGTSVIANLPFLMRQNPTETLRRVLPKVRVHEDAHLFIQRVWISHMFVQRV

SEQ ID NO: 7130 - protein, 419 aa, Homo sapiens
MGTLSAPPCTQRIKWKGLLLTASLLNFWNLPTTAQVTIEAEPTKVSEGKDVLLLVHNLPQNLTGYIWYKGQMRDLYHYITSYVVDGEIIIYGPAYSGRETAYSNASLLIQNVTREDAGSYTLHIIKGDDGTRGVTGRFTFTLHLETPKPSISSSNLNPRETMEAVSLTCDPETPDASYLWWMNGQSLPMTHSLKLSETNRTLFLLGVTKYTAGPYECEIRNPVSASRSDPVTLNLLPKLPKPYITINNLNPRENKDVLNFTCEPKSENYTYIWWLNGQSLPVSPRVKRPIENRILILPSVTRNETGPYQCEIRDRYGGIRSDPVTLNVLYGPDLPRIYPSFTYYRSGEVLYLSCSADSNPPAQYSWTINEKFQLPGQKLFIRHITTKHSGLYVCSVRNSATGKESSKSMTVEVSDWTVP

SEQ ID NO: 7131 - protein, 428 aa, Homo sapiens
MGTLSAPPCTQRIKWKGLLLTASLLNFWNLPTTAQVTIEAEPTKVSEGKDVLLLVHNLPQNLTGYIWYKGQMRDLYHYITSYVVDGEIIIYGPAYSGRETAYSNASLLIQNVTREDAGSYTLHIIKGDDGTRGVTGRFTFTLHLETPKPSISSSNLNPRETMEAVSLTCDPETPDASYLWWMNGQSLPMTHSLKLSETNRTLFLLGVTKYTAGPYECEIRNPVSASRSDPVTLNLLPKLPKPYITINNLNPRENKDVLNFTCEPKSENYTYIWWLNGQSLPVSPRVKRPIENRILILPSVTRNETGPYQCEIRDRYGGIRSDPVTLNVLYGPDLPRIYPSFTYYRSGEVLYLSCSADSNPPAQYSWTINEKFQLPGQKLFIRHITTKHSGLYVCSVRNSATGKESSKSMTVEVSAYSSSINYTSGNRN

SEQ ID NO: 7132 - protein, 417 aa, Homo sapiens
MGTLSAPPCTQRIKWKGLLLTASLLNFWNLPTTAQVTIEAEPTKVSEGKDVLLLVHNLPQNLTGYIWYKGQMRDLYHYITSYVVDGEIIIYGPAYSGRETAYSNASLLIQNVTREDAGSYTLHIIKGDDGTRGVTGRFTFTLHLETPKPSISSSNLNPRETMEAVSLTCDPETPDASYLWWMNGQSLPMTHSLKLSETNRTLFLLGVTKYTAGPYECEIRNPVSASRSDPVTLNLLPKLPKPYITINNLNPRENKDVLNFTCEPKSENYTYIWWLNGQSLPVSPRVKRPIENRILILPSVTRNETGPYQCEIRDRYGGIRSDPVTLNVLYGPDLPRIYPSFTYYRSGEVLYLSCSADSNPPAQYSWTINEKFQLPGQKLFIRHITTKHSGLYVCSVRNSATGKESSKSMTVEVSEAL

SEQ ID NO: 7133 - protein, 426 aa, Homo sapiens
MGTLSAPPCTQRIKWKGLLLTASLLNFWNLPTTAQVTIEAEPTKVSEGKDVLLLVHNLPQNLTGYIWYKGQMRDLYHYITSYVVDGEIIIYGPAYSGRETAYSNASLLIQNVTREDAGSYTLHIIKGDDGTRGVTGRFTFTLHLETPKPSISSSNLNPRETMEAVSLTCDPETPDASYLWWMNGQSLPMTHSLKLSETNRTLFLLGVTKYTAGPYECEIRNPVSASRSDPVTLNLLPKLPKPYITINNLNPRENKDVLNFTCEPKSENYTYIWWLNGQSLPVSPRVKRPIENRILILPSVTRNETGPYQCEIRDRYGGIRSDPVTLNVLYGPDLPRIYPSFTYYRSGEVLYLSCSADSNPPAQYSWTINEKFQLPGQKLFIRHITTKHSGLYVCSVRNSATGKESSKSMTVEVSGKWIPASLAIGF

SEQ ID NO: 7134 - protein, 1912 aa, Homo sapiens
MVHVARLLLLLLTFFLRTDAETPPRFTRTPVDQTGVSGGVASFICQATGDPRPKIVWNKKGKKVSNQRFEVIEFDDGSGSVLRIQPLRTPRDEAIYECVASNNVGEISVSTRLTVLREDQIPRGFPTIDMGPQLKVVERTRTATMLCAASGNPDPEITWFKDFLPVDTSNNNGRIKQLRSESIGGTPIRGALQIEQSEESDQGKYECVATNSAGTRYSAPANLYVRELREVRRVPPRFSIPPTNHEIMPGGSVNITCVAVGSPMPYVKWMLGAEDLTPEDDMPIGRNVLELNDVRQSANYTCVAMSTLGVIEAIAQITVKALPKPPGTPVVTESTATSITLTWDSGNPEPVSYYIIQHKPKNSEELYKEIDGVATTRYSVAGLSPYSDYEFRVVAVNNIGRGPPSEPVLTQTSEQAPSSAPRDVQARMLSSTTILVQWKEPEEPNGQIQGYRVYYTMDPTQHVNNWMKHNVADSQITTIGNLVPQKTYSVKVLAFTSIGDGPLSSDIQVITQTGVPGQPLNFKAEPESETSILLSWTPPRSDTIANYELVYKDGEHGEEQRITIEPGTSYRLQGLKPNSLYYFRLAARSPQGLGASTAEISARTMQSKPSAPPQDISCTSPSSTSILVSWQPPPVEKQNGIITEYSIKYTAVDGEDDKPHEILGIPSDTTKYLLEQLEKWTEYRITVTAHTDVGPGPESLSVLIRTNEDVPSGPPRKVEVEAVNSTSVKVSWRSPVPNKQHGQIRGYQVHYVRMENGEPKGQPMLKDVMLADAQWEFDDTTEHDMIISGLQPETSYSLTVTAYTTKGDGARSKPKLVSTTGAVPGKPRLVINHTQMNTALIQWHPPVDTFGPLQGYRLKFGRKDMEPLTTLEFSEKEDHFTATDIHKGASYVFRLSARNKVGFGEEMVKEISIPEEVPTGFPQNLHSEGTTSTSVQLSWQPPVLAERNGIITKYTLLYRDINIPLLPMEQLIVPADTTMTLTGLKPDTTYDVKVRAHTSKGPGPYSPSVQFRTLPVDQVFAKNFHVKAVMKTSVLLSWEIPENYNSAMPFKILYDDGKMVEEVDGRATQKLIVNLKPEKSYSFVLTNRGNSAGGLQHRVTAKTAPDVLRTKPAFIGKTNLDGMITVQLPEVPANENIKGYYIIIVPLKKSRGKFIKPWESPDEMELDELLKEISRKRRSIRYGREVELKPYIAAHFDVLPTEFTLGDDKHYGGFTNKQLQSGQEYVFFVLAVMEHAESKMYATSPYSDPVVSMDLDPQPITDEEEGLIWVVGPVLAVVFIICIVIAILLYKRKRAESDSRKSSIPNNKEIPSHHPTDPVELRRLNFQTPGMASHPPIPILELADHIERLKANDNLKFSQEYESIDPGQQFTWEHSNLEVNKPKNRYANVIAYDHSRVLLSAIEGIPGSDYVNANYIDGYRKQNAYIATQGSLPETFGDFWRMIWEQRSATVVMMTKLEERSRVKCDQYWPSRGTETHGLVQVTLLDTVELATYCVRTFALYKNGSSEKREVRQFQFTAWPDHGVPEHPTPFLAFLRRVKTCNPPDAGPMVVHCSAGVGRTGCFIVIDAMLERIKHEKTVDIYGHVTLMRAQRNYMVQTEDQYIFIHDALLEAVTCGNTEVPARNLYAYIQKLTQIETGENVTGMELEFKRLASSKAHTSRFISANLPCNKFKNRLVNIMPYESTRVCLQPIRGVEGSDYINASFIDGYRQQKAYIATQGPLAETTEDFWRMLWEHNSTIVVMLTKLREMGREKCHQYWPAERSARYQYFVVDPMAEYNMPQYILREFKVTDARDGQSRTVRQFQFTDWPEQGVPKSGEGFIDFIGQVHKTKEQFGQDGPISVHCSAGVGRTGVFITLSIVLERMRYEGVVDIFQTVKMLRTQRPAMVQTEDQYQFSYRAALEYLGSFDHYAT

SEQ ID NO: 7135 - protein, 1890 aa, Homo sapiens
MVHVARLLLLLLTFFLRTDAETPPRFTRTPVDQTGVSGGVASFICQATGDPRPKIVWNKKGKKVSNQRFEVIEFDDGSGSVLRIQPLRTPRDEAIYECVASNNVGEISVSTRLTVLREDQIPRGFPTIDMGPQLKVVERTRTATMLCAASGNPDPEITWFKDFLPVDTSNNNGRIKQLRSGALQIEQSEESDQGKYECVATNSAGTRYSAPANLYVEVRRVPPRFSIPPTNHEIMPGGSVNITCVAVGSPMPYVKWMLGAEDLTPEDDMPIGRNVLELNDVRQSANYTCVAMSTLGVIEAIAQITVKALPKPPGTPVVTESTATSITLTWDSGNPEPVSYYIIQHKPKNSEELYKEIDGVATTRYSVAGLSPYSDYEFRVVAVNNIGRGPPSEPVLTQTSEQAPSSAPRDVQARMLSSTTILVQWKEPEEPNGQIQGYRVYYTMDPTQHVNNWMKHNVADSQITTIGNLVPQKTYSVKVLAFTSIGDGPLSSDIQVITQTGVPGQPLNFKAEPESETSILLSWTPPRSDTIANYELVYKDGEHGEEQRITIEPGTSYRLQGLKPNSLYYFRLAARSPQGLGASTAEISARTMQSKPSAPPQDISCTSPSSTSILVSWQPPPVEKQNGIITEYSIKYTAVDGEDDKPHEILGIPSDTTKYLLEQLEKWTEYRITVTAHTDVGPGPESLSVLIRTNEDVPSGPPRKVEVEAVNSTSVKVSWRSPVPNKQHGQIRGYQVHYVRMENGEPKGQPMLKDVMLADAQDMIISGLQPETSYSLTVTAYTTKGDGARSKPKLVSTTGAVPGKPRLVINHTQMNTALIQWHPPVDTFGPLQGYRLKFGRKDMEPLTTLEFSEKEDHFTATDIHKGASYVFRLSARNKVGFGEEMVKEISIPEEVPTGFPQNLHSEGTTSTSVQLSWQPPVLAERNGIITKYTLLYRDINIPLLPMEQLIVPADTTMTLTGLKPDTTYDVKVRAHTSKGPGPYSPSVQFRTLPVDQVFAKNFHVKAVMKTSVLLSWEIPENYNSAMPFKILYDDGKMVEEVDGRATQKLIVNLKPEKSYSFVLTNRGNSAGGLQHRVTAKTAPDVLRTKPAFIGKTNLDGMITVQLPEVPANENIKGYYIIIVPLKKSRGKFIKPWESPDEMELDELLKEISRKRRSIRYGREVELKPYIAAHFDVLPTEFTLGDDKHYGGFTNKQLQSGQEYVFFVLAVMEHAESKMYATSPYSDPVVSMDLDPQPITDEEEGLIWVVGPVLAVVFIICIVIAILLYKRKRAESDSRKSSIPNNKEIPSHHPTDPVELRRLNFQTPGMASHPPIPILELADHIERLKANDNLKFSQEYESIDPGQQFTWEHSNLEVNKPKNRYANVIAYDHSRVLLSAIEGIPGSDYVNANYIDGYRKQNAYIATQGSLPETFGDFWRMIWEQRSATVVMMTKLEERSRVKCDQYWPSRGTETHGLVQVTLLDTVELATYCVRTFALYKNGSSEKREVRQFQFTAWPDHGVPEHPTPFLAFLRRVKTCNPPDAGPMVVHCSAGVGRTGCFIVIDAMLERIKHEKTVDIYGHVTLMRAQRNYMVQTEDQYIFIHDALLEAVTCGNTEVPARNLYAYIQKLTQIETGENVTGMELEFKRLASSKAHTSRFISANLPCNKFKNRLVNIMPYESTRVCLQPIRGVEGSDYINASFIDGYRQQKAYIATQGPLAETTEDFWRMLWEHNSTIVVMLTKLREMGREKCHQYWPAERSARYQYFVVDPMAEYNMPQYILREFKVTDARDGQSRTVRQFQFTDWPEQGVPKSGEGFIDFIGQVHKTKEQFGQDGPISVHCSAGVGRTGVFITLSIVLERMRYEGVVDIFQTVKMLRTQRPAMVQTEDQYQFSYRAALEYLGSFDHYAT

SEQ ID NO: 7136 - protein, 1383 aa, Homo sapiens
MVHVARLLLLLLTFFLRTDAETPPRFTRTPVDQTGVSGGVASFICQATGDPRPKIVWNKKGKKVSNQRFEVIEFDDGSGSVLRIQPLRTPRDEAIYECVASNNVGEISVSTRLTVLREDQIPRGFPTIDMGPQLKVVERTRTATMLCAASGNPDPEITWFKDFLPVDTSNNNGRIKQLRSESIGGTPIRGALQIEQSEESDQGKYECVATNSAGTRYSAPANLYVRELREVRRVPPRFSIPPTNHEIMPGGSVNITCVAVGSPMPYVKWMLGAEDLTPEDDMPIGRNVLELNDVRQSANYTCVAMSTLGVIEAIAQITVKALPKPPGTPVVTESTATSITLTWDSGNPEPVSYYIIQHKPKNSEELYKEIDGVATTRYSVAGLSPYSDYEFRVVAVNNIGRGPPSEPVLTQTSEQAPSSAPRDVQARMLSSTTILVQWKEPEEPNGQIQGYRVYYTMDPTQHVNNWMKHNVADSQITTIGNLVPQKTYSVKVLAFTSIGDGPLSSDIQVITQTGVPGQPLNFKAEPESETSILLSWTPPRSDTIANYELVYKDGEHGEEQRITIEPGTSYRLQGLKPNSLYYFRLAARSPQGLGASTAEISARTMQSKKGYYIIIVPLKKSRGKFIKPWESPDEMELDELLKEISRKRRSIRYGREVELKPYIAAHFDVLPTEFTLGDDKHYGGFTNKQLQSGQEYVFFVLAVMEHAESKMYATSPYSDPVVSMDLDPQPITDEEEGLIWVVGPVLAVVFIICIVIAILLYKRKRAESDSRKSSIPNNKEIPSHHPTDPVELRRLNFQTPGMASHPPIPILELADHIERLKANDNLKFSQEYESIDPGQQFTWEHSNLEVNKPKNRYANVIAYDHSRVLLSAIEGIPGSDYVNANYIDGYRKQNAYIATQGSLPETFGDFWRMIWEQRSATVVMMTKLEERSRVKCDQYWPSRGTETHGLVQVTLLDTVELATYCVRTFALYKNGSSEKREVRQFQFTAWPDHGVPEHPTPFLAFLRRVKTCNPPDAGPMVVHCSAGVGRTGCFIVIDAMLERIKHEKTVDIYGHVTLMRAQRNYMVQTEDQYIFIHDALLEAVTCGNTEVPARNLYAYIQKLTQIETGENVTGMELEFKRLASSKAHTSRFISANLPCNKFKNRLVNIMPYESTRVCLQPIRGVEGSDYINASFIDGYRQQKAYIATQGPLAETTEDFWRMLWEHNSTIVVMLTKLREMGREKCHQYWPAERSARYQYFVVDPMAEYNMPQYILREFKVTDARDGQSRTVRQFQFTDWPEQGVPKSGEGFIDFIGQVHKTKEQFGQDGPISVHCSAGVGRTGVFITLSIVLERMRYEGVVDIFQTVKMLRTQRPAMVQTEDQYQFSYRAALEYLGSFDHYAT

SEQ ID NO: 7137 - protein, 1505 aa, Homo sapiens
MVHVARLLLLLLTFFLRTDAETPPRFTRTPVDQTGVSGGVASFICQATGDPRPKIVWNKKGKKVSNQRFEVIEFDDGSGSVLRIQPLRTPRDEAIYECVASNNVGEISVSTRLTVLREDQIPRGFPTIDMGPQLKVVERTRTATMLCAASGNPDPEITWFKDFLPVDTSNNNGRIKQLRSESIGALQIEQSEESDQGKYECVATNSAGTRYSAPANLYVRVRRVPPRFSIPPTNHEIMPGGSVNITCVAVGSPMPYVKWMLGAEDLTPEDDMPIGRNVLELNDVRQSANYTCVAMSTLGVIEAIAQITVKALPKPPGTPVVTESTATSITLTWDSGNPEPVSYYIIQHKPKNSEELYKEIDGVATTRYSVAGLSPYSDYEFRVVAVNNIGRGPPSEPVLTQTSEQAPSSAPRDVQARMLSSTTILVQWKEPEEPNGQIQGYRVYYTMDPTQHVNNWMKHNVADSQITTIGNLVPQKTYSVKVLAFTSIGDGPLSSDIQVITQTGVPGQPLNFKAEPESETSILLSWTPPRSDTIANYELVYKDGEHGEEQRITIEPGTSYRLQGLKPNSLYYFRLAARSPQGLGASTAEISARTMQSMFAKNFHVKAVMKTSVLLSWEIPENYNSAMPFKILYDDGKMVEEVDGRATQKLIVNLKPEKSYSFVLTNRGNSAGGLQHRVTAKTAPDVLRTKPAFIGKTNLDGMITVQLPEVPANENIKGYYIIIVPLKKSRGKFIKPWESPDEMELDELLKEISRKRRSIRYGREVELKPYIAAHFDVLPTEFTLGDDKHYGGFTNKQLQSGQEYVFFVLAVMEHAESKMYATSPYSDPVVSMDLDPQPITDEEEGLIWVVGPVLAVVFIICIVIAILLYKRKRAESDSRKSSIPNNKEIPSHHPTDPVELRRLNFQTPGSDDSGYPGNLHSSSMASHPPIPILELADHIERLKANDNLKFSQEYESIDPGQQFTWEHSNLEVNKPKNRYANVIAYDHSRVLLSAIEGIPGSDYVNANYIDGYRKQNAYIATQGSLPETFGDFWRMIWEQRSATVVMMTKLEERSRVKCDQYWPSRGTETHGLVQVTLLDTVELATYCVRTFALYKNGSSEKREVRQFQFTAWPDHGVPEHPTPFLAFLRRVKTCNPPDAGPMVVHCSAGVGRTGCFIVIDAMLERIKHEKTVDIYGHVTLMRAQRNYMVQTEDQYIFIHDALLEAVTCGNTEVPARNLYAYIQKLTQIETGENVTGMELEFKRLASSKAHTSRFISANLPCNKFKNRLVNIMPYESTRVCLQPIRGVEGSDYINASFIDGYRQQKAYIATQGPLAETTEDFWRMLWEHNSTIVVMLTKLREMGREKCHQYWPAERSARYQYFVVDPMAEYNMPQYILREFKVTDARDGQSRTVRQFQFTDWPEQGVPKSGEGFIDFIGQVHKTKEQFGQDGPISVHCSAGVGRTGVFITLSIVLERMRYEGVVDIFQTVKMLRTQRPAMVQTEDQYQFSYRAALEYLGSFDHYAT

SEQ ID NO: 7138 - protein, 1505 aa, Homo sapiens
MVHVARLLLLLLTFFLRTDAETPPRFTRTPVDQTGVSGGVASFICQATGDPRPKIVWNKKGKKVSNQRFEVIEFDDGSGSVLRIQPLRTPRDEAIYECVASNNVGEISVSTRLTVLREDQIPRGFPTIDMGPQLKVVERTRTATMLCAASGNPDPEITWFKDFLPVDTSNNNGRIKQLRSESIGGTPIRGALQIEQSEESDQGKYECVATNSAGTRYSAPANLYVRELREVRRVPPRFSIPPTNHEIMPGGSVNITCVAVGSPMPYVKWMLGAEDLTPEDDMPIGRNVLELNDVRQSANYTCVAMSTLGVIEAIAQITVKALPKPPGTPVVTESTATSITLTWDSGNPEPVSYYIIQHKPKNSEELYKEIDGVATTRYSVAGLSPYSDYEFRVVAVNNIGRGPPSEPVLTQTSEQAPSSAPRDVQARMLSSTTILVQWKEPEEPNGQIQGYRVYYTMDPTQHVNNWMKHNVADSQITTIGNLVPQKTYSVKVLAFTSIGDGPLSSDIQVITQTGVPGQPLNFKAEPESETSILLSWTPPRSDTIANYELVYKDGEHGEEQRITIEPGTSYRLQGLKPNSLYYFRLAARSPQGLGASTAEISARTMQSMFAKNFHVKAVMKTSVLLSWEIPENYNSAMPFKILYDDGKMVEEVDGRATQKLIVNLKPEKSYSFVLTNRGNSAGGLQHRVTAKTAPDVLRTKPAFIGKTNLDGMITVQLPEVPANENIKGYYIIIVPLKKSRGKFIKPWESPDEMELDELLKEISRKRRSIRYGREVELKPYIAAHFDVLPTEFTLGDDKHYGGFTNKQLQSGQEYVFFVLAVMEHAESKMYATSPYSDPVVSMDLDPQPITDEEEGLIWVVGPVLAVVFIICIVIAILLYKSKPDRKRAESDSRKSSIPNNKEIPSHHPTDPVELRRLNFQTPGMASHPPIPILELADHIERLKANDNLKFSQEYESIDPGQQFTWEHSNLEVNKPKNRYANVIAYDHSRVLLSAIEGIPGSDYVNANYIDGYRKQNAYIATQGSLPETFGDFWRMIWEQRSATVVMMTKLEERSRVKCDQYWPSRGTETHGLVQVTLLDTVELATYCVRTFALYKNGSSEKREVRQFQFTAWPDHGVPEHPTPFLAFLRRVKTCNPPDAGPMVVHCSAGVGRTGCFIVIDAMLERIKHEKTVDIYGHVTLMRAQRNYMVQTEDQYIFIHDALLEAVTCGNTEVPARNLYAYIQKLTQIETGENVTGMELEFKRLASSKAHTSRFISANLPCNKFKNRLVNIMPYESTRVCLQPIRGVEGSDYINASFIDGYRQQKAYIATQGPLAETTEDFWRMLWEHNSTIVVMLTKLREMGREKCHQYWPAERSARYQYFVVDPMAEYNMPQYILREFKVTDARDGQSRTVRQFQFTDWPEQGVPKSGEGFIDFIGQVHKTKEQFGQDGPISVHCSAGVGRTGVFITLSIVLERMRYEGVVDIFQTVKMLRTQRPAMVQTEDQYQFSYRAALEYLGSFDHYAT

SEQ ID NO: 7139 - protein, 1506 aa, Homo sapiens
MVHVARLLLLLLTFFLRTDAETPPRFTRTPVDQTGVSGGVASFICQATGDPRPKIVWNKKGKKVSNQRFEVIEFDDGSGSVLRIQPLRTPRDEAIYECVASNNVGEISVSTRLTVLREDQIPRGFPTIDMGPQLKVVERTRTATMLCAASGNPDPEITWFKDFLPVDTSNNNGRIKQLRSESIGGTPIRGALQIEQSEESDQGKYECVATNSAGTRYSAPANLYVRELREVRRVPPRFSIPPTNHEIMPGGSVNITCVAVGSPMPYVKWMLGAEDLTPEDDMPIGRNVLELNDVRQSANYTCVAMSTLGVIEAIAQITVKALPKPPGTPVVTESTATSITLTWDSGNPEPVSYYIIQHKPKNSEELYKEIDGVATTRYSVAGLSPYSDYEFRVVAVNNIGRGPPSEPVLTQTSEQAPSSAPRDVQARMLSSTTILVQWKEPEEPNGQIQGYRVYYTMDPTQHVNNWMKHNVADSQITTIGNLVPQKTYSVKVLAFTSIGDGPLSSDIQVITQTGVPGQPLNFKAEPESETSILLSWTPPRSDTIANYELVYKDGEHGEEQRITIEPGTSYRLQGLKPNSLYYFRLAARSPQGLGASTAEISARTMQSMFAKNFHVKAVMKTSVLLSWEIPENYNSAMPFKILYDDGKMVEEVDGRATQKLIVNLKPEKSYSFVLTNRGNSAGGLQHRVTAKTAPDVLRTKPAFIGKTNLDGMITVQLPEVPANENIKGYYIIIVPLKKSRGKFIKPWESPDEMELDELLKEISRKRRSIRYGREVELKPYIAAHFDVLPTEFTLGDDKHYGGFTNKQLQSGQEYVFFVLAVMEHAESKMYATSPYSDPVVSMDLDPQPITDEEEGLIWVVGPVLAVVFIICIVIAILLYKSSKPDRKRAESDSRKSSIPNNKEIPSHHPTDPVELRRLNFQTPGMASHPPIPILELADHIERLKANDNLKFSQEYESIDPGQQFTWEHSNLEVNKPKNRYANVIAYDHSRVLLSAIEGIPGSDYVNANYIDGYRKQNAYIATQGSLPETFGDFWRMIWEQRSATVVMMTKLEERSRVKCDQYWPSRGTETHGLVQVTLLDTVELATYCVRTFALYKNGSSEKREVRQFQFTAWPDHGVPEHPTPFLAFLRRVKTCNPPDAGPMVVHCSAGVGRTGCFIVIDAMLERIKHEKTVDIYGHVTLMRAQRNYMVQTEDQYIFIHDALLEAVTCGNTEVPARNLYAYIQKLTQIETGENVTGMELEFKRLASSKAHTSRFISANLPCNKFKNRLVNIMPYESTRVCLQPIRGVEGSDYINASFIDGYRQQKAYIATQGPLAETTEDFWRMLWEHNSTIVVMLTKLREMGREKCHQYWPAERSARYQYFVVDPMAEYNMPQYILREFKVTDARDGQSRTVRQFQFTDWPEQGVPKSGEGFIDFIGQVHKTKEQFGQDGPISVHCSAGVGRTGVFITLSIVLERMRYEGVVDIFQTVKMLRTQRPAMVQTEDQYQFSYRAALEYLGSFDHYAT

SEQ ID NO: 7140 - protein, 1502 aa, Homo sapiens
MVHVARLLLLLLTFFLRTDAETPPRFTRTPVDQTGVSGGVASFICQATGDPRPKIVWNKKGKKVSNQRFEVIEFDDGSGSVLRIQPLRTPRDEAIYECVASNNVGEISVSTRLTVLREDQIPRGFPTIDMGPQLKVVERTRTATMLCAASGNPDPEITWFKDFLPVDTSNNNGRIKQLRSGGTPIRGALQIEQSEESDQGKYECVATNSAGTRYSAPANLYVRELREVRRVPPRFSIPPTNHEIMPGGSVNITCVAVGSPMPYVKWMLGAEDLTPEDDMPIGRNVLELNDVRQSANYTCVAMSTLGVIEAIAQITVKALPKPPGTPVVTESTATSITLTWDSGNPEPVSYYIIQHKPKNSEELYKEIDGVATTRYSVAGLSPYSDYEFRVVAVNNIGRGPPSEPVLTQTSEQAPSSAPRDVQARMLSSTTILVQWKEPEEPNGQIQGYRVYYTMDPTQHVNNWMKHNVADSQITTIGNLVPQKTYSVKVLAFTSIGDGPLSSDIQVITQTGVPGQPLNFKAEPESETSILLSWTPPRSDTIANYELVYKDGEHGEEQRITIEPGTSYRLQGLKPNSLYYFRLAARSPQGLGASTAEISARTMQSMFAKNFHVKAVMKTSVLLSWEIPENYNSAMPFKILYDDGKMVEEVDGRATQKLIVNLKPEKSYSFVLTNRGNSAGGLQHRVTAKTAPDVLRTKPAFIGKTNLDGMITVQLPEVPANENIKGYYIIIVPLKKSRGKFIKPWESPDEMELDELLKEISRKRRSIRYGREVELKPYIAAHFDVLPTEFTLGDDKHYGGFTNKQLQSGQEYVFFVLAVMEHAESKMYATSPYSDPVVSMDLDPQPITDEEEGLIWVVGPVLAVVFIICIVIAILLYKSKPDRKRAESDSRKSSIPNNKEIPSHHPTDPVELRRLNFQTPGMASHPPIPILELADHIERLKANDNLKFSQEYESIDPGQQFTWEHSNLEVNKPKNRYANVIAYDHSRVLLSAIEGIPGSDYVNANYIDGYRKQNAYIATQGSLPETFGDFWRMIWEQRSATVVMMTKLEERSRVKCDQYWPSRGTETHGLVQVTLLDTVELATYCVRTFALYKNGSSEKREVRQFQFTAWPDHGVPEHPTPFLAFLRRVKTCNPPDAGPMVVHCSAGVGRTGCFIVIDAMLERIKHEKTVDIYGHVTLMRAQRNYMVQTEDQYIFIHDALLEAVTCGNTEVPARNLYAYIQKLTQIETGENVTGMELEFKRLASSKAHTSRFISANLPCNKFKNRLVNIMPYESTRVCLQPIRGVEGSDYINASFIDGYRQQKAYIATQGPLAETTEDFWRMLWEHNSTIVVMLTKLREMGREKCHQYWPAERSARYQYFVVDPMAEYNMPQYILREFKVTDARDGQSRTVRQFQFTDWPEQGVPKSGEGFIDFIGQVHKTKEQFGQDGPISVHCSAGVGRTGVFITLSIVLERMRYEGVVDIFQTVKMLRTQRPAMVQTEDQYQFSYRAALEYLGSFDHYAT

SEQ ID NO: 7141 - protein, 888 aa, Homo sapiens
MLRQVLHRGLRTCFSRLGHFIASHPVFFASAPVLISILLGASFSRYQVEESVEHLLAPQHSLAKIERNLVNSLFPVNRSKHRLYSDLQTPGRYGRVIVTSFQKANMLDQHHTDLILKLHAAVTKIQVPRPGFNYTFAHICILNNDKTCIVDDIVHVLEELKNARATNRTNFAITYPITHLKDGRAVYNGHQLGGVTVHSKDRVKSAEAIQLTYYLQSINSLNDMVAERWESSFCDTVRLFQKSNSKVKMYPYTSSSLREDFQKTSRVSERYLVTSLILVVTMAILCCSMQDCVRSKPWLGLLGLVTISLATLTAAGIINLTGGKYNSTFLGVPFVMLGHGLYGTFEMLSSWRKTREDQHVKERTAAVYADSMLSFSLTTAMYLVTFGIGASPFTNIEAARIFCCNSCIAIFFNYLYVLSFYGSSLVFTGYIENNYQHSIFCRKVPKPEALQEKPAWYRFLLTARFSEDTAEGEEANTYESHLLVCFLKRYYCDWITNTYVKPFVVLFYLIYISFALMGYLQVSEGSDLSNIVATATQTIEYTTAQQKYFSNYSPVIGFYIYESIEYWNTSVQEDVLEYTKGFVRISWFESYLNYLRKLNVSTGLPKKNFTDMLRNSFLKAPQFSHFQEDIIFSKKYNDEVDVVASRMFLVAKTMETNREELYDLLETLRRLSVTSKVKFIVFNPSFVYMDRYASSLGAPLHNSCISALFLLFFSAFLVADSLINVWITLTVVSVEFGVIGFMTLWKVELDCISVLCLIYGINYTIDNCAPMLSTFVLGKDFTRTKWVKNALEVHGVAILQSYLCYIVGLIPLAAVPSNLTCTLFRCLFLIAFVTFFHCFAILPVILTFLPPSKKKRKEKKNPENREEIECVEMVDIDSTRVVDQITTV

SEQ ID NO: 7142 - protein, 783 aa, Homo sapiens
MLDQHHTDLILKLHAAVTKIQVPRPGFNYTFAHICILNNDKTCIVDDIVHVLEELKNARATNRTNFAITYPITHLKDGRAVYNGHQLGGVTVHSKDRVKSAEAIQLTYYLQSINSLNDMVAERWESSFCDTVRLFQKSNSKVKMYPYTSSSLREDFQKTSRVSERYLVTSLILVVTMAILCCSMQDCVRSKPWLGLLGLVTISLATLTAAGIINLTGGKYNSTFLGVPFVMLGHGLYGTFEMLSSWRKTREDQHVKERTAAVYADSMLSFSLTTAMYLVTFGIGASPFTNIEAARIFCCNSCIAIFFNYLYVLSFYGSSLVFTGYIENNYQHSIFCRKVPKPEALQEKPAWYRFLLTARFSEDTAEGEEANTYESHLLVCFLKRYYCDWITNTYVKPFVVLFYLIYISFALMGYLQVSEGSDLSNIVATATQTIEYTTAQQKYFSNYSPVIGFYIYESIEYWNTSVQEDVLEYTKGFVRISWFESYLNYLRKLNVSTGLPKKNFTDMLRNSFLKAPQFSHFQEDIIFSKKYNDEVDVVASRMFLVAKTMETNREELYDLLETLRRLSVTSKVKFIVFNPSFVYMDRYASSLGAPLHNSCISALFLLFFSAFLVADSLINVWITLTVVSVEFGVIGFMTLWKVELDCISVLCLIYGINYTIDNCAPMLSTFVLGKDFTRTKWVKNALEVHGVAILQSYLCYIVGLIPLAAVPSNLTCTLFRCLFLIAFVTFFHCFAILPVILTFLPPSKKKRKEKKNPENREEIECVEMVDIDSTRVVDQITTV

SEQ ID NO: 7143 - protein, 256 aa, Homo sapiens
MLDQHHTDLILKLHAAVTKIQVPRPGFNYTFAHICILNNDKTCIVDDIVHVLEELKNARATNRTNFAITYPITHLKDGRAVYNGHQLGGVTVHSKDRVKSAEAIQLTYYLQSINSLNDMVAERWESSFCDTVRLFQKSNSKVKMYPYTSSSLREDFQKTSRVSERYLVTSLILVVTMAILCCSMQDCVRSKPWLGLLGLVTISLATLTAAGIINLTGGKYNSTFLGVPFVMLGNYYSSFFCFRLLVVLTRFLKGQE

SEQ ID NO: 7144 - protein, 529 aa, Homo sapiens
MARFPKADLAAAGVMLLCHFFTDQFQFADGKPGDQILDWQYGVTQAFPHTEEEVEVDSHAYSHRWKRNLDFLKAVDTNRASVGQDSPEPRSFTDLLLDDGQDNNTQIEEDTDHNYYISRIYGPSDSASRDLWVNIDQMEKDKVKIHGILSNTHRQAARVNLSFDFPFYGHFLREITVATGGFIYTGEVVHRMLTATQYIAPLMANFDPSVSRNSTVRYFDNGTALVVQWDHVHLQDNYNLGSFTFQATLLMDGRIIFGYKEIPVLVTQISSTNHPVKVGLSDAFVVVHRIQQIPNVRRRTIYEYHRVELQMSKITNISAVEMTPLPTCLQFNRCGPCVSSQIGFNCSWCSKLQRCSSGFDRHRQDWVDSGCPEESKEKMCENTEPVETSSRTTTTVGATTTQFRVLTTTRRAVTSQFPTSLPTEDDTKIALHLKDNGASTDDSAAEKKGGTLHAGLIIGILILVLIVATAILVTVYMYHHPTSAASIFFIERRPSRWPAMKFRRGSGHPAYAEVEPVGEKEGFIVSEQC

SEQ ID NO: 7145 - protein, 480 aa, Homo sapiens
MARFPKADLAAAGVMLLCHFFTDQFQFADGKPGDQILDWQYGVTQAFPHTEEEVEVDSHAYSHRWKRNLDFLKAVDTNRASVGQDSPEPRSFTDLLLDDGQDNNTQIERVNLSFDFPFYGHFLREITVATGGFIYTGEVVHRMLTATQYIAPLMANFDPSVSRNSTVRYFDNGTALVVQWDHVHLQDNYNLGSFTFQATLLMDGRIIFGYKEIPVLVTQISSTNHPVKVGLSDAFVVVHRIQQIPNVRRRTIYEYHRVELQMSKITNISAVEMTPLPTCLQFNRCGPCVSSQIGFNCSWCSKLQRCSSGFDRHRQDWVDSGCPEESKEKMCENTEPVETSSRTTTTVGATTTQFRVLTTTRRAVTSQFPTSLPTEDDTKIALHLKDNGASTDDSAAEKKGGTLHAGLIIGILILVLIVATAILVTVYMYHHPTSAASIFFIERRPSRWPAMKFRRGSGHPAYAEVEPVGEKEGFIVSEQC

SEQ ID NO: 7146 - protein, 151 aa, Homo sapiens
MCENTEPVETSSRTTTTVGATTTQFRVLTTTRRAVTSQFPTSLPTEDDTKIALHLKDNGASTDDSAAEKKGGTLHAGLIIGILILVLIVATAILVTVYMYHHPTSAASIFFIERRPSRWPAMKFRRGSGHPAYAEVEPVGEKEGFIVSEQC

SEQ ID NO: 7147 - protein, 292 aa, Homo sapiens
MTTTRYRPTWDLALDPLVSCKLCLGEYPVEQMTTIAQCQCIFCTLCLKQYVELLIKEGLETAISCPDAACPKQGHLQENEIECMVAAEIMQRYKKLQFEREVLFDPCRTWCPASTCQAVCQLQDVGLQTPQPVQCKACRMEFCSTCKASWHPGQGCPETMPITFLPGETSAAFKMEEDDAPIKRCPKCKVYIERDEGCAQMMCKNCKHAFCWYCLESLDDDFLLIHYDKGPCRNKLGHSRASVIWHRTQVVGIFAGFGLLLLVASPFLLLATPFVLCCKCKCSKGDDDPLPT

SEQ ID NO: 7148 - protein, 263 aa, Homo sapiens
MRRISLTSSPVRLLLFLLLLLIALEIMVGGHSLCFNFTIKSLSRPGQPWCEAQVFLNKNLFLQYNSDNNMVKPLGLLGKKVYATSTWGELTQTLGEVGRDLRMLLCDIKPQIKTSDPSTLQVEMFCQREAERCTGASWQFATNGEKSLLFDAMNMTWTVINHEASKIKETWKKDRGLEKYFRKLSKGDCDHWLREFLGHWEAMPEPTVSPVNASDIHWSSSSLPDRWIILGAFILLVLMGIVLICVWWQNGEWQAGLWPLRTS

SEQ ID NO: 7149 - protein, 227 aa, Homo sapiens
MRRISLTSSPVRLLLFLLLLLIALEIMYNSDNNMVKPLGLLGKKVYATSTWGELTQTLGEVGRDLRMLLCDIKPQIKTSDPSTLQVEMFCQREAERCTGASWQFATNGEKSLLFDAMNMTWTVINHEASKIKETWKKDRGLEKYFRKLSKGDCDHWLREFLGHWEAMPEPTVSPVNASDIHWSSSSLPDRWIILGAFILLVLMGIVLICVWWQNGEWQAGLWPLRTS

SEQ ID NO: 7150 - protein, 212 aa, Homo sapiens
MRRISLTSSPVRLLLFLLLLLIALEIMVGGHSLCFNFTIKSLSRPGQPWCEAQVFLNKNLFLQYNSDNNMVKPLGLLGKKVYATSTWGELTQTLGEVGRDLRMLLCDIKPQIKTSDPSTLQVEMFCQREAERCTGASWQFATNGEKSLLFDAMNMTWTVINHEASKIKETWKKDRGLEKYFRKLSKGDCDHWLREFLGHWEAMPEPTGRRST

SEQ ID NO: 7151 - protein, 209 aa, Homo sapiens
MRRISLTSSPVRLLLFLLLLLIALEIMVGGHSLCFNFTIKSLSRPGQPWCEAQVFLNKNLFLQYNSDNNMVKPLGLLGKKVYATSTWGELTQTLGEVGRDLRMLLCDIKPQIKTSDPSTLQVEMFCQREAERCTGASWQFATNGEKSLLFDAMNMTWTVINHEASKIKETWKKDRGLEKYFRKLSKGDCDHWLREFLGHWEAMPEPTGN

SEQ ID NO: 7152 - protein, 220 aa, Homo sapiens
MRRISLTSSPVRLLLFLLLLLIALEIMVGGHSLCFNFTIKSLSRPGQPWCEAQVFLNKNLFLQYNSDNNMVKPLGLLGKKVYATSTWGELTQTLGEVGRDLRMLLCDIKPQIKTSDPSTLQVEMFCQREAERCTGASWQFATNGEKSLLFDAMNMTWTVINHEAMSPVNASDIHWSSSSLPDRWIILGAFILLVLMGIVLICVWWQNGEWQAGLWPLRTS

SEQ ID NO: 7153 - protein, 280 aa, Homo sapiens
MRRISLTSSPVRLLLFLLLLLIALEIMVGECPEHKNWLRTRRREKGGHSLCFNFTIKSLSRPGQPWCEAQVFLNKNLFLQYNSDNNMVKPLGLLGKKVYATSTWGELTQTLGEVGRDLRMLLCDIKPQIKTSDPSTLQVEMFCQREAERCTGASWQFATNGEKSLLFDAMNMTWTVINHEASKIKETWKKDRGLEKYFRKLSKGDCDHWLREFLGHWEAMPEPTVSPVNASDIHWSSSSLPDRWIILGAFILLVLMGIVLICVWWQNGEWQAGLWPLRTS

SEQ ID NO: 7154 - protein, 963 aa, Homo sapiens
MLSGERKEGGSPRFGKLHLPVGLWINSPRKQLAKLGRRWPSAASVKSSSSDTGSRSSEPLPPPPPHVELRRVGAVKAAGGASGSRAKRISQLFRGSGTGTTGSSGAGGPGTPGGAQRWASEKKLPELAAGVAPEPPLATRATAPPGVLKIFGAGLASGANYKSVLATARSTARELVAEALERYGLAGSPGGGPGESSCVDAFALCDALGRPAAAGVGSGEWRAEHLRVLGDSERPLLVQELWRARPGWARRFELRGREEARRLEQEAFGAADSEGTGAPSWRPQKNRSRAASGGAALASPGPGTGSGAPAGSGGKERSENLSLRRSVSELSLQGRRRRQQERRQQALSMAPGAADAQIGTADPGDFDQLTQCLIQAPSNRPYFLLLQGYQDAQDFVVYVMTREQHVFGRGGNSSGRGGSPAPYVDTFLNAPDILPRHCTVRAGPEHPAMVRPSRGAPVTHNGCLLLREAELHPGDLLGLGEHFLFMYKDPRTGGSGPARPPWLPARPGATPPGPGWAFSCRLCGRGLQERGEALAAYLDGREPVLRFRPREEEALLGEIVRAAAAGSGDLPPLGPATLLALCVQHSARELELGHLPRLLGRLARLIKEAVWEKIKEIGDRQPENHPEGVPEVPLTPEAVSVELRPLMLWMANTTELLSFVQEKVLEMEKEADQEDPQLCNDLELCDEAMALLDEVIMCTFQQSVYYLTKTLYSTLPALLDSNPFTAGAELPGPGAELGAMPPGLRPTLGVFQAALELTSQCELHPDLVSQTFGYLFFFSNASLLNSLMERGQGRPFYQWSRAVQIRTNLDLVLDWLQGAGLGDIATEFFRKLSMAVNLLCVPRTSLLKASWSSLRTDHPTLTPAQLHHLLSHYQLGPGRGPPAAWDPPPAEREAVDTGDIFESFSSHPPLILPLGSSRLRLTGPVTDDALHRELRRLRRLLWDLEQQELPANYRHGPPVATSP

SEQ ID NO: 7155 - protein, 485 aa, Homo sapiens
MPAMVEKGPEVSGKRRGRNNAAASASAAAASAAASAACASPAATAASGAAASSASAAAASAAAAPNNGQNKSLAAAAPNGNSSSNSWEEGSSGSSSDEEHGGGGMRVGPQYQAVVPDFDPAKLARRSQERDNLGMLVWSPNQNLSEAKLDEYIAIAKEKHGYNMEQALGMLFWHKHNIEKSLADLPNFTPFPDEWTVEDKVLFEQAFSFHGKTFHRIQQMLPDKSIASLVKFYYSWKKTRTKTSVMDRHARKQKREREESEDELEEANGNNPIDIEVDQNKESKKEVPPTETVPQVKKEKHSTQAKNRAKRKPPKGMFLSQEDVEAVSANATAATTVLRQLDMELVSVKRQIQNIKQTNSALKEKLDGGIEPYRLPEVIQKCNARWTTEEQLLAVQAIRKYGRDFQAISDVIGNKSVVQVKNFFVNYRRRFNIDEVLQEWEAEHGKEETNGPSNQKPVKSPDNSIKMPEEEDEAPVLDVRYASAS

SEQ ID NO: 7156 - protein, 248 aa, Homo sapiens
MEGVEEKKKEVPAVPETLKKKRRNFAELKIKRLRKKFAQKMLRKARRKLIYEKAKHYHKEYRQMYRTEIRMARMARKAGNFYVPAEPKLAFVIRIRGINGVSPKVRKVLQLLRLRQIFNGTFVKLNKASINMLRIVEPYIAWGYPNLKSVNELIYKRGYGKINKKRIALTDNALIARSLGKYGIICMEDLIHEIYTVGKRFKEANNFLWPFKLSSPRGGMKKKTTHFVEGGDAGNREDQINRLIRRMN

SEQ ID NO: 7157 - protein, 317 aa, Homo sapiens
MPREDRATWKSNYFLKIIQLLDDYPKCFIVGADNVGSKQMQQIRMSLRGKVVVLMGKNTMMRKAIRGHLENNPALEKLLPHIWGNVGFVFTKEDLTEIRDMLLANKVPAAARAGAIAPCEVTVPAQNTGLGPEKTSFFQALGITTKISRGTIEILSDVQLIKTGDKVGASEATLLNMLNISPFSFGLVIQQVFDNGSIYNPEVLDKTEETLHSRFLEGVRNVASVCLQTGYPTVASVPHSIINGYKRVLALSVETDYTFPLAENVKAFLADPSAFVAAAPVAADTTAAPAAAAAPAKVEAKEESEESDEDMGFGLFD

SEQ ID NO: 7158 - protein, 317 aa, Homo sapiens
MPREDRATWKSNYFLKIIQLLDDYPKCFIVGADNVGSKQMQQIRMSLRGKAVVLMGKNTMMRKAIRGHLENNPALEKLLPHIRGNVGFVFTKEDLTEIRDMLLANKVPAAARAGAIAPCEVTVPAQNTGLGPEKTSFFQALGITTKISRGTIEILSDVQLIKTGDKVGASEATLLNMLNISPFSFGLVIQQVFDNGSIYNPEVLDITEETLHSRFLEGVRNVASVCLQIGYPTVASVPHSIINGYKRVLALSVETDYTFPLAEKVKAFLADPSAFVAAAPVAAATTAAPAAAAAPAKVEAKEESEESDEDMGFGLFD

SEQ ID NO: 7159 - protein, 255 aa, Homo sapiens
MPREDRATWKSNYFLKIIQLLDDYPKCFIVGADNVGSKQMQQIRMSLRGKAVVLMGKNTMMRKAIRGHLENNPALEKLLPHIRGNVGFVFTKEDLTEIRDMLLANKVPAAARAGAIAPCEVTVPAQNTGLGPEKTSFFQALGITTKISRGTIEILGVRNVASVCLQIGYPTVASVPHSIINGYKRVLALSVETDYTFPLAEKVKAFLADPSAFVAAAPVAAATTAAPAAAAAPAKVEAKEESEESDEDMGFGLFD

SEQ ID NO: 7160 - protein, 114 aa, Homo sapiens
MEKPLFPLVPLHWFGFGYTALVVSGGIVGYVKTGRAPSLAAGLLFGSLAGVGAYQLYQDPRNVWDFLAATSVTFVGIMGMRSYYYGKFMPVGLIAGASLLMAAKVGVRMLMTSD

SEQ ID NO: 7161 - protein, 689 aa, Homo sapiens
MATKTAGVGRWEVVKKGRRPGVGAGAGGRGGGRNRRALGEANGVWKYDLTPAIQTTSTLYERGFENIMKRQNKEQVPPPAVEPKKPGNKKQPKKVATPPNQNQKQGRFRSLEEALKALDVADLQKELDKSQSVFSGNPSIWLKDLASYLNYKLQAPLSEPTLSQHTHDYPYSLVSRELRGIIRGLLAKAAGSLELFFDHCLFTMLQELDKTPGESLHGYRICIQAILQDKPKIATANLGKFLELLRSHQSRPAKCLTIMWALGQAGFANLTEGLKVWLGIMLPVLGIKSLSPFAITYLDRLLLMHPNLTKGFGMIGPKDFFPLLDFAYMPNNSLTPSLQEQLCQLYPRLKVLAFGAKPDSTLHTYFPSFLSRATPSCPPEMKKELLSSLTECLTVDPLSASVWRQLYPKHLSQSSLLLEHLLSSWEQIPKKVQKSLQETIQSLKLTNQELLRKGSSNNQDVVTCDMACKGLLQQVQGPRLPWTRLLLLLLVFAVGFLCHDLRSHSSFQASLTGRLLRSSGFLPASQQACAKLYSYSLQGYSWLGETLPLWGSHLLTVVRPSLQLAWAHTNATVSFLSAHCASHLAWFGDSLTSLSQRLQIQLPDSVNQLLRYLRELPLLFHQNVLLPLWHLLLEALAWAQEHCHEACRGEVTWDCMKTQLSEAVHWTWLCLQDITVAFLDWALALISQQ

SEQ ID NO: 7162 - protein, 644 aa, Homo sapiens
MATKTAGVGRWEVVKKGRRPGVGAGAGGRGGGRNRRALGEANGVWKYDLTPAIQTTSTLYERGFENIMKRQNKEQVPPPAVEPKKPGNKKQPKKVATPPNQNQKQGRFRSLEEALKALDVADLQKELDKSQSVFSGNPSIWLKDLASYLNYKLQAPLSEPTLSQHTHGESLHGYRICIQAILQDKPKIATANLGKFLELLRSHQSRPAKCLTIMWALGQAGFANLTEGLKVWLGIMLPVLGIKSLSPFAITYLDRLLLMHPNLTKGFGMIGPKDFFPLLDFAYMPNNSLTPSLQEQLCQLYPRLKVLAFGAKPDSTLHTYFPSFLSRATPSCPPEMKKELLSSLTECLTVDPLSASVWRQLYPKHLSQSSLLLEHLLSSWEQIPKKVQKSLQETIQSLKLTNQELLRKGSSNNQDVVTCDMACKGLLQQVQGPRLPWTRLLLLLLVFAVGFLCHDLRSHSSFQASLTGRLLRSSGFLPASQQACAKLYSYSLQGYSWLGETLPLWGSHLLTVVRPSLQLAWAHTNATVSFLSAHCASHLAWFGDSLTSLSQRLQIQLPDSVNQLLRYLRELPLLFHQNVLLPLWHLLLEALAWAQEHCHEACRGEVTWDCMKTQLSEAVHWTWLCLQDITVAFLDWALALISQQ

SEQ ID NO: 7163 - protein, 297 aa, Homo sapiens
MEEPTAVEGQVQLPSPHQGSLRKAVAAALALDGESTMGHRKKKRKESRPESIIIYRSDNEKTDEEPGESEGGDQPKEEEGDDFLDYPVDDDMWNLPLDSRYVTLTGTITRGKKKGQMVDIHVTLTEKELQELTKPKESSRETTPEGRMACQMGADRGPHVVLWTLICLPVVFILSFVVSFYYGTITWYNIFLVYNEERTFWHKISYCPCLVLFYPVLIMAMASSLGLYAAVVQLSWSWEAWWQAARDMEKGFCGWLCSKLGLEDCSPYSIVELLESDNISSTLSNKDPIQEVETSTV

SEQ ID NO: 7164 - protein, 588 aa, Homo sapiens
MEAADASRSNGSSPEARDARSPSGPSGSLENGTKADGKDAKTTNGHGGEAAEGKSLGSALKPGEGRSALFAGNEWRRPIIQFVESGDDKNSNYFSMDSMEGKRSPYAGLQLGAAKKPPVTFAEKGELRKSIFSESRKPTVSIMEPGETRRNSYPRADTGLFSRSKSGSEEVLCDSCIGNKQKAVKSCLVCQASFCELHLKPHLEGAAFRDHQLLEPIRDFEARKCPVHGKTMELFCQTDQTCICYLCMFQEHKNHSTVTVEEAKAEKETELSLQKEQLQLKIIEIEDEAEKWQKEKDRIKSFTTNEKAILEQNFRDLVRDLEKQKEEVRAALEQREQDAVDQVKVIMDALDERAKVLHEDKQTREQLHSISDSVLFLQEFGALMSNYSLPPPLPTYHVLLEGEGLGQSLGNFKDDLLNVCMRHVEKMCKADLSRNFIERNHMENGGDHRYVNNYTNSFGGEWSAPDTMKRYSMYLTPKGGVRTSYQPSSPGRFTKETTQKNFNNLYGTKGNYTSRVWEYSSSIQNSDNDLPVVQGSSSFSLKGYPSLMRSQSPKAQPQTWKSGKQTMLSHYRPFYVNKGNGIGSNEAP

SEQ ID NO: 7165 - protein, 570 aa, Homo sapiens
MEAADASRSNGSSPEARDARSPSGPSGSLENGTKADGKDAKTTNGHGGEAAEGKSLGSALKPGEGRSALFAGNEWRRPIIQFVESGDDKNSNYFSMDSMEGKRSPYAGLQLGAAKKPPVTFAEKGELRKSIFSESRKPTVSIMEPGETRRNSYPRADTGLFSRSKSGSEEVLCDSCIGNKQKAVKSCLVCQASFCELHLKPHLEGAAFRDHQLLEPIRDFEARKCPVHGKTMELFCQTDQTCICYLCMFQEHKNHSTVTVEEAKAEKETELSLQKEQLQLKIIEIEDEAEKWQKEKDRIKSFTTNEKAILEQNFRDLVRDLEKQKEEVRAALEQREQDAVDQVKVIMDALDERAKVLHEDKQTREQLHSISDSVLFLQEFGALMSNYSLPPPLPTYHVLLEGEGLGQSLGNFKDDLLNVCMRHVEKMCKADLSRNFIERNHMENGGDHRYVNNYTNSFGGEWSAPDTMKRYSMYLTPKGGVRTSYQPSSPGRFTKETTQKNFNNLYGTKGNYTSRVWEYSSSIQNSDNDLPVVQGSSSFSLKGYPSLMRSQSPKAQPQTWKSGKQTMLVV

SEQ ID NO: 7166 - protein, 653 aa, Homo sapiens
MAAAAASHLNLDALREVLECPICMESFTEEQLRPKLLHCGHTICRQCLEKLLASSINGVRCPFCSKITRITSLTQLTDNLTVLKIIDTAGLSEAVGLLMCRSCGRRLPRQFCRSCGLVLCEPCREADHQPPGHCTLPVKEAAEERRRDFGEKLTRLRELMGELQRRKAALEGVSKDLQARYKAVLQEYGHEERRVQDELARSRKFFTGSLAEVEKSNSQVVEEQSYLLNIAEVQAVSRCDYFLAKIKQADVALLEETADEEEPELTASLPRELTLQDVELLKVGHVGPLQIGQAVKKPRTVNVEDSWAMEATASAASTSVTFREMDMSPEEVVASPRASPAKQRGPEAASNIQQCLFLKKMGAKGSTPGMFNLPVSLYVTSQGEVLVADRGNYRIQVFTRKGFLKEIRRSPSGIDSFVLSFLGADLPNLTPLSVAMNCQGLIGVTDSYDNSLKVYTLDGHCVACHRSQLSKPWGITALPSGQFVVTDVEGGKLWCFTVDRGSGVVKYSCLCSAVRPKFVTCDAEGTVYFTQGLGLNLENRQNEHHLEGGFSIGSVGPDGQLGRQISHFFSENEDFRCIAGMCVDARGDLIVADSSRKEILHFPKGGGYSVLIREGLTCPVGIALTPKGQLLVLDCWDHCIKIYSYHLRRYSTP

SEQ ID NO: 7167 - protein, 438 aa, Homo sapiens
MMYAPVEFSEAEFSRAEYQRKQQFWDSVRLALFTLAIVAIIGIAIGIVTHFVVEDDKSFYYLASFKVTNIKYKENYGIRSSREFIERSHQIERMMSRIFRHSSVGGRFIKSHVIKLSPDEQGVDILIVLIFRYPSTDSAEQIKKKIEKALYQSLKTKQLSLTINKPSFRLTPIDSKKMRNLLNSRCGIRMTSSNMPLPASSSTQRIVQGRETAMEGEWPWQASLQLIGSGHQCGASLISNTWLLTAAHCFWKNKDPTQWIATFGATITPPAVKRNVRKIILHENYHRETNENDIALVQLSTGVEFSNIVQRVCLPDSSIKLPPKTSVFVTGFGSIVDDGPIQNTLRQARVETISTDVCNRKDVYDGLITPGMLCAGFMEGKIDACKGDSGGPLVYDNHDIWYIVGIVSWGQSCALPKKPGVYTRVTKYRDWIASKTGM

SEQ ID NO: 7168 - protein, 370 aa, Homo sapiens
MVGKLKQNLLLACLVISSVTVFYLGQHAMECHHRIEERSQPVKLESTRTTVRTGLDLKANKTFAYHKDMPLIFIGGVPRSGTTLMRAMLDAHPDIRCGEETRVIPRILALKQMWSRSSKEKIRLDEAGVTDEVLDSAMQAFLLEIIVKHGEPAPYLCNKDPFALKSLTYLSRLFPNAKFLLMVRDGRASVHSMISRKVTIAGFDLNSYRDCLTKWNRAIETMYNQCMEVGYKKCMLVHYEQLVLHPERWMRTLLKFLQIPWNHSVLHHEEMIGKAGGVSLSKVERSTDQVIKPVNVGALSKWVGKIPPDVLQDMAVIAPMLAKLGYDPYANPPNYGKPDPKIIENTRRVYKGEFQLPDFLKEKPQTEQVE

SEQ ID NO: 7169 - protein, 245 aa, Homo sapiens
MKHTQSGQSTSPLVIDYTCRVCQMAFVFSSLIPLLLMTPVFCLGNTSECFQNFSQSHKCILMHSPPSAMAELPPSANTSVCSTLYFYGIAIFLGSFVLSLLTIMVLLIRAQTLYKKFVKSTGFLGSEQWAVIHIVDQRVRFYPVAFFCCWGPAVILMIIKLTKPQDTKLHMALYVLQALTATSQGLLNCGVYGWTQHKFHQLKQEARRDADTQTPLLCSQKRFYSRGLNSLESTLTFPASTSTIF

SEQ ID NO: 7170 - protein, 337 aa, Homo sapiens
MATLSVIGSSSLIAYAVFHNIQKSPEIRPLFYLSFCDLLLGLCWLTETLLYGASVANKDIICYNLQAVGQIFYISSFLYTVNYIWYLYTELRMKHTQSGQSTSPLVIDYTCRVCQMAFVFSSLIPLLLMTPVFCLGNTSECFQNFSQSHKCILMHSPPSAMAELPPSANTSVCSTLYFYGIAIFLGSFVLSLLTIMVLLIRAQTLYKKFVKSTGFLGSEQWAVIHIVDQRVRFYPVAFFCCWGPAVILMIIKLTKPQDTKLHMALYVLQALTATSQGLLNCGVYGWTQHKFHQLKQEARRDADTQTPLLCSQKRFYSRGLNSLESTLTFPASTSTIF

SEQ ID NO: 7171 - protein, 302 aa, Homo sapiens
MATLSVIGSSSLIAYAVFHNIQKSPEIRPLFYLSFCDLLLGLCWLTETLLYGASVANKDIICYNLQAVGQVIDYTCRVCQMAFVFSSLIPLLLMTPVFCLGNTSECFQNFSQSHKCILMHSPPSAMAELPPSANTSVCSTLYFYGIAIFLGSFVLSLLTIMVLLIRAQTLYKKFVKSTGFLGSEQWAVIHIVDQRVRFYPVAFFCCWGPAVILMIIKLTKPQDTKLHMALYVLQALTATSQGLLNCGVYGWTQHKFHQLKQEARRDADTQTPLLCSQKRFYSRGLNSLESTLTFPASTSTIF

SEQ ID NO: 7172 - protein, 344 aa, Homo sapiens
MQLEIKVALNFIISYLYNKLPRRRADLFGEELERLLKKKYEGHWYPEKPLKGSGFRCVHIGEMVDPVVELAAKRSGLAVEDVRANVPEELSVWIDPFEVSYQIGEKGAVKVLYLDDSEGCGAPELDKEIKSSFNPDAQVFVPIGSQDSSLSNSPSPSFGQSPSPTFIPRSAQPITFTTASFAATKFGSTKMKKGGGAASGGGVASSGAGGQQPPQQPRMARSPTNSLLKHKSLSLSMHSLNFITANPAPQSQLSPNAKEFVYNGGGSPSLFFDAADGQGSGTPGPFGGSGAGTCNSSSFDMAQVFGGGANSLFLEKTPFVEGLSYNLNTMQYPSQQFQPVVLAN

SEQ ID NO: 7173 - protein, 250 aa, Homo sapiens
MQLEIKVALNFIISYLYNKLPRRRADLFGEELERLLKKKYEGHWYPEKPLKGSGFRCVHIGEMVDPVVELAAKRSGLAVEDVRANVPEELSVWIDPFEVSYQIGEKGAVKVLYLDDSEGCGAPELDKEIKSSFNPDAQVFVPIGSQDSSLSNSPSPSFGQSPSPTFIPRSAQPITFTTASFAATKFGSTKMKKGGGAASGGGVASSGAGGQQPPQQPRMARSPTNSLLKHKSLSLSMHSLNFITDYNHDQ

SEQ ID NO: 7174 - protein, 76 aa, Homo sapiens
MNSVGEACTDMKREYDQCFNRWFAEKFLKGDSSGDPCTDLFKRYQQCVQKAIKEKEIPIEGLEFMGHGKEKPENSS

SEQ ID NO: 7175 - protein, 575 aa, Homo sapiens
MKRSLQALYCQLLSFLLILALTEALAFAIQEPSPRESLQVLPSGTPPGTMVTAPHSSTRHTSVVMLTPNPDGPPSQAAAPMATPTPRAEGHPPTHTISTIAATVTAPHSESSLSTGPAPAAMATTSSKPEGRPRGQAAPTILLTKPPGATSRPTTAPPRTTTRRPPRPPGSSRKGAGNSSRPVPPAPGGHSRSKEGQRGRNPSSTPLGQKRPLGKIFQIYKGNFTGSVEPEPSTLTPRTPLWGYSSSPQPQTVAATTVPSNTSWAPTTTSLGPAKDKPGLRRAAQGGGSTFTSQGGTPDATAASGAPVSPQAAPVPSQRPHHGDPQDGPSHSDSWLTVTPGTSRPLSTSSGVFTAATGPTPAAFDTSVSAPSQGIPQGASTTPQAPTHPSRVSESTISGAKEETVATLTMTDRVPSPLSTVVSTATGNFLNRLVPAGTWKPGTAGNISHVAEGDKPQHRATICLSKMDIAWVILAISVPISSCSVLLTVCCMKRKKKTANPENNLSYWNNTITMDYFNRHAVELPREIQSLETSEDQLSEPRSPANGDYRDTGMVLVNPFCQETLFVGNDQVSEI

SEQ ID NO: 7176 - protein, 487 aa, Homo sapiens
MKRSLQALYCQLLSFLLILALTEALAFAIQEPSPRESLQVLPSGTPPGTMVTAPHSSTRHTSVVMLTPNPDGPPSQAAAPMATPTPRAEGHPPTHTISTIAATVTAPHSESSLSTGPAPAAMATTSSKPEGRPRGQAAPTILLTKPPGATSRPTTAPPRTTTRRPPRPPGSSRKGAGNSSRPVPPAPGGHSRSKEGQRGRNPSSTPLGQKRPLGKIFQIYKGNFTGSVEPEPSTLTPRTPLWGYSSSPQPQTVAATTVPSNTSWAPTTTSLGPAKDKPGLRRAAQGGGSTFTSQGGTPDATAASGAPVSPQAAPVPSQRPHHGDPQDGPSHSDSWLTVTPGTSRPLSTSSGVFTAATGPTPAAFDTSVSAPSQGIPQGASTTPQAPTHPSRVSESTISGAKEETVATLTMTDRVPSPLSTVVSTATGNFLNRLVPAGTWKPGTAGNISHVAEGDKPQHRATICLSKMDIAWVILAISVPISSCSDPI

SEQ ID NO: 7177 - protein, 423 aa, Homo sapiens
MALKVLLEQEKTFFTLLVLLGYLSCKVTCESGDCRQQEFRDRSGNCVPCNQCGPGMELSKECGFGYGEDAQCVTCRLHRFKEDWGFQKCKPCLDCAVVNRFQKANCSATSDAICGDCLPGFYRKTKLVGFQDMECVPCGDPPPPYEPHCASKVNLVKIASTASSPRDTALAAVICSALATVLLALLILCVIYCKRQFMEKKPSWSLRSQDIQYNGSELSCFDRPQLHEYAHRACCQCRRDSVQTCGPVRLLPSMCCEEACSPNPATLGCGVHSAASLQARNAGPAGEMVPTFFGSLTQSICGEFSDAWPLMQNPMGGDNISFCDSYPELTGEDIHSLNPELESSTSLDSNSSQDLVGGAVPVQSHSENFTAATDLSRYNNTLVESASTQDALTMRSQLDQESGAVIHPATQTSLQVRQRLGSL

SEQ ID NO: 7178 - protein, 417 aa, Homo sapiens
MALKVLLEQEKTFFTLLVLLGYLSCKVTCESGDCRQQEFRDRSGNCVPCNQCGPGMELSKECGFGYGEDAQCVTCRLHRFKEDWGFQKCKPCLDCAVVNRFQKANCSATSDAICGDCLPGFYRKTKLVGFQDMECVPCGDPPPPYEPHCASKVNLVKIASTASSPRDTALAAVICSALATVLLALLILCVIYCKRQFMEKKPSWSLRSQDIQYNGSELSCFDRPQLHEYAHRACCQCRRDSVQTCGPVRLLPSMCCEEACSPNPATLGCGVHSAASLQARNAGPAGEMVPTFFGSLTQSICGEFSDAWPLMQNPMGGDNISFCDSYPELTGEDIHSLNPELESSTSLDSNSSQDLVGGAVPVQSHSENFTAATDLSRYNNTLVESASTQDALTMRSQLDQESGAVIHPATQTSLQEA

SEQ ID NO: 7179 - protein, 285 aa, Homo sapiens
MECVPCGDPPPPYEPHCASKVNLVKIASTASSPRDTALAAVICSALATVLLALLILCVIYCKRQFMEKKPSWSLRSQDIQYNGSELSCFDRPQLHEYAHRACCQCRRDSVQTCGPVRLLPSMCCEEACSPNPATLGCGVHSAASLQARNAGPAGEMVPTFFGSLTQSICGEFSDAWPLMQNPMGGDNISFCDSYPELTGEDIHSLNPELESSTSLDSNSSQDLVGGAVPVQSHSENFTAATDLSRYNNTLVESASTQDALTMRSQLDQESGAVIHPATQTSLQEA

SEQ ID NO: 7180 - protein, 496 aa, Homo sapiens
MAGEITETGELYSSYVGLVYMFNLIVGTGALTMPKAFATAGWLVSLVLLVFLGFMSFVTTTFVIEAMAAANAQLHWKRMENLKEEEDDDSSTASDSDVLIRDNYERAEKRPILSVQRRGSPNPFEITDRVEMGQMASMFFNKVGVNLFYFCIIVYLYGDLAIYAAAVPFSLMQVTCSATGNDSCGVEADTKYNDTDRCWGPLRRVDAYRIYLAIFTLLLGPFTFFDVQKTKYLQILTSLMRWIAFAVMIVLALIRIGHGQGEGHPPLADFSGVRNLFGVCVYSFMCQHSLPSLITPVSSKRHLTRLVFLDYVLILAFYGLLSFTAIFCFRGDSLMDMYTLNFARCDVVGLAAVRFFLGLFPVFTISTNFPIIAVTLRNNWKTLFHREGGTYPWVVDRVVFPTITLVPPVLVAFCTHDLESLVGITGAYAGTGIQYVIPAFLVYHCRRDTQLAFGCGVSNKHRSPFRHTFWVGFVLLWAFSCFIFVTANIILSETKL

SEQ ID NO: 7181 - protein, 314 aa, Homo sapiens
MAGEITETGELYSSYVGLVYMFNLIVGTGALTMPKAFATAGWLVSLVLLVFLGFMSFVTTTFVIEAMAAANAQLHWKRMENLKEEEDDDSSTASDSDVLIRDNYERAEKRPILSVQRRGSPNPFEITDRVEMGQMASMFFNKVGVNLFYFCIIVYLYGDLAIYAAAVPFSLMQVTCSATGNDSCGVEADTKYNDTDRCWGPLRRVDAYRIYLAIFTLLLGPFTFFDVQKTKYLQILTSLMRWIDGPPGSVMGRAEEDASPAWPRSRCRCGGKLKLNSLYPTSATCMAPDAPGAGQVKVGVNFLCLPPHRSTRPT

SEQ ID NO: 7182 - protein, 115 aa, Homo sapiens
MQRISSLIHLSLFWAGVMSAIELVPEHQTVPVSIGVPATLRCSMKGEAIGNYYINWYRKTQGNTMTFIYREKDIYGPGFKDNFQGDIDIAKNLAVLKILAPSERDEGSYYCACDT

SEQ ID NO: 7183 - protein, 449 aa, Homo sapiens
MDSDDLQVFQNELICCICVNYFIDPVTIDCGHSFCRPCLCLCSEEGRAPMRCPSCRKISEKPNFNTNVVLKKLSSLARQTRPQNINSSDNICVLHEETKELFCEADKRLLCGPCSESPEHMAHSHSPIGWAAEECREKLIKEMDYLWEINQETRNNLNQETRTFHSLKDYVSVRKRIITIQYQKMPIFLDEEEQRHLQALEREAEELFQQLQDSQVRMTQHLERMKDMYRELWETCHVPDVELLQDVRNVSARTDLAQMQKPQPVNPELTSWCITGVLDMLNNFRVDSALSTEMIPCYISLSEDVRYVIFGDDHLSAPTDPQGVDSFAVWGAQAFTSGKHYWEVDVTLSSNWILGVCQDSRTADANFVIDSDERFFLISSKRSNHYSLSTNSPPLIQYVQRPLGQVGVFLDYDNGSVSFFDVSKGSLIYGFPPSSFSSPLRPFFCFGCT

SEQ ID NO: 7184 - protein, 440 aa, Homo sapiens
MEQRGQNAPAASGARKRHGPGPREARGARPGPRVPKTLVLVVAAVLLLVSAESALITQQDLAPQQRAAPQQKRSSPSEGLCPPGHHISEDGRDCISCKYGQDYSTHWNDLLFCLRCTRCDSGEVELSPCTTTRNTVCQCEEGTFREEDSPEMCRKCRTGCPRGMVKVGDCTPWSDIECVHKESGTKHSGEVPAVEETVTSSPGTPASPCSLSGIIIGVTVAAVVLIVAVFVCKSLLWKKVLPYLKGICSGGGGDPERVDRSSQRPGAEDNVLNEIVSILQPTQVPEQEMEVQEPAEPTGVNMLSPGESEHLLEPAEAERSQRRRLLVPANEGDPTETLRQCFDDFADLVPFDSWEPLMRKLGLMDNEIKVAKAEAAGHRDTLYTMLIKWVNKTGRDASVHTLLDALETLGERLAKQKIEDHLLSSGKFMYLEGNADSAMS

SEQ ID NO: 7185 - protein, 118 aa, Homo sapiens
MEQRGQNAPAASGARKRHGPGPREARGARPGPRVPKTLVLVVAAVLLLVSAESALITQQDLAPQQRAAPQQKRSSPSEGLCPPGHHISEDGRDCISCKYGQDYSTHWNDLLFCLRCTR

SEQ ID NO: 7186 - protein, 411 aa, Homo sapiens
MEQRGQNAPAASGARKRHGPGPREARGARPGPRVPKTLVLVVAAVLLLVSAESALITQQDLAPQQRAAPQQKRSSPSEGLCPPGHHISEDGRDCISCKYGQDYSTHWNDLLFCLRCTRCDSGEVELSPCTTTRNTVCQCEEGTFREEDSPEMCRKCRTGCPRGMVKVGDCTPWSDIECVHKESGIIIGVTVAAVVLIVAVFVCKSLLWKKVLPYLKGICSGGGGDPERVDRSSQRPGAEDNVLNEIVSILQPTQVPEQEMEVQEPAEPTGVNMLSPGESEHLLEPAEAERSQRRRLLVPANEGDPTETLRQCFDDFADLVPFDSWEPLMRKLGLMDNEIKVAKAEAAGHRDTLYTMLIKWVNKTGRDASVHTLLDALETLGERLAKQKIEDHLLSSGKFMYLEGNADSAMS

SEQ ID NO: 7187 - protein, 348 aa, Homo sapiens
MQFGELLAAVRKAQANVMLFLEEKEQAALSQANGIKAHLEYRSAEMEKSKQELETMAAISNTVQFLEEYCKFKNTEDITFPSVYIGLKDKLSGIRKVITESTVHLIQLLENYKKKLQEFSKEEEYDIRTQVSAIVQRKYWTSKPEPSTREQFLQYVHDITFDPDTAHKYLRLQEENRKVTNTTPWEHPYPDLPSRFLHWRQVLSQQSLYLHRYYFEVEIFGAGTYVGLTCKGIDQKGEERSSCISGNNFSWSLQWNGKEFTAWYSDMETPLKAGPFWRLGVYIDFPGGILSFYGVEYDSMTLVHKFACKFSEPVYAAFWLSKKENAIRIVDLGEEPEKPAPSLVGTAP

SEQ ID NO: 7188 - protein, 140 aa, Homo sapiens
MQFGELLAAVRKAQANVMLFLEEKEQAALSQANGIKAHLEYRSAEMEKSKQELETMAAISNTVQFLEMCMTSRSTRTQHTSISGCRRRTARSPTPRPGSIPTRTSPAGSCTGGRCCPSRVCTCTGTILRWRSSGQAPMLA

SEQ ID NO: 7189 - protein, 111 aa, Homo sapiens
MDSVLIHVLIDGLVACVAQLIRIADELLQFILQVQEVPYVEENGRAEETEADAPLPEEPSLPDLPDLSDLDSILTPREDEDLIFDIDQAMLDMDNLYEDTVSGINDDLTGD

SEQ ID NO: 7190 - protein, 142 aa, Homo sapiens
MAAAVAAAGAGEPQSPDELLPKGDAEKPEEELEEDDDEELDETLSERLWGLTEMFPERVRSAAGATFDLSLFVAQKMYRFSRAALWIGTTSFMILVLPVVFETEKLQMEQQQQLQQRQILLGPNTGLSGGMPGALPSLPGKI

SEQ ID NO: 7191 - protein, 18 aa, Homo sapiens
NNNARLMFGDGTQLVVKP

SEQ ID NO: 7192 - protein, 20 aa, Homo sapiens
GYSSASKIIFGSGTRLSIRP

SEQ ID NO: 7193 - protein, 164 aa, Homo sapiens
MAASLGQVLALVLVAALWGGTQPLLKRASAGLQRVHEPTWAQQLLQEMKTLFLNTEYLMPFLLNQCGSLLYYLTLASTDLTLAVPICNSLAIIFTLIVGKALGEDIGGKRAVAGMVLTVIGISLCITSSVPWTAELQLHGKGQLQTLSQKCKREASGTQSERFG

SEQ ID NO: 7194 - protein, 180 aa, Homo sapiens
MAASLGQVLALVLVAALWGGTQPLLKRASAGLQRVHEPTWAQQLLQEMKTLFLNTEYLMPFLLNQCGSLLYYLTLASTDLTLAVPICNSLAIIFTLIVGKALGEDIGGKRKLDYCECGTQLCGSRHTCVSSFPEPISPEWVRTRPFPILPFPLQLFCFLVAIRVPFPWTVWRKTEAGVWD

SEQ ID NO: 7195 - protein, 140 aa, Homo sapiens
MAASLGQVLALVLVAALWGGTQPLLKRASAGLQRVHEPTWAQQLLQEMKTLFLNTEYLMPFLLNQCGSLLYYLTLASTDLTLAVPICNSLAIIFTLIVGKALGEDIGGKRAVAGMVLTVIGISLCITSSVSKTQGQQSTL

SEQ ID NO: 7196 - protein, 96 aa, Homo sapiens
MAASLGQVLALVLVAALWGGTQPLLKRASAGLQRVHEPTWAQQLLQEMKTLFLNTEYLMPFLLNQCGSLLYYLTLASTGWSQTSEFRSSCWNPGKH

SEQ ID NO: 7197 - protein, 657 aa, Homo sapiens
MNMPVNKSPMINTCGGISSPYHEELWKLNFQHLSGERGHKSRPTFSITKEFILRFNQTQNSKEKEELLELARKIILRCKRKLGLKTLGSGRHVHLPAAWTEVIYLAQCKGEIQDESLNMLYASLDHASFDYDHLPALFFVAESVLYRLCCDASLKTYLYSVEIKLAKIGYLVFLRLFIFFLHGHLESFKQHLLRLQPYLYALSFSGASYHKYPNIFSNVQFILKASEIIGKRELRSESIFRPVEDKKRYENTDSDMGGYEINHLLWHCVAAWSCVQNNSPQLNNVLEHLVFHKTQLQKKCWLDSVLALLVLGEAAKLNMACLKALMDVVRDFVSSIMSVQNQEESCKVDDFSWAWNVVYIYTVILAEICLYAATSDLRKTALIGFCHCKSSQKNILYLDKSVPPELKETSILSLLEYFSSKMSENCDQVVWTGYYGLVYNLVKISWELQGDEEQDGLRNMIWQTLQKTKDYEEDVRIQNAINIAQAELNDPTDPFTRYSTNISSNVGEEVFSKYIGWRIANTLSKLFFPPIEAHFLPLKKPSIKKDQTKYPNKKLESVKKQVLHFTVREHPSVSEIPMFPYPDFFTKADKELAKIIDHHWQEELKIREKEDAICKAQELKDKKLAEKNHFQEVMKKREEKLHKQTKPYELPYRKEVI

SEQ ID NO: 7198 - protein, 506 aa, Homo sapiens
MNMPVNKSPMINTCGGISSPYHEELWKLNFQHLSGERGHKSRPTFSITKEFILRFNQTQNSKEKEELLELARKIILRCKRKLGLKTLGSGRHVHLPAAWTEVIYLAQCKGEIQDESLNMLYASLDHASFDYDHLPALFFVAESVLYRLCCDASLKTYLYSVEIKLAKIGYLVFLRLFIFFLHGHLESFKQHLLRLQPYLYALSFSGASYHKYPNIFSNVQFILKASEIIGKRELRSESIFRPVEDKKRYENTDSDMGGYEINHLLWHCVAAWSCVQNNSPQLNNVLEHLVFHKTQLQKKCWLDSVLALLVLGEAAKLNMACLKALMDVVRDFVSSIMSVQNQEESCKVDDFSWAWNVVYIYTVILAEICLYAATSDLRKTALIGFCHCKSSQKNILYLDKSVPPELKETSILSLLEYFSSKMSENCDQVVWTGYYGLVYNLVKISWELQGDEEQDGLRNMIWQTLQKTKDYEEDVRIQNAINIAQGTSFCIRNSHVSISRFLHQGR

SEQ ID NO: 7199 - protein, 206 aa, Homo sapiens
MDSAGQDINLNSPNKGLLSDSMTDVPVDTGVAARTPAVEGLTEAEEEELRAELTKVEEEIVTLRQVLAAKERHCGELKRRLGLSTLGELKQNLSRSWHDVQVSSAYVKTSEKLGEWNEKVTQSDLYKKTQETLSQAGQKTSAALSTVGSAISRKLGDMRNSATFKSFEDRVGTIKSKVVGDRENGSDNLPSSAGSGDKPLSDPAPF

SEQ ID NO: 7200 - protein, 186 aa, Homo sapiens
MDSAGQDINLNSPNKGLLSDSMTDVPVDTGVAARTPAVEGLTEAEEEELRAELTKVEEEIVTLRQVLAAKERHCGELKRRLGLSTLGELKQNLSRSWHDVQVSSAYKKTQETLSQAGQKTSAALSTVGSAISRKLGDMRNSATFKSFEDRVGTIKSKVVGDRENGSDNLPSSAGSGDKPLSDPAPF

SEQ ID NO: 7201 - protein, 209 aa, Homo sapiens
MDSAGQDINLNSPNKGLLSDSMTDVPVDTGVAARTPAVEGLTEAEEEELRAELTKVEEEIVTLRQVLAAKERHCGELKRRLGLSTLGELKQNLSRSWHDVQVSSAYKKTQETLSQAGQKTSAALSTVGSAISRKLGDMRAHPFSHSFSSYSIRHSISMPAMRNSATFKSFEDRVGTIKSKVVGDRENGSDNLPSSAGSGDKPLSDPAPF

SEQ ID NO: 7202 - protein, 200 aa, Homo sapiens
MDSAGQDINLNSPNKGLLSDSMTDVPVDTGVAARTPAVEGLTEAEEEELRAELTKVEEEIVTLRQVLAAKERHCGELKRRLGLSTLGELKQNLSRSWHDVQVSSAYKKTQETLSQAGQKTSAALSTVGSAISRKLGDMSSYSIRHSISMPAMRNSATFKSFEDRVGTIKSKVVGDRENGSDNLPSSAGSGDKPLSDPAPF

SEQ ID NO: 7203 - protein, 220 aa, Homo sapiens
MDSAGQDINLNSPNKGLLSDSMTDVPVDTGVAARTPAVEGLTEAEEEELRAELTKVEEEIVTLRQVLAAKERHCGELKRRLGLSTLGELKQNLSRSWHDVQVSSAYVKTSEKLGEWNEKVTQSDLYKKTQETLSQAGQKTSAALSTVGSAISRKLGDMSSYSIRHSISMPAMRNSATFKSFEDRVGTIKSKVVGDRENGSDNLPSSAGSGDKPLSDPAPF

SEQ ID NO: 7204 - protein, 163 aa, Homo sapiens
MDSAGQGVAARTPAVEGLTEAEEEELRAELTKVEEEIVTLRQVLAAKERHCGELKRRLGLSTLGELKQNLSRSWHDVQVSSAYKKTQETLSQAGQKTSAALSTVGSAISRKLGDMRNSATFKSFEDRVGTIKSKVVGDRENGSDNLPSSAGSGDKPLSDPAPF

SEQ ID NO: 7205 - protein, 229 aa, Homo sapiens
MDSAGQDINLNSPNKGLLSDSMTDVPVDTGVAARTPAVEGLTEAEEEELRAELTKVEEEIVTLRQVLAAKERHCGELKRRLGLSTLGELKQNLSRSWHDVQVSSAYVKTSEKLGEWNEKVTQSDLYKKTQETLSQAGQKTSAALSTVGSAISRKLGDMRAHPFSHSFSSYSIRHSISMPAMRNSATFKSFEDRVGTIKSKVVGDRENGSDNLPSSAGSGDKPLSDPAPF

SEQ ID NO: 7206 - protein, 843 aa, Homo sapiens
MDKENSDVSAAPADLKISNISVQVVSAQKKLPVRRPPLPGRRLPLPGRRPPQRPIGKAKPKKQSKKKVPFWNVQNKIILFTVFLFILAVIAWTLLWLYISKTESKDAFYFAGMFRITNIEFLPEYRQKESREFLSVSRTVQQVINLVYTTSAFSKFYEQSVVADVSSNNKGGLLVHFWIVFVMPRAKGHIFCEDCVAAILKDSIQTSIINRTSVGSLQGLAVDMDSVVLNAGLRSDYSSTIGSDKGCSQYFYAEHLSLHYPLEISAASGRLMCHFKLVAIVGYLIRLSIKSIQIEADNCVTDSLTIYDSLLPIRSSILYRICEPTRTLMSFVSTNNLMLVTFKSPHIRRLSGIRAYFEVIPEQKCENTVLVKDITGFEGKISSPYYPSYYPPKCKCTWKFQTSLSTLGIALKFYNYSITKKSMKGCEHGWWEINEHMYCGSYMDHQTIFRVPSPLVHIQLQCSSRLSDKPLLAEYGSYNISQPCPVGSFRCSSGLCVPQAQRCDGVNDCFDESDELFCVSPQPACNTSSFRQHGPLICDGFRDCENGRDEQNCTQSIPCNNRTFKCGNDICFRKQNAKCDGTVDCPDGSDEEGCTCSRSSSALHRIIGGTDTLEGGWPWQVSLHFVGSAYCGASVISREWLLSAAHCFHGNRLSDPTPWTAHLGMYVQGNAKFVSPVRRIVVHEYYNSQTFDYDIALLQLSIAWPETLKQLIQPICIPPTGQRVRSGEKCWVTGWGRRHEADNKGSLVLQQAEVELIDQTLCVSTYGIITSRMLCAGIMSGKRDACKGDSGGPLSCRRKSDGKWILTGIVSWGHGSGRPNFPGVYTRVSNFVPWIHKYVPSLL

SEQ ID NO: 7207 - protein, 717 aa, Homo sapiens
MFRITNIEFLPEYRQKESREFLSVSRTVQQVINLVYTTSAFSKFYEQSVVADVSNNKGGLLVHFWIVFVMPRAKGHIFCEDCVAAILKDSIQTSIINRTSVGSLQGLAVDMDSVVLNDKGCSQYFYAEHLSLHYPLEISAASGRLMCHFKLVAIVGYLIRLSIKSIQIEADNCVTDSLTIYDSLLPIRSSILYRICEPTRTLMSFVSTNNLMLVTFKSPHIRRLSGIRAYFEVIPEQKCENTVLVKDITGFEGKISSPYYPSYYPPKCKCTWKFQTSLSTLGIALKFYNYSITKKSMKGCEHGWWEINEHMYCGSYMDHQTIFRVPSPLVHIQLQCSSRLSDKPLLAEYGSYNISQPCPVGSFRCSSGLCVPQAQRCDGVNDCFDESDELFCVSPQPACNTSSFRQHGPLICDGFRDCENGRDEQNCTQSIPCNNRTFKCGNDICFRKQNAKCDGTVDCPDGSDEEGCTCSRSSSALHRIIGGTDTLEGGWPWQVSLHFVGSAYCGASVISREWLLSAAHCFHGNRLSDPTPWTAHLGMYVQGNAKFVSPVRRIVVHEYYNSQTFDYDIALLQLSIAWPETLKQLIQPICIPPTGQRVRSGEKCWVTGWGRRHEADNKGSLVLQQAEVELIDQTLCVSTYGIITSRMLCAGIMSGKRDACKGDSGGPLSCRRKSDGKWILTGIVSWGHGSGRPNFPGVYTRVSNFVPWIHKYVPSLL

SEQ ID NO: 7208 - protein, 572 aa, Homo sapiens
MCHFKLVAIVGYLIRLSIKSIQIEADNCVTDSLTIYDSLLPIRSSILYRICEPTRTLMSFVSTNNLMLVTFKSPHIRRLSGIRAYFEVIPEQKCENTVLVKDITGFEGKISSPYYPSYYPPKCKCTWKFQTSLSTLGIALKFYNYSITKKSMKGCEHGWWEINEHMYCGSYMDHQTIFRVPSPLVHIQLQCSSRLSDKPLLAEYGSYNISQPCPVGSFRCSSGLCVPQAQRCDGVNDCFDESDELFCVSPQPACNTSSFRQHGPLICDGFRDCENGRDEQNCTQSIPCNNRTFKCGNDICFRKQNAKCDGTVDCPDGSDEEGCTCSRSSSALHRIIGGTDTLEGGWPWQVSLHFVGSAYCGASVISREWLLSAAHCFHGNRLSDPTPWTAHLGMYVQGNAKFVSPVRRIVVHEYYNSQTFDYDIALLQLSIAWPETLKQLIQPICIPPTGQRVRSGEKCWVTGWGRRHEADNKGSLVLQQAEVELIDQTLCVSTYGIITSRMLCAGIMSGKRDACKGDSGGPLSCRRKSDGKWILTGIVSWGHGSGRPNFPGVYTRVSNFVPWIHKYVPSLL

SEQ ID NO: 7209 - protein, 173 aa, Homo sapiens
MSMSANTMIFMILGASVVMAIACLMDMNALLDRFHNYILPHLRGEDRVCHCNCGRHHIHYVIPYDGDQSVVDASENYFVTDSVTKQEIDLMLGLLLGFCISWFLVWMDGVLHCAVRAWRAGRRYDGSWTWLPKLCSLRELGRRPHRPFEEAAGNMVHVKQKLYHNGHPSPRHL

SEQ ID NO: 7210 - protein, 596 aa, Homo sapiens
MADAEARAEFPEEARPDRGTLQVLQDMASRLRIHSIRATCSTSSGHPTSCSSSSEIMSVLFFYIMRYKQSDPENPDNDRFVLAKRLSFVDVATGWLGQGLGVACGMAYTGKYFDRASYRVFCLMSDGESSEGSVWEAMAFASYYSLDNLVAIFDVNRLGHSGALPAEHCINIYQRRCEAFGWNTYVVDGRDVEALCQVFWQASQVKHKPTAVVAKTFKGRGTPSIEDAESWHAKPMPRERADAIIKLIESQIQTSRNLDPQPPIEDSPEVNITDVRMTSPPDYRVGDKIATRKACGLALAKLGYANNRVVVLDGDTRYSTFSEIFNKEYPERFIECFMAEQNMVSVALGCASRGRTIAFASTFAAFLTRAFDHIRIGGLAESNINIIGSHCGVSVGDDGASQMALEDIAMFRTIPKCTIFYPTDAVSTEHAVALAANAKGMCFIRTTRPETMVIYTPQERFEIGQAKVLRHCVSDKVTVIGAGITVYEALAAADELSKQDIFIRVIDLFTIKPLDVATIVSSAKATEGRIITVEDHYPQGGIGEAVCAAVSMDPDIQVHSLAVSGVPQSGKSEELLDMYGISARHIIVAVKCMLLN

SEQ ID NO: 7211 - protein, 557 aa, Homo sapiens
MSVLFFYIMRYKQSDPENPDNDRFVLAKRLSFVDVATGWLGQGLGVACGMAYTGKYFDRASYRVFCLMSDGESSEGSVWEAMAFASYYSLDNLVAIFDVNRLGHSGALPAEHCINIYQRRCEAFGWNTYVVDGRDVEALCQVFWQASQVKHKPTAVVAKTFKGRGTPSIEDAESWHAKPMPRERADAIIKLIESQIQTSRNLDPQPPIEDSPEVNITDVRMTSPPDYRVGDKIATRKACGLALAKLGYANNRVVVLDGDTRYSTFSEIFNKEYPERFIECFMAEQNMVSVALGCASRGRTIAFASTFAAFLTRAFDHIRIGGLAESNINIIGSHCGVSVGDDGASQMALEDIAMFRTIPKCTIFYPTDAVSTEHAVALAANAKGMCFIRTTRPETMVIYTPQERFEIGQAKGVSMLQDSWSSVISYQKVLRHCVSDKVTVIGAGITVYEALAAADELSKQDIFIRVIDLFTIKPLDVATIVSSAKATEGRIITVEDHYPQGGIGEAVCAAVSMDPDIQVHSLAVSGVPQSGKSEELLDMYGISARHIIVAVKCMLLN

SEQ ID NO: 7212 - protein, 540 aa, Homo sapiens
MSVLFFYIMRYKQSDPENPDNDRFVLAKRLSFVDVATGWLGQGLGVACGMAYTGKYFDRASYRVFCLMSDGESSEGSVWEAMAFASYYSLDNLVAIFDVNRLGHSGALPAEHCINIYQRRCEAFGWNTYVVDGRDVEALCQVFWQASQVKHKPTAVVAKTFKGRGTPSIEDAESWHAKPMPRERADAIIKLIESQIQTSRNLDPQPPIEDSPEVNITDVRMTSPPDYRVGDKIATRKACGLALAKLGYANNRVVVLDGDTRYSTFSEIFNKEYPERFIECFMAEQNMVSVALGCASRGRTIAFASTFAAFLTRAFDHIRIGGLAESNINIIGSHCGVSVGDDGASQMALEDIAMFRTIPKCTIFYPTDAVSTEHAVALAANAKGMCFIRTTRPETMVIYTPQERFEIGQAKVLRHCVSDKVTVIGAGITVYEALAAADELSKQDIFIRVIDLFTIKPLDVATIVSSAKATEGRIITVEDHYPQGGIGEAVCAAVSMDPDIQVHSLAVSGVPQSGKSEELLDMYGISARHIIVAVKCMLLN

SEQ ID NO: 7213 - protein, 116 aa, Homo sapiens
MNQTDKNQQEIPSYLNDEPPEGSMKDHPQQQPGMLSRVTGGIFSVTKGAVGATIGGVAWIGGKSLEVTKTAVTTVPSMGIGLVKGGVSAVAGGVTAVGSAVVNKVPLTGKKKDKSD

SEQ ID NO: 7214 - protein, 1522 aa, Homo sapiens
MSRNDKEPFFVKFLKSSDNSKCFFKALESIKEFQSEEYLQIITEEEALKIKENDRSLYICDPFSGVVFDHLKKLGCRIVGPQVVIFCMHHQRCVPRAEHPVYNMVMSDVTISCTSLEKEKREEVHKYVQMMGGRVYRDLNVSVTHLIAGEVGSKKYLVAANLKKPILLPSWIKTLWEKSQEKKITRYTDINMEDFKCPIFLGCIICVTGLCGLDRKEVQQLTVKHGGQYMGQLKMNECTHLIVQEPKGQKYECAKRWNVHCVTTQWFFDSIEKGFCQDESIYKTEPRPEAKTMPNSSTPTSQINTIDSRTLSDVSNISNINASCVSESICNSLNSKLEPTLENLENLDVSAFQAPEDLLDGCRIYLCGFSGRKLDKLRRLINSGGGVRFNQLNEDVTHVIVGDYDDELKQFWNKSAHRPHVVGAKWLLECFSKGYMLSEEPYIHANYQPVEIPVSHKPESKAALLKKKNSSFSKKDFAPSEKHEQADEDLLSQYENGSSTVVEAKTSEARPFNDSTHAEPLNDSTHISLQEENQSSVSHCVPDVSTITEEGLFSQKSFLVLGFSNENESNIANIIKENAGKIMSLLSRTVADYAVVPLLGCEVEATVGEVVTNTWLVTCIDYQTLFDPKSNPLFTPVPVMTGMTPLEDCVISFSQCAGAEKESLTFLANLLGASVQEYFVRKSNAKKGMFASTHLILKERGGSKYEAAKKWNLPAVTIAWLLETARTGKRADESHFLIENSTKEERSLETEITNGINLNSDTAEHPGTRLQTHRKTVVTPLDMNRFQSKAFRAVVSQHARQVAASPAVGQPLQKEPSLHLDTPSKFLSKDKLFKPSFDVKDALAALETPGRPSQQKRKPSTPLSEVIVKNLQLALANSSRNAVALSASPQLKEAQSEKEEAPKPLHKVVVCVSKKLSKKQSELNGIAASLGADYRWSFDETVTHFIYQGRPNDTNREYKSVKERGVHIVSEHWLLDCAQECKHLPESLYPHTYNPKMSLDISAVQDGRLCNSRLLSAVSSTKDDEPDPLILEENDVDNMATNNKESAPSNGSGKNDSKGVLTQTLEMRENFQKQLQEIMSATSIVKPQGQRTSLSRSGCNSASSTPDSTRSARSGRSRVLEALRQSRQTVPDVNTEPSQNEQIIWDDPTAREERARLASNLQWPSCPTQYSELQVDIQNLEDSPFQKPLHDSEIAKQAVCDPGNIRVTEAPKHPISEELETPIKDSHLIPTPQAPSIAFPLANPPVAPHPREKIITIEETHEELKKQYIFQLSSLNPQERIDYCHLIEKLGGLVIEKQCFDPTCTHIVVGHPLRNEKYLASVAAGKWVLHRSYLEACRTAGHFVQEEDYEWGSSSILDVLTGINVQQRRLALAAMRWRKKIQQRQESGIVEGAFSGWKVILHVDQSREAGFKRLLQSGGAKVLPGHSVPLFKEATHLFSDLNKLKPDDSGVNIAEAAAQNVYCLRTEYIADYLMQESPPHVENYCLPEAISFIQNNKELGTGLSQKRKAPTEKNKIKRPRVH

SEQ ID NO: 7215 - protein, 296 aa, Homo sapiens
MAVLAPLIALVYSVPRLSRWLAQPYYLLSALLSAAFLLVRKLPPLCHGLPTQREDGNPCDFDWREVEILMFLSAIVMMKNRRSITVEQHIGNIFMFSKVANTILFFRLDIRMGLLYITLCIVFLMTCKPPLYMGPEYIKYFNDKTIDEELERDKRVTWIVEFFANWSNDCQSFAPIYADLSLKYNCTGLNFGKVDVGRYTDVSTRYKVSTSPLTKQLPTLILFQGGKEAMRRPQIDKKGRAVSWTFSEENVIREFNLNELYQRAKKLSKAGDNIPEEQPVASTPTTVSDGENKKDK

SEQ ID NO: 7216 - protein, 258 aa, Homo sapiens
MAVLAPLIALVYSVPRLSRWLAQPYYLLSALLSAAFLLVRKLPPLCHGLPTQREDGNPCDFDWREVEILMFLSAIVMMKNRRSMFLMTCKPPLYMGPEYIKYFNDKTIDEELERDKRVTWIVEFFANWSNDCQSFAPIYADLSLKYNCTGLNFGKVDVGRYTDVSTRYKVSTSPLTKQLPTLILFQGGKEAMRRPQIDKKGRAVSWTFSEENVIREFNLNELYQRAKKLSKAGDNIPEEQPVASTPTTVSDGENKKDK

SEQ ID NO: 7217 - protein, 321 aa, Homo sapiens
MAAATRGCRPWGSLLGLLGLVSAAAAAWDLASLRCTLGAFCECDFRPDLPGLECDLAQHLAGQHLAKALVVKALKAFVRDPAPTKPLVLSLHGWTGTGKSYVSSLLAHYLFQGGLRSPRVHHFSPVLHFPHPSHIERYKKDLKSWVQGNLTACGRSLFLFDEMDKMPPGLMEVLRPFLGSSWVVYGTNYRKAIFIFISNTGGKQINQVALEAWRSRRDREEILLQELEPVISRAVLDNPHHGFSNSGIMEERLLDAVVPFLPLQRHHVRHCVLNELAQLGLEPRDEVVQAVLDSTTFFPEDEQLFSSNGCKTVASRIAFFL

SEQ ID NO: 7218 - protein, 253 aa, Homo sapiens
MAAATRGCRPWGSLLGLLGLVSAAAAAWDLASLRCTLGAFCECDFRPDLPGLECDLAQHLAGQHLAKALVVKALKAFVRDPAPTKPLVLSLHGWTGTGKSYVSSLLAHYLFQGGLRSPRVHHFSPVLHFPHPSHIERYKKDLKSWVQGNLTACGRSLFLFDEMDKMPPGLMEVLRPFLGSSWVVYGTNYRKAIFIFIRWGPALQWAQWGGHFSEVQLYSLSLCSQQNPVPHGLSWAFPVPSATLRDDIVIPPG

SEQ ID NO: 7219 - protein, 72 aa, Homo sapiens
MAAATRGCRPWGSLLGLLGLVSAAAAAWDLASLRCTLGAFCECDFRPDLPEGSEELGPREPHCLWPLPLPLR

SEQ ID NO: 7220 - protein, 233 aa, Homo sapiens
METSASSSQPQDNSQVHRETEDVDYGETDFHKQDGKAGLFSQEQYERNKSSSSSSSSSSSSSSSSSSSSSESNDEDQQPRATGKHRRSLGAGYPHGNGSPGPGHGEPDVLKDELQLYGDAPGEVVPSGESGLRRRGSDPASGEVEASQLRRLNIKKDDEFFHFVLLCFAIGALLVCYHYYADWFMSLGVGLLTFASLETVGIYFGLVYRIHSVLQGFIPLFQKFRLTGFRKTD

SEQ ID NO: 7221 - protein, 203 aa, Homo sapiens
METSASSSQPQDNSQVHRETEDVDYGETDFHKQDGKAGLFSQEQYERNKSSSSSSSSSSSSSSSSSSSSSGPGHGEPDVLKDELQLYGDAPGEVVPSGESGLRRRGSDPASGEVEASQLRRLNIKKDDEFFHFVLLCFAIGALLVCYHYYADWFMSLGVGLLTFASLETVGIYFGLVYRIHSVLQGFIPLFQKFRLTGFRKTD

SEQ ID NO: 7222 - protein, 157 aa, Homo sapiens
METSASSSQPQDNSQVHRETEDVDCPGHGEPDVLKDELQLYGDAPGEVVPSGESGLRRRGSDPASGEVEASQLRRLNIKKDDEFFHFVLLCFAIGALLVCYHYYADWFMSLGVGLLTFASLETVGIYFGLVYRIHSVLQGFIPLFQKFRLTGFRKTD

SEQ ID NO: 7223 - protein, 1015 aa, Homo sapiens
MPRATALGALVSLLLLLPLPRGAGGLGERPDATADYSELDGEEGTEQQLEHYHDPCKAAVFWGDIALDEDDLKLFHIDKARDWTKQTVGATGHSTGGLEEQASESSPDTTAMDTGTKEAGKDGRENTTLLHSPGTLHAAAKTFSPRVRRATTSRTERIWPGGVIPYVIGGNFTGSQRAIFKQAMRHWEKHTCVTFIERTDEESFIVFSYRTCGCCSYVGRRGGGPQAISIGKNCDKFGIVAHELGHVVGFWHEHTRPDRDQHVTIIRENIQPGQEYNFLKMEAGEVSSLGETYDFDSIMHYARNTFSRGVFLDTILPRQDDNGVRPTIGQRVRLSQGDIAQARKLYKCPACGETLQDTTGNFSAPGFPNGYPSYSHCVWRISVTPGEKIVLNFTSMDLFKSRLCWYDYVEVRDGYWRKAPLLGRFCGDKIPEPLVSTDSRLWVEFRSSSNILGKGFFAAYEATCGGDMNKDAGQIQSPNYPDDYRPSKECVWRITVSEGFHVGLTFQAFEIERHDSCAYDYLEVRDGPTEESALIGHFCGYEKPEDVKSSSNRLWMKFVSDGSINKAGFAANFFKEVDECSWPDHGGCEHRCVNTLGSYKCACDPGYELAADKKMCEVACGGFITKLNGTITSPGWPKEYPTNKNCVWQVVAPAQYRISLQFEVFELEGNDVCKYDFVEVRSGLSPDAKLHGRFCGSETPEVITSQSNNMRVEFKSDNTVSKRGFRAHFFSDKDECAKDNGGCQHECVNTFGSYLCRCRNGYWLHENGHDCKEAGCAHKISSVEGTLASPNWPDKYPSRRECTWNISSTAGHRVKLTFNEFEIEQHQECAYDHLEMYDGPDSLAPILGRFCGSKKPDPTVASGSSMFLRFYSDASVQRKGFQAVHSTECGGRLKAEVQTKELYSHAQFGDNNYPSEARCDWVIVAEDGYGVELTFRTFEVEEEADCGYDYMEAYDGYDSSAPRLGRFCGSGPLEEIYSAGDSLMIRFRTDDTINKKGFHARYTSTKFQDALHMKK

SEQ ID NO: 7224 - protein, 116 aa, Homo sapiens
MASTVVAVGLTIAAAGFAGRYVLQAMKHMEPQVKQVFQSLPKSAFSGGYYRGGFEPKMTKREAALILGVSPTANKGKIRDAHRRIMLLNHPDKGGSPYIAAKINEAKDLLEGQAKK

SEQ ID NO: 7225 - protein, 91 aa, Homo sapiens
MKHMEPQVKQVFQSLPKSAFSGGYYRGGFEPKMTKREAALILGVSPTANKGKIRDAHRRIMLLNHPDKGGSPYIAAKINEAKDLLEGQAKK

SEQ ID NO: 7226 - protein, 800 aa, Homo sapiens
MAAAASVTGRVTWAASPMRSLGLGRRLSLPGPRLDAVTAAVNPSLSDHGNGLGRGTRGSGCSGGSLVADWGGGAAAAAAVALALAPALSTMRRGSSESELAARWEAEAVAAAKAAAKAEAEATAETVAEQVRVDAGAAGEPECKAGEEQPKVLAPAPAQPSAAEEGNTQVLQRPPPTLPPSKPKPVQGLCPHGKPRDKGRSCKRSSGHGSGENGSQRPVTVDSSKARTSLDALKISIRQLKWKEFPFGRRLPCDIYWHGVSFHDNDIFSGQVNKFPGMTEMVRKITLSRAVRTMQNLFPEEYNFYPRSWILPDEFQLFVAQVQMVKDDDPSWKPTFIVKPDGGCQGDGIYLIKDPSDIRLAGTLQSRPAVVQEYICKPLLIDKLKFDIRLYVLLKSLDPLEIYIAKDGLSRFCTEPYQEPTPKNLHRIFMHLTNYSLNIHSGNFIHSDSASTGSKRTFSSILCRLSSKGVDIKKVWSDIISVVIKTVIALTPELKVFYQSDIPTGRPGPTCFQILGFDILLMKNLKPILLEVNANPSMRIEHEHELSPGVFENVPSLVDEEVKVAVIRDTLRLMDPLKKKRENQSQQLEKPFAGKEDALDGELTSAPDCNANPEAHLPSICLKQVFPKYAKQFNYLRLVDRMANLFIRFLGIKGTMKLGPTGFRTFIRSCKLSSSSLSMAAVDILYIDITRRWNSMTLDQRDSGMCLQAFVEAFFFLAQRKFKMLPLHEQVASLIDLCEYHLSLLDEKRLVCGRGVPSGGRPPHRGPPQEPSPSAQPAGDNPPPRTSCANKLSHPRHTLS

SEQ ID NO: 7227 - protein, 538 aa, Homo sapiens
MAAAASVTGRVTWAASPMRSLGLGRRLSLPGPRLDAVTAAVNPSLSDHGNGLGRGTRGSGCSGGSLVADWGGGAAAAAAVALALAPALSTMRRGSSESELAARWEAEAVAAAKAAAKAEAEATAETVAEQVRVDAGAAGEPECKAGEEQPKVLAPAPAQPSAAEEGNTQVLQRPPPTLPPSKPKPVQGLCPHGKPRDKGRSCKRSSGHGSGENGSQRPVTVDSSKARTSLDALKISIRQLKWKEFPFGRRLPCDIYWHGVSFHDNDIFSGQVNKFPGMTEMVRKITLSRAVRTMQNLFPEEYNFYPRSWILPDEFQLFVAQVQMVKDDDPSWKPTFIVKPDGGCQGDGIYLIKDPSDIRLAGTLQSRPAVVQEYICKPLLIDKLKFDIRLYVLLKSLDPLEIYIAKDGLSRFCTEPYQEPTPKNLHRIFMHLTNYSLNIHSGNFIHSDSASTGSKRTFSSILCRLSSKGVDIKKVWSDIISVVIKTVIALTPELKVFYQSDIPTGRPGPTCFQVTIASSQPAFPALTGLKRALWLRVG

SEQ ID NO: 7228 - protein, 592 aa, Homo sapiens
MASVVVKTIWQSKEIHEAGDTPTGVESCSQLVPEAPRRVTSRAKGIPKKKKAVSFHGVEPQMSHQPMHWCLNLKRSSACTNVSLLNLAAMEPTDSTGTDSTVEDLSGQLTLAGPPASPTLPWDPDDADITEILSGVNSGLVRAKDSITSLKEKTNRVNQHVQSLQSECSVLSENLERRRQEAEELEGYCIQLKENCWKVTRSVEDAEIKTNVLKQNSALLEEKLRYLQQQLQDETPRRQEAELQEPEEKQEPEEKQEPEEKQKPEAGLSWNSLGPAATSQGCPGPPGSPDKPSRPHGLVPAGWGMGPRAGEGPYVSEQELQKLFTGIEELRREVSSLTARWHQEEGAVQEALRLLGGLGGRVDGFLGQWERAQREQAQTARDLQELRGRADELCTMVERSAVSVASLRSELEGLGPLKPILEEFGRQFQNSRRGPDLSMNLDRSHQGNCARCASQGSQLSTESLQQLLDRALTSLVDEVKQRGLTPACPSCQRLHKKILELERQALAKHVRAEALSSTLRLAQDEALRAKNLLLTDKMKPEEKMATLDHLHLKMCSLHDHLSNLPLEGSTGTMGGGSSAGTPPKQGGSAPEQ

SEQ ID NO: 7229 - protein, 386 aa, Homo sapiens
MGDSCPAVTFRSQKENRAGLQEKLRYLQQQLQDETPRRQEAELQEPEEKQEPEEKQKPEAGLSWNSLGPAATSQGCPGPPGSPDKPSRPHGLVPAGWGMGPRAGEGPYVSEQELQKLFTGIEELRREVSSLTARWHQEEGAVQEALRLLGGLGGRVDGFLGQWERAQREQAQTARDLQELRGRADELCTMVERSAVSVASLRSELEGLGPLKPILEEFGRQFQNSRRGPDLSMNLDRSHQGNCARCASQGSQLSTESLQQLLDRALTSLVDEVKQRGLTPACPSCQRLHKKILELERQALAKHVRAEALSSTLRLAQDEALRAKNLLLTDKMKPEEKMATLDHLHLKMCSLHDHLSNLPLEGSTGTMGGGSSAGTPPKQGGSAPEQ

SEQ ID NO: 7230 - protein, 530 aa, Homo sapiens
MSLKWTSVFLLIQLSCYFSSGSCGKVLVWPTEYSHWINMKTILEELVQRGHEVTVLTSSASTLVNASKSSAIKLEVYPTSLTKNYLEDSLLKILDRWIYGVSKNTFWSYFSQLQELCWEYYDYSNKLCKDAVLNKKLMMKLQESKFDVILADALNPCGELLAELFNIPFLYSLRFSVGYTFEKNGGGFLFPPSYVPVVMSELSDQMIFMERIKNMIHMLYFDFWFQIYDLKKWDQFYSEVLGRPTTLFETMGKAEMWLIRTYWDFEFPRPFLPNVDFVGGLHCKPAKPLPKEMEEFVQSSGENGIVVFSLGSMISNMSEESANMIASALAQIPQKVLWRFDGKKPNTLGSNTRLYKWLPQNDLLGHPKTKAFITHGGTNGIYEAIYHGIPMVGIPLFADQHDNIAHMKAKGAALSVDIRTMSSRDLLNALKSVINDPVYKENVMKLSRIHHDQPMKPLDRAVFWIEFVMRHKGAKHLRVAAHNLTWIQYHSLDVIAFLLACVATVIFIITKFCLFCFRKLAKKGKKKKRD

SEQ ID NO: 7231 - protein, 843 aa, Homo sapiens
MWTPELAILRGFPTEAERQQWKQEGVVGSESGSFLQLLLEGNYEAIFLNSMTQNIFNSTTTAEEKIDSYLEKQVVTFLDYSTDLDTTERQQLIFLLGVSSLQLFVQSNWTGPPVDLHPQDFLSSVLFQQFSEVKGLDAFVLSLLTLDGESIYSLTSKPILLLLARIILVNVRHKLTAIQSLPWWTLRCVNIHQHLLEERSPLLFTLAENCIDQVMKLQNLFVDDSGRYLAIQFHLECAYVFLYYYEYRKAKDQLDIAKDISQLQIDLTGALGKRTRFQENYVAQLILDVRREGDVLSNCEFTPAPTPQEHLTKNLELNDDTILNDIKLADCEQFQMPDLCAEEIAIILGICTNFQKNNPVHTLTEVELLAFTSCLLSQPKFWAIQTSALILRTKLEKGSTRRVERAMRQTQALADQFEDKTTSVLERLKIFYCCQVPPHWAIQRQLASLLFELGCTSSALQIFEKLEMWEDVVICYERAGQHGKAEEILRQELEKKETPSLYCLLGDVLGDHSCYDKAWELSRYRSARAQRSKALLHLRNKEFQECVECFERSVKINPMQLGVWFSLGCAYLALEDYQGSAKAFQRCVTLEPDNAEAWNNLSTSYIRLKQKVKAFRTLQEALKCNYEHWQIWENYILTSTDVGEFSEAIKAYHRLLDLRDKYKDVQVLKILVRAVIDGMTDRSGDVATGLKGKLQELFGRVTSRVTNDGEIWRLYAHVYGNGQSEKPDENEKAFQCLSKAYKCDTQSNCWEKDITSFKEVVQRALGLAHVAIKCSKNKSSSQEAVQMLSSVRLNLRGLLSKAKQLFTDVATGEMSRELADDITAMDTLVTELQDLSNQFRNQY

SEQ ID NO: 7232 - protein, 68 aa, Homo sapiens
MKLQTLMDWEEAHEKNRKNKRKAEALVAALQTCRVQDPPGTSTDCYLLPVLKPGHFKKNCPSHKKKPP

SEQ ID NO: 7233 - protein, 529 aa, Homo sapiens
MTLKWTSVLLLIHLSCYFSSGSCGKVLVWAAEYSHWMNMKTILKELVQRGHEVTVLASSASILFDPNDASTLKFEVYPTSLTKTEFENIIMQQVKRWSDIRKDSFWLYFSQEQEILWELYDIFRNFCKDVVSNKKVMKKLQESRFDIVFADAVFPCGELLAALLNIRFVYSLRFTPGYTIERHSGGLIFPPSYIPIVMSKLSDQMTFMERVKNMIYVLYFDFWFQMSDMKKWDQFYSEVLGRPTTLFETMGKADIWLMRNSWSFQFPHPFLPNVDFVGGFHCKPAKPLPKEMEEFVQSSGENGVVVFSLGSVISNMTAERANVIATALAKIPQKVLWRFDGNKPDALGLNTRLYKWIPQNDLLGHPKTRAFITHGGANGIYEAIYHGIPMVGIPLFFDQPDNIAHMKAKGAAVRLDFNTMSSTDLLNALKTVINDPLYKENIMKLSRIQHDQPVKPLDRAVFWIEFVMPHKGAKHLRVAAHDLTWFQYHSLDVIGFLLACVATVIFIITKFCLFCFWKFARKGKKGKRD

SEQ ID NO: 7234 - protein, 1316 aa, Homo sapiens
MDSQELKTLINYYCQERYFHHVLLVASEGIKRYGSDPVFRFYHAYGTLMEGKTQEALREFEAIKNKQDVSLCSLLALIYAHKMSPNPDREAILESDARVKEQRKGAGEKALYHAGLFLWHIGRHDKAREYIDRMIKISDGSKQGHVLKAWLDITRGKEPYTKKALKYFEEGLQDGNDTFALLGKAQCLEMRQNYSGALETVNQIIVNFPSFLPAFVKKMKLQLALQDWDQTVETAQRLLLQDSQNVEALRMQALYYVCREGDIEKASTKLENLGNTLDAMEPQNAQLFYNITLAFSRTCGRSQLILQKIQTLLERAFSLNPQQSEFATELGYQMILQGRVKEALKWYKTAMTLDETSVSALVGFIQCQLIEGQLQDADQQLEFLNEIQQSIGKSAELIYLHAVLAMKKNKRQEEVINLLNDVLDTHFSQLEGLPLGIQYFEKLNPDFLLEIVMEYLSFCPMQPASPGQPLCPLLRRCISVLETVVRTVPGLLQTVFLIAKVKYLSGDIEAAFNNLQHCLEHNPSYADAHLLLAQVYLSQEKVKLCSQSLELCLSYDFKVRDYPLYHLIKAQSQKKMGEIADAIKTLHMAMSLPGMKRIGASTKSKDRKTEVDTSHRLSIFLELIDVHRLNGEQHEATKVLQDAIHEFSGTSEEVRVTIANADLALAQGDIERALSILQNVTAEQPYFIEAREKMADIYLKHRKDKMLYITCFREIAERMANPRSFLLLGDAYMNILEPEEAIVAYEQALNQNPKDGTLASKMGKALIKTHNYSMAITYYEAALKTGQKNYLCYDLAELLLKLKWYDKAEKVLQHALAHEPVNELSALMEDGRCQVLLAKVYSKMEKLGDAITALQQARELQARVLKRVQMEQPDAVPAQKHLAAEICAEIAKHSVAQRDYEKAIKFYREALVHCETDNKIMLELARLYLAQDDPDSCLRQCALLLQSDQDNEAATMMMADLMFRKQDYEQAVFHLQQLLERKPDNYMTLSRLIDLLRRCGKLEDVPRFFSMAEKRNSRAKLEPGFQYCKGLYLWYTGEPNDALRHFNKARKDRDWGQNALYNMIEICLNPDNETVGGEVFENLDGDLGNSTEKQESVQLAVRTAEKLLKELKPQTVQGHVQLRIMENYCLMATKQKSNVEQALNTFTEIAASEKEHIPALLGMATAYMILKQTPRARNQLKRIAKMNWNAIDAEEFEKSWLLLADIYIQSAKYDMAEDLLKRCLRHNRSCCKAYEYMGYIMEKEQAYTDAALNYEMAWKYSNRTNPAVGYKLAFNYLKAKRYVDSIDICHQVLEAHPTYPKIRKDILDKARASLRP

SEQ ID NO: 7235 - protein, 482 aa, Homo sapiens
MDSQELKTLINYYCQERYFHHVLLVASEGIKRYGSDPVFRFYHAYGTLMEGKTQEALREFEAIKNKQDVSLCSLLALIYAHKMSPNPDREAILESDARVKEQRKGAGEKALYHAGLFLWHIGRHDKAREYIDRMIKISDGSKQGHVLKAWLDITRGKEPYTKKALKYFEEGLQDGNDTFALLGKAQCLEMRQNYSGALETVNQIIVNFPSFLPAFVKKMKLQLALQDWDQTVETAQRLLLQDSQNVEALRMQALYYVCREGDIEKASTKLENLGNTLDAMEPQNAQLFYNITLAFSRTCGRSQLILQKIQTLLERAFSLNPQQSEFATELGYQMILQGRVKEALKWYKTAMTLDETSVSALVGFIQCQLIEGQLQDADQQLEFLNEIQQSIGKSAELIYLHAVLAMKKNKRQEEVINLLNDVLDTHFSQLEGLPLGIQYFEKLNPDFLLEIVMEYLSFCPMQVSNYGTYFQGCVYLMFYERT

SEQ ID NO: 7236 - protein, 248 aa, Homo sapiens
MLRNNKTIIIKYFLNLINGAFLVLGLLFMGFGAWLLLDRNNFLTAFDENNHFIVPISQILIGMGSSTVLFCLLGYIGIHNEIRWLLIVYAVLITWTFAVQVVLSAFIITKKEEVQQLWHDKIDFVISEYGSKDKPEDITKWTILNALQKTLQCCGQHNYTDWIKNKNKENSGQVPCSCTKSTLRKWFCDEPLNATYLEGCENKISAWYNVNVLTLIGINFGLLTSEVFQVSLTVCFFKNIKNIIHAEM

SEQ ID NO: 7237 - protein, 1090 aa, Homo sapiens
MATLLSHPQQRPPFLRQAIKIRRRRVRDLQDPPPQMAPEIQPPSHHFSPEQRALLYEDALYTVLHRLGHPEPNHVTEASELLRYLQEAFHVEPEEHQQTLQRVRELEKPIFCLKATVKQAKGILGKDVSGFSDPYCLLGIEQGVGVPGGSPGSRHRQKAVVRHTIPEEETHRTQVITQTLNPVWDETFILEFEDITNASFHLDMWDLDTVESVRQKLGELTDLHGLRRIFKEARKDKGQDDFLGNVVLRLQDLRCREDQWYPLEPRTETYPDRGQCHLQFQLIHKRRATSASRSQPSYTVHLHLLQQLVSHEVTQHEAGSTSWDGSLSPQAATVLFLHATQKDLSDFHQSMAQWLAYSRLYQSLEFPSSCLLHPITSIEYQWIQGRLKAEQQEELAASFSSLLTYGLSLIRRFRSVFPLSVSDSPARLQSLLRVLVQMCKMKAFGELCPNTAPLPQLVTEALQTGTTEWFHLKQQHHQPMVQGIPEAGKALLGLVQDVIGDLHQCQRTWDKIFHNTLKIHLFSMAFRELQWLVAKRVQDHTTVVGDVVSPEMGESLFQLYISLKELCQLRMSSSERDGVLALDNFHRWFQPAIPSWLQKTYNEALARVQRAVQMDELVPLGELTKHSTSAVDLSTCFAQISHTARQLDWPDPEEAFMITVKFVEDTCRLALVYCSLIKARARELSSGQKDQGQAANMLCVVVNDMEQLRLVIGKLPAQLAWEALEQRVGAVLEQGQLQNTLHAQLQSALAGLGHEIRTGVRTLAEQLEVGIAKHIQKLVGVRESVLPEDAILPLMKFLEVELCYMNTNLVQENFSSLLTLLWTHTLTVLVEAAASQRSSSLASNRLKIALQNLEICFHAEGCGLPPKALHTATFQALQRDLELQAASSRELIRKYFCSRIQQQAETTSEELGAVTVKASYRASEQKLRVELLSASSLLPLDSNGSSDPFVQLTLEPRHEFPELAARETQKHKKDLHPLFDETFEFLVPAEPCRKAGACLLLTVLDYDTLGADDLEGEAFLPLREVPGLSGSEEPGEVPQTRLPLTYPAPNGDPILQLLEGRKGDREAQVFVRLRRHRAKQASQHALRPAP

SEQ ID NO: 7238 - protein, 363 aa, Homo sapiens
MATLLSHPQQRPPFLRQAIKIRRRRVRDLQDPPPQMAPEIQPPSHHFSPEQRALLYEDALYTVLHRLGHPEPNHVTEASELLRYLQEAFHVEPEEHQQTLQRVRELEKPIFCLKATVKQAKGILGKDVSGFSDPYCLLGIEQGVGVPGGSPGSRHRQKAVVRHTIPEEETHRTQVITQTLNPVWDETFILEFEDITNASFHLDMWDLDTVESVRQKLGELTDLHGLRRIFKEARKDKGQDDFLGNVVLRLQDLRCREDQWYPLEPRTETYPDRGQCHLQFQLIHKRVGRVLGQWPCPALAAVCWVAGLAAPSVRPCLLTEASLQRATSASRSQPSYTVHLHLLQQLVSHEVTQHEVLPSWGWA

SEQ ID NO: 7239 - protein, 1142 aa, Homo sapiens
MATLLSHPQQRPPFLRQAIKIRRRRVRDLQDPPPQMAPEIQPPSHHFSPEQRALLYEDALYTVLHRLGHPEPNHVTEASELLRYLQEAFHVEPEEHQQTLQRVRELEKPIFCLKATVKQAKGILGKDVSGFSDPYCLLGIEQGVGVPGGSPGSRHRQKAVVRHTIPEEETHRTQVITQTLNPVWDETFILEFEDITNASFHLDMWDLDTVESVRQKLGELTDLHGLRRIFKEARKDKGQDDFLGNVVLRLQDLRCREDQWYPLEPRTETYPDRGQCHLQFQLIHKRRATSASRSQPSYTVHLHLLQQLVSHEVTQHEAGSTSWDGSLSPQAATVLFLHATQKDLSDFHQSMAQWLAYSRLYQSLEFPSSCLLHPITSIEYQWIQGRLKAEQQEELAASFSSLLTYGLSLIRRFRSVFPLSVSDSPARLQSLLRVLVQMCKMKAFGELCPNTAPLPQLVTEALQTGTTEWFHLKQQHHQPMVQGIPEAGKALLGLVQDVIGDLHQCQRTWDKIFHNTLKIHLFSMAFRELQWLVAKRVQDHTTVVGDVVSPEMGESLFQLYISLKELCQLRMSSSERDGVLALDNFHRWFQPAIPSWLQKTYNEALARVQRAVQMDELVPLGELTKHSTSAVDLSTCFAQISHTARQLDWPDPEEAFMITVKFVEDTCRLALVYCSLIKARARELSSGQKDQGQAANMLCVVVNDMEQLRLVIGKLPAQLAWEALEQRVGAVLEQGQLQNTLHAQLQSALAGLGHEIRTGVRTLAEQLEVGIAKHIQKLVGVRESVLPEDAILPLMKFLEVELCYMNTNLVQENFSSLLTLLWTHTLTVLVEAAASQRSSSLASNRLKIALQNLEICFHAEGCGLPPKALHTATFQALQRDLELQAASSRELIRKYFCSRIQQQAETTSEELGAVTVKASYRASEQKLRVELLSASSLLPLDSNGSSDPFVQLTLEPRHEFPELAARETQKHKKDLHPLFDETFEFLVPAEPCRKAGACLLLTVLDYDTLGADDLEGEAFLPLREVPGLSGSEEPGEVPQTRLPLTYPAPNGDPILQLLEGRKGDREAQVFVRLRRHRAKQGIGPSVSWPWPICLLAFLFQPLGWGPGSLGPGLQAQSLLEKGEGTLPKMRLQLPWGEGGGHY

SEQ ID NO: 7240 - protein, 3258 aa, Homo sapiens
MVKRKSSEGQEQDGGRGIPLPIQTFLWRQTSAFLRPKLGKQYEASCVSFERVLVENKLHGLSPALSEAIQSISRWELVQAALPHVLHCTATLLSNRNKLGHQDKLGVAETKLLHTLHWMLLEAPQDCNNERFGGTDRGSSWGGSSSAFIHQVENQGSPGQPCQSSSNDEEENNRRKIFQNSMATVELFVFLFAPLVHRIKESDLTFRLASGLVIWQPMWEHRQPGVSGFTALVKPIRNIITAKRSSPINSQSRTCESPNQDARHLEGLQVVCETFQSDSISPKATISGCHRGNSFDGSLSSQTSQERGPSHSRASLVIPPCQRSRYATYFDVAVLRCLLQPHWSEEGTQWSLMYYLQRLRHMLEEKPEKPPEPDIPLLPRPRSSSMVAAAPSLVNTHKTQDLTMKCNEEEKSLSSEAFSKVSLTNLRRSAVPDLSSDLGMNIFKKFKSRKEDRERKGSIPFHHTGKRRPRRMGVPFLLHEDHLDVSPTRSTFSFGSFSGLGEDRRGIEKGGWQTTILGKLTRRGSSDAATEMESLSARHSHSHHTLVSDLPDPSNSHGENTVKEVRSQISTITVATFNTTLASFNVGYADFFNEHMRKLCNQVPIPEMPHEPLACANLPRSLTDSCINYSYLEDTEHIDGTNNFVHKNGMLDLSVVLKAVYLVLNHDISSRICDVALNIVECLLQLGVVPCVEKNRKKSENKENETLEKRPSEGAFQFKGVSGSSTCGFGGPAVSGAGDGGGEEGGGGDGGGGGGDGGGGGGGGGGPYEKNDKNQEKDESTPVSNHRLALTMLIKIVKSLGCAYGCGEGHRGLSGDRLRHQVFRENAQNCLTKLYKLDKMQFRQTMRDYVNKDSLNNVVDFLHALLGFCMEPVTDNKAGFGNNFTTVDNKSTAQNVEGIIVSAMFKSLITRCASTTHELHSPENLGLYCDIRQLVQFIKEAHGNVFRRVALSALLDSAEKLAPGKKVEENEQESKPAGSKRSEAGSIVDKGQVSSAPEECRSFMSGRPSQTPEHDEQMQGANLGRKDFWRKMFKSQSAASDTSSQSEQDTSECTTAHSGTTSDRRARSRSRRISLRKKLKLPIGKRNWLKRSSLSGLADGVEDLLDISSVDRLSFIRQSSKVKFTSAVKLSEGGPGSGMENGRDEEENFFKRLGCHSFDDHLSPNQDGGKSKNVVNLGAIRQGMKRFQFLLNCCEPGTIPDASILAAALDLEAPVVARAALFLECARFVHRCNRGNWPEWMKGHHVNITKKGLSRGRSPIVGNKRNQKLQWNAAKLFYQWGDAIGVRLNELCHGESESPANLLGLIYDEETKRRLRKEDEEEDFLDDSTVNPSKCGCPFALKMAACQLLLEITTFLRETFSCLPRPRTEPLVDLESCRLRLDPELDRHRYERKISFAGVLDENEDSKDSLHSSSHTLKSDAGVEEKKEGSPWSASEPSIEPEGMSNAGAEENYHRNMSWLHVMILLCNQQSFICTHVDYCHPHCYLHHSRSCARLVRAIKLLYGDSVDSLRESSNISSVALRGKKQKECSDKSCLRTPSLKKRVSDANLEGKKDSGMLKYIRLQVMSLSPAPLSLLIKAAPILTEEMYGDIQPAAWELLLSMDEHMAGAAAAMFLLCAVKVPEAVSDMLMSEFHHPETVQRLNAVLKFHTLWRFRYQVWPRMEEGAQQIFKIPPPSINFTLPSPVLGMPSVPMFDPPWVPQCSGSVQDPINEDQSKSFSARAVSRSHQRAEHILKNLQQEEEKKRLGREASLITAIPITQEACYEPTCTPNSEPEEEVEEVTNLASRRLSVSPSCTSSTSHRNYSFRRGSVWSVRSAVSAEDEEHTTEHTPNHHVPQPPQAVFPACICAAVLPIVHLMEDGEVREDGVAVSAVAQQVLWNCLIEDPSTVLRHFLEKLTISNRQDELMYMLRKLLLNIGDFPAQTSHILFNYLVGLIMYFVRTPCEWGMDAISATLTFLWEVVGYVEGLFFKDLKQTMKKEQCEVKLLVTASMPGTKTLVVHGQNECDIPTQLPVHEDTQFEALLKECLEFFNIPESQSTHYFLMDKRWNLIHYNKTYVRDIYPFRRSVSPQLNLVHMHPEKGQELIQKQVFTRKLEEVGRVLFLISLTQKIPTAHKQSHVSMLQEDLLRLPSFPRSAIDAEFSLFSDPQAGKELFGLDTLQKSLWIQLLEEMFLGMPSEFPWGDEIMLFLNVFNGALILHPEDSALLRQYAATVINTAVHFNHLFSLSGYQWILPTMLQVYSDYESNPQLRQAIEFACHQFYILHRKPFVLQLFASVAPLLEFPDAANNGPSKGVSAQCLFDLLQSLEGETTDILDILELVKAEKPLKSLDFCYGNEDLTFSISEAIKLCVTVVAYAPESFRSLQMLMVLEALVPCYLQKLKRQTSQVETVPAAREEIAATAALATSLQALLYSVEVLTRPMTAPQMSRCDQGHKGTTTANHTMSSGVNTRYQEQGAKLHFIRENLHLLEEGQGIPREELDERIAREEFRRPRESLLNICTEFYKHCGPRLKILQNLAGEPRVIALELLDVKSHMRLAEIAHSLLKLAPYDTQTMESRGLRRYIMEMLPITDWTAEAVRPALILILKRLDRMFNKIHKMPTLRRQVEWEPASNLIEGVCLTLQRQPIISFLPHLRSLINVCVNLVMGVVGPSSVADGLPLLHLSPYLSPPLPFSTAVVRLVALQIQALKEDFPLSHVISPFTNQERREGMLLNLLIPFVLTVGSGSKDSPWLEQPEVQLLLQTVINVLLPPRIISTSRSKNFMLESSPAHCSTPGDAGKDLRREGLAESTSQAAYLALKVILVCFERQLGSQWYWLSLQVKEMALRKVGGLALWDFLDFIVRTRIPIFVLLRPFIQCKLLAQPAENHEELSARQHIADQLERRFIPRPLCKSSLIAEFNSELKILKEAVHSGSAYQGKTSISTVGTSTSAYRLSLATMSRSNTGTGTVWEQDSEPSQQASQDTLSRTDEEDEENDSISMPSVVSEQEAYLLSAIGRRRFSSHVSSMSVPQAEVGMLPSQSEPNVLDDSQGLAAEGSLSRVASIQSEPGQQNLLVQQPLGRKRGLRQLRRPLLSRQKTQTEPRNRQGARLSTTRRSIQPKTKPSADQKRSVTFIEAQPEPAAAPTDALPATGQLQGCSPAPSRKPEAMDEPVLTSSPAIVVADLHSVSPKQSENFPTEEGEKEEDTEAQGATAHSPLSAQLSDPDDFTGLETSSLLQHGDTVLHISEENGMENPLLSSQFTFTPTELGKTDAVLDESHV

SEQ ID NO: 7241 - protein, 2603 aa, Homo sapiens
MVKRKSSEGQEQDGGRGIPLPIQTFLWRQTSAFLRPKLGKQYEASCVSFERVLVENKLHGLSPALSEAIQSISRWELVQAALPHVLHCTATLLSNRNKLGHQDKLGVAETKLLHTLHWMLLEAPQDCNNERFGGTDRGSSWGGSSSAFIHQVENQGSPGQPCQSSSNDEEENNRRKIFQNSMATVELFVFLFAPLVHRIKESDLTFRLASGLVIWQPMWEHRQPGVSGFTALVKPIRNIITAKRSSPINSQSRTCESPNQDARHLEGLQVVCETFQSDSISPKATISGCHRGNSFDGSLSSQTSQERGPSHSRASLVIPPCQRSRYATYFDVAVLRCLLQPHWSEEGTQWSLMYYLQRLRHMLEEKPEKPPEPDIPLLPRPRSSSMVAAAPSLVNTHKTQDLTMKCNEEEKSLSSEAFSKVSLTNLRRSAVPDLSSDLGMNIFKKFKSRKEDRERKGSIPFHHTGKRRPRRMGVPFLLHEDHLDVSPTRSTFSFGSFSGLGEDRRGIEKGGWQTTILGKLTRRGSSDAATEMESLSARHSHSHHTLVSDLPDPSNSHGENTVKEVRSQISTITVATFNTTLASFNVGYADFFNEHMRKLCNQVPIPEMPHEPLACANLPRSLTDSCINYSYLEDTEHIDGTNNFVHKNGMLDLSVVLKAVYLVLNHDISSRICDVALNIVECLLQLGVVPCVEKNRKKSENKENETLEKRPSEGAFQFKGVSGSSTCGFGGPAVSGAGDGGGEEGGGGDGGGGGGDGGGGGGGGGGPYEKNDKNQEKDESTPVSNHRLALTMLIKIVKSLGCAYGCGEGHRGLSGDRLRHQVFRENAQNCLTKLYKLDKMQFRQTMRDYVNKDSLNNVVDFLHALLGFCMEPVTDNKAGFGNNFTTVDNKSTAQNVEGIIVSAMFKSLITRCASTTHELHSPENLGLYCDIRQLVQFIKEAHGNVFRRVALSALLDSAEKLAPGKKVEENEQESKPAGSKRSEAGSIVDKGQVSSAPEECRSFMSGRPSQTPEHDEQMQGANLGRKDFWRKMFKSQSAASDTSSQSEQDTSECTTAHSGTTSDRRARSRSRRISLRKKLKLPIGKRNWLKRSSLSGLADGVEDLLDISSVDRLSFIRQSSKVKFTSAVKLSEGGPGSGMENGRDEEENFFKRLGCHSFDDHLSPNQDGGKSKNVVNLGAIRQGMKRFQFLLNCCEPGTIPDASILAAALDLEAPVVARAALFLECARFVHRCNRGNWPEWMKGHHVNITKKGLSRGRSPIVGNKRNQKLQWNAAKLFYQWGDAIGVRLNELCHGESESPANLLGLIYDEETKRRLRKEDEEEDFLDDSTVNPSKCGCPFALKMAACQLLLEITTFLRETFSCLPRPRTEPLVDLESCRLRLDPELDRHRYERKISFAGVLDENEDSKDSLHSSSHTLKSDAGVEEKKEGSPWSASEPSIEPEGMSNAGAEENYHRNMSWLHVMILLCNQQSFICTHVDYCHPHCYLHHSRSCARLVRAIKLLYGDSVDSLRESSNISSVALRGKKQKECSDKSCLRTPSLKKRVSDANLEGKKDSGMLKYIRLQVMSLSPAPLSLLIKAAPILTEEMYGDIQPAAWELLLSMDEHMAGAAAAMFLLCAVKVPEAVSDMLMSEFHHPETVQRLNAVLKFHTLWRFRYQVWPRMEEGAQQIFKIPPPSINFTLPSPVLGMPSVPMFDPPWVPQCSGSVQDPINEDQSKSFSARAVSRSHQRAEHILKNLQQEEEKKRLGREASLITAIPITQEACYEPTCTPNSEPEEEVEEVTNLASRRLSVSPSCTSSTSHRNYSFRRGSVWSVRSAVSAEDEEHTTEHTPNHHVPQPPQAVFPACICAAVLPIVHLMEDGEVREDGVAVSAVAQQVLWNCLIEDPSTVLRHFLEKLTISNRQDELMYMLRKLLLNIGDFPAQTSHILFNYLVGLIMYFVRTPCEWGMDAISATLTFLWEVVGYVEGLFFKDLKQTMKKEQCEVKLLVTASMPGTKTLVVHGQNECDIPTQLPVHEDTQFEALLKECLEFFNIPESQSTHYFLMDKRWNLIHYNKTYVRDIYPFRRSVSPQLNLVHMHPEKGQELIQKQVFTRKLEEVGRVLFLISLTQKIPTAHKQSHVSMLQEDLLRLPSFPRSAIDAEFSLFSDPQAGKELFGLDTLQKSLWIQLLEEMFLGMPSEFPWGDEIMLFLNVFNGALILHPEDSALLRQYAATVINTAVHFNHLFSLSGYQWILPTMLQVYSDYESNPQLRQAIEFACHQFYILHRKPFVLQLFASVAPLLEFPDAANNGPSKGVSAQCLFDLLQSLEGETTDILDILELVKAEKPLKSLDFCYGNEDLTFSISEAIKLCVTVVAYAPESFRSLQMLMVLEALVPCYLQKLKRQTSQVETVPAAREEIAATAALATSLQALLYSVEVLTRPMTAPQMSRCDQGHKGTTTANHTMSSGVNTRYQEQGAKLHFIRENLHLLEEGQGIPREELDERIAREEFRRPRESLLNICTEFYKHCGPRLKILQNLAGEPRVIALELLDVKSHMRLAEIAHSLLKLAPYDTQTMESRGLRRYIMEMLPITDWTAEAVRPALILILKRLDRMFNKIHKMPTLR

SEQ ID NO: 7242 - protein, 320 aa, Homo sapiens
MVKRKSSEGQEQDGGRGIPLPIQTFLWRQTSAFLRPKLGKQYEASCVSFERVLVENKLHGLSPALSEAIQSISRWELVQAALPHVLHCTATLLSNRNKLGHQDKLGVAETKLLHTLHWMLLEAPQDCNNERFGGTDRGSSWGGSSSAFIHQVENQGSPGQPCQSSSNDEEENNRRKIFQNSMATVELFVFLFAPLVHRIKESDLTFRLASGLVIWQPMWEHRQPGVSGFTALVKPIRNIITAKRSSPINSQSRTCESPNQDARHLEGLQVVCETFQSDSISPKATISGCHRGNSFDGSLSSQTSQERGPSHSRSTFHFPP

SEQ ID NO: 7243 - protein, 3020 aa, Homo sapiens
MVKRKSSEGQEQDGGRGIPLPIQTFLWRQTSAFLRPKLGKQYEASCVSFERVLVENKLHGLSPALSEAIQSISRWELVQAALPHVLHCTATLLSNRNKLGHQDKLGVAETKLLHTLHWMLLEAPQDCNNERFGGTDRGSSWGGSSSAFIHQVENQGSPGQPCQSSSNDEEENNRRKIFQNSMATVELFVFLFAPLVHRIKESDLTFRLASGLVIWQPMWEHRQPGVSGFTALVKPIRNIITAKRSSPINSQSRTCESPNQDARHLEGLQVVCETFQSDSISPKATISGCHRGNSFDGSLSSQTSQERGPSHSRASLVIPPCQRSRYATYFDVAVLRCLLQPHWSEEGTQWSLMYYLQRLRHMLEEKPEKPPEPDIPLLPRPRSSSMVAAAPSLVNTHKTQDLTMKCNEEEKSLSSEAFSKVSLTNLRRSAVPDLSSDLGMNIFKKFKSRKEDRERKGSIPFHHTGKRRPRRMGVPFLLHEDHLDVSPTRSTFSFGSFSGLGEDRRGIEKGGWQTTILGKLTRRGSSDAATEMESLSARHSHSHHTLVSDLPDPSNSHGENTVKEVRSQISTITVATFNTTLASFNVGYADFFNEHMRKLCNQVPIPEMPHEPLACANLPRSLTDSCINYSYLEDTEHIDGTNNFVHKNGMLDLSVVLKAVYLVLNHDISSRICDVALNIVECLLQLGVVPCVEKNRKKSENKENETLEKRPSEGAFQFKGVSGSSTCGFGGPAVSGAGDGGGEEGGGGDGGGGGGDGGGGGGGGGGPYEKNDKNQEKDESTPVSNHRLALTMLIKIVKSLGCAYGCGEGHRGLSGDRLRHQVFRENAQNCLTKLYKLDKMQFRQTMRDYVNKDSLNNVVDFLHALLGFCMEPVTDNKAGFGNNFTTVDNKSTAQNVEGIIVSAMFKSLITRCASTTHELHSPENLGLYCDIRQLVQFIKEAHGNVFRRVALSALLDSAEKLAPGKKVEENEQESKPAGSKRSEAGSIVDKGQVSSAPEECRSFMSGRPSQTPEHDEQMQGANLGRKDFWRKMFKSQSAASDTSSQSEQDTSECTTAHSGTTSDRRARSRSRRISLRKKLKLPIGKRNWLKRSSLSGLADGVEDLLDISSVDRLSFIRQSSKVKFTSAVKLSEGGPGSGMENGRDEEENFFKRLGCHSFDDHLSPNQDGGKSKNVVNLGAIRQGMKRFQFLLNCCEPGTIPDASILAAALDLEAPVVARAALFLECARFVHRCNRGNWPEWMKGHHVNITKKGLSRGRSPIVGNKRNQKLQWNAAKLFYQWGDAIGVRLNELCHGESESPANLLGLIYDEETKRRLRKEDEEEDFLDDSTVNPSKCGCPFALKMAACQLLLEITTFLRETFSCLPRPRTEPLVDLESCRLRLDPELDRHRYERKISFAGVLDENEDSKDSLHSSSHTLKSDAGVEEKKEGSPWSASEPSIEPEGMSNAGAEENYHRNMSWLHVMILLCNQQSFICTHVDYCHPHCYLHHSRSCARLVRAIKLLYGDSVDSLRESSNISSVALRGKKQKECSDKSCLRTPSLKKRVSDANLEGKKDSGMLKYIRLQVMSLSPAPLSLLIKAAPILTEEMYGDIQPAAWELLLSMDEHMAGAAAAMFLLCAVKVPEAVSDMLMSEFHHPETVQRLNAVLKFHTLWRFRYQVWPRMEEGAQQIFKIPPPSINFTLPSPVLGMPSVPMFDPPWVPQCSGSVQDPINEDQSKSFSARAVSRSHQRAEHILKNLQQEEEKKRLGREASLITAIPITQEACYEPTCTPNSEPEEEVEEVTNLASRRLSVSPSCTSSTSHRNYSFRRGSVWSVRSAVSAEDEEHTTEHTPNHHVPQPPQAVFPACICAAVLPIVHLMEDGEVREDGVAVSAVAQQVLWNCLIEDPSTVLRHFLEKLTISNRQDELMYMLRKLLLNIGDFPAQTSHILFNYLVGLIMYFVRTPCEWGMDAISATLTFLWEVVGYVEGLFFKDLKQTMKKEQCEVKLLVTASMPGTKTLVVHGQNECDIPTQLPVHEDTQFEALLKECLEFFNIPESQSTHYFLMDKRWNLIHYNKTYVRDIYPFRRSVSPQLNLVHMHPEKGQELIQKQVFTRKLEEVGRVLFLISLTQKIPTAHKQSHVSMLQEDLLRLPSFPRSAIDAEFSLFSDPQAGKELFGLDTLQKSLWIQLLEEMFLGMPSEFPWGDEIMLFLNVFNGALILHPEDSALLRQYAATVINTAVHFNHLFSLSGYQWILPTMLQVYSDYESNPQLRQAIEFACHQFYILHRKPFVLQLFASVAPLLEFPDAANNGPSKGVSAQCLFDLLQSLEGETTDILDILELVKAEKPLKSLDFCYGNEDLTFSISEAIKLCVTVVAYAPESFRSLQMLMVLEALVPCYLQKLKRQTSQVETVPAAREEIAATAALATSLQALLYSVEVLTRPMTAPQMSRCDQGHKGTTTANHTMSSGVNTRYQEQGAKLHFIRENLHLLEEGQGIPREELDERIAREEFRRPRESLLNICTEFYKHCGPRLKILQNLAGEPRVIALELLDVKSHMRLAEIAHSLLKLAPYDTQTMESRGLRRYIMEMLPITDWTAEAVRPALILILKRLDRMFNKIHKMPTLRRQVEWEPASNLIEGVCLTLQRQPIISFLPHLRSLINVCVNLVMGVVGPSSVADGLPLLHLSPYLSPPLPFSTAVVRLVALQIQALKEDFPLSHVISPFTNQERREGMLLNLLIPFVLTVGSGSKDSPWLEQPEVQLLLQTVINVLLPPRIISTSRSKNFMLESSPAHCSTPGDAGKDLRREGLAESTSQAAYLALKVILVCFERQLGSQWYWLSLQVKEMALRKVGGLALWDFLDFIVRTRIPIFVLLRPFIQCKLLAQPAENHEELSARQHIADQLERRFIPRPLCKSSLIAEFNSELKILKEAVHSGSAYQGKTSISTVGTSTSAYRLSLATMSRSNTGTGTVWEQDSEPSQQASQDTLSRTDEEDEENDSISMPSVVSEQEAYLLSAIGRRRFSSHVSSMSVPQAEVGMLPSQR

SEQ ID NO: 7244 - protein, 685 aa, Homo sapiens
MESRGLRRYIMEMLPITDWTAEAVRPALILILKRLDRMFNKIHKMPTLRRQVEWEPASNLIEGVCLTLQRQPIISFLPHLRSLINVCVNLVMGVVGPSSVADGLPLLHLSPYLSPPLPFSTAVVRLVALQIQALKEDFPLSHVISPFTNQERREGMLLNLLIPFVLTVGSGSKDSPWLEQPEVQLLLQTVINVLLPPRIISTSRSKNFMLESSPAHCSTPGDAGKDLRREGLAESTSQAAYLALKVILVCFERQLGSQWYWLSLQVKEMALRKVGGLALWDFLDFIVRTRIPIFVLLRPFIQCKLLAQPAENHEELSARQHIADQLERRFIPRPLCKSSLIAEFNSELKILKEAVHSGSAYQGKTSISTVGTSTSAYRLSLATMSRSNTGTGTVWEQDSEPSQQASQDTLSRTDEEDEENDSISMPSVVSEQEAYLLSAIGRRRFSSHVSSMSVPQAEVGMLPSQRVASIQSEPGQQNLLVQQPLGRKRGLRQLRRPLLSRQKTQTEPRNRQGARLSTTRRSIQPKTKPSADQKRSVTFIEAQPEPAAAPTDALPATGQLQGCSPAPSRKPEAMDEPVLTSSPAIVVADLHSVSPKQSENFPTEEGEKEEDTEAQGATAHSPLSAQLSDPDDFTGLETSSLLQHGDTVLHISEENGMENPLLSSQFTFTPTELGKTDAVLDESHV

SEQ ID NO: 7245 - protein, 466 aa, Homo sapiens
MESRGLRRYIMEMLPITDWTAEAVRPALILILKRLDRMFNKIHKMPTLRRQVEWEPASNLIEGVCLTLQRQPIISFLPHLRSLINVCVNLVMGVVGPSSVADGLPLLHLSPYLSPPLPFSTAVVRLVALQIQALKEDFPLSHVISPFTNQERREGMLLNLLIPFVLTVGSGSKDSPWLEQPEVQLLLQTVINVLLPPRIISTSRSKNFMLESSPAHCSTPGDAGKDLRREGLAESTSQAAYLALKVILVCFERQLGSQWYWLSLQVKEMALRKVGGLALWDFLDFIVRTRIPIFVLLRPFIQCKLLAQPAENHEELSARQHIADQLERRFIPRPLCKSSLIAEFNSELKILKEAVHSGSAYQGKTSISTVGTSTSAYRLSLATMSRSNTGTGTVWEQDSEPSQQASQDTLSRTDEEDEENDSISMPSVVSEQEAYLLSAIGRRRFSSHVSSMSVPQAEVGMLPSQR

SEQ ID NO: 7246 - protein, 3234 aa, Homo sapiens
MVKRKSSEGQEQDGGRGIPLPIQTFLWRQTSAFLRPKLGKQYEASCVSFERVLVENKLHGLSPALSEAIQSISRWELVQAALPHVLHCTATLLSNRNKLGHQDKLGVAETKLLHTLHWMLLEAPQDCNNERFGGTDRGSSWGGSSSAFIHQVENQGSPGQPCQSSSNDEEENNRRKIFQNSMATVELFVFLFAPLVHRIKESDLTFRLASGLVIWQPMWEHRQPGVSGFTALVKPIRNIITAKRSSPINSQSRTCESPNQDARHLEGLQVVCETFQSDSISPKATISGCHRGNSFDGSLSSQTSQERGPSHSRASLVIPPCQRSRYATYFDVAVLRCLLQPHWSEEGTQWSLMYYLQRLRHMLEEKPEKPPEPDIPLLPRPRSSSMVAAAPSLVNTHKTQDLTMKCNEEEKSLSSEAFSKVSLTNLRRSAVPDLSSDLGMNIFKKFKSRKEDRERKGSIPFHHTGKRRPRRMGVPFLLHEDHLDVSPTRSTFSFGSFSGLGEDRRGIEKGGWQTTILGKLTRRGSSDAATEMESLSARHSHSHHTLVSDLPDPSNSHGENTVKEVRSQISTITVATFNTTLASFNVGYADFFNEHMRKLCNQVPIPEMPHEPLACANLPRSLTDSCINYSYLEDTEHIDGTNNFVHKNGMLDLSVVLKAVYLVLNHDISSRICDVALNIVECLLQLGVVPCVEKNRKKSENKENETLEKRPSEGAFQFKGVSGSSTCGFGGPAVSGAGDGGGEEGGGGDGGGGGGDGGGGGGGGGGPYEKNDKNQEKDESTPVSNHRLALTMLIKIVKSLGCAYGCGEGHRGLSGDRLRHQAQNCLTKLYKLDKMQFRQTMRDYVNKDSLNNVVDFLHALLGFCMEPVTDNKAGFGNNFTTVDNKSTAQNVEGIIVSAMFKSLITRCASTTHELHSPENLGLYCDIRQLVQFIKEAHGNVFRRVALSALLDSAEKLAPGKKVEENEQESKPAGSKRSEAGSIVDKGQVSSAPEECRSFMSGRPSQTPEHDEQMQGANLGRKDFWRKMFKSQSAASDTSSQSEQDTSECTTAHSGTTSDRRARSRSRRISLRKKLKLPIGKRNWLKRSSLSGLADGVEDLLDISSVDRLSFIRQSSKVKFTSAVKLSEGGPGSGMENGRDEEENFFKRLGCHSFDDHLSPNQDGGKSKNVVNLGAIRQGMKRFQFLLNCCEPGTIPDASILAAALDLEAPVVARAALFLECARFVHRCNRGNWPEWMKGHHVNITKKGLSRGRSPIVGNKRNQKLQWNAAKLFYQWGDAIGVRLNELCHGESESPANLLGLIYDEETKRRLRKEDEEEDFLDDSTVNPSKCGCPFALKMAACQLLLEITTFLRETFSCLPRPRTEPLVDLESCRLRLDPELDRHRYERKISFAGVLDENEDSKDSLHSSSHTLKSDAGVEEKKEGSPWSASEPSIEPEGMSNAGAEENYHRNMSWLHVMILLCNQQSFICTHVDYCHPHCYLHHSRSCARLVRAIKLLYGDSVDSLRESSNISSVALRGKKQKECSDKSCLRTPSLKKRVSDANLEGKKDSGMLKYIRLQVMSLSPAPLSLLIKAAPILTEEMYGDIQPAAWELLLSMDEHMAGAAAAMFLLCAVKVPEAVSDMLMSEFHHPETVQRLNAVLKFHTLWRFRYQVWPRMEEGAQQIFKIPPPSINFTLPSPVLGMPSVPMFDPPWVPQCSGSVQDPINEDQSKSFSARAVSRSHQRAEHILKNLQQEEEKKRLGREASLITAIPITQEACYEPTCTPNSEPEEEVEEVTNLASRRLSVSPSCTSSTSHRNYSFRRGSVWSVRSAVSAEDEEHTTEHTPNHHVPQPPQAVFPACICAAVLPIVHLMEDGEVREDGVAVSAVAQQVLWNCLIEDPSTVLRHFLEKLTISNRQDELMYMLRKLLLNIGDFPAQTSHILFNYLVGLIMYFVRTPCEWGMDAISATLTFLWEVVGYVEGLFFKDLKQTMKKEQCEVKLLVTASMPGTKTLVVHGQNECDIPTQLPVHEDTQFEALLKECLEFFNIPESQSTHYFLMDKRWNLIHYNKTYVRDIYPFRRSVSPQLNLVHMHPEKGQELIQKQVFTRKLEEVGRVLFLISLTQKIPTAHKQSHVSMLQEDLLRLPSFPRSAIDAEFSLFSDPQAGKELFGLDTLQKSLWIQLLEEMFLGMPSEFPWGDEIMLFLNVFNGALILHPEDSALLRQYAATVINTAVHFNHLFSLSGYQWILPTMLQVYSDYESNPQLRQAIEFACHQFYILHRKPFVLQLFASVAPLLEFPDAANNGPSKGVSAQCLFDLLQSLEGETTDILDILELVKAEKPLKSLDFCYGNEDLTFSISEAIKLCVTVVAYAPESFRSLQMLMVLEALVPCYLQKLKRQTSQVETVPAAREEIAATAALATSLQALLYSVEVLTRPMTAPQMSRCDQGHKGTTTANHTMSSGVNTRYQEQGAKLHFIRENLHLLEEGQGIPREELDERIAREEFRRPRESLLNICTEFYKHCGPRLKILQNLAGEPRVIALELLDVKSHMRLAEIAHSLLKLAPYDTQTMESRGLRRYIMEMLPITDWTAEAVRPALILILKRLDRMFNKIHKMPTLRRQVEWEPASNLIEGVCLTLQRQPIISFLPHLRSLINVCVNLVMGVVGPSSVADGLPLLHLSPYLSPPLPFSTAVVRLVALQIQALKEDFPLSHVISPFTNQERREGMLLNLLIPFVLTVGSGSKDSPWLEQPEVQLLLQTVINVLLPPRIISTSRSKNFMLESSPAHCSTPGDAGKDLRREGLAESTSQAAYLALKVILVCFERQLGSQWYWLSLQVKEMALRKVGGLALWDFLDFIVRTRIPIFVLLRPFIQCKLLAQPAENHEELSARQHIADQLERRFIPRPLCKSSLIAEFNSELKILKEAVHSGSAYQGKTSISTVGTSTSAYRLSLATMSRSNTGTGTVWEQDSEPSQQASQDTLSRTDEEDEENDSISMPSVVSEQEAYLLSAIGRRRFSSHVSSMSVPQAEVGMLPSQRVASIQSEPGQQNLLVQQPLGRKRGLRQLRRPLLSRQKTQTEPRNRQGARLSTTRRSIQPKTKPSADQKRSVTFIEAQPEPAAAPTDALPATGQLQGCSPAPSRKPEAMDEPVLTSSPAIVVADLHSVSPKQSENFPTEEGEKEEDTEAQGATAHSPLSAQLSDPDDFTGLETSSLLQHGDTVLHISEENGMENPLLSSQFTFTPTELGKTDAVLDESHV

SEQ ID NO: 7247 - protein, 329 aa, Homo sapiens
MTGNAGEWCLMESDPGVFTELIKGFGCRGAQVEEIWSLEPENFEKLKPVHGLIFLFKWQPGEEPAGSVVQDSRLDTIFFAKQVINNACATQAIVSVLLNCTHQDVHLGETLSEFKEFSQSFDAAMKGLALSNSDVIRQVHNSFARQQMFEFDTKTSAKEEDAFHFVSYVPVNGRLYELDGLREGPIDLGACNQDDWISAVRPVIEKRIQKYSEGEIRFNLMAIVSDRKMIYEQKIAELQRQLAEEEPMDTDQGNSMLSAIQSEVAKNQMLIEEEVQKLKRYKIENIRRKHNYLPFIMELLKTLAEHQQLIPLVEKAKEKQNAKKAQETK

SEQ ID NO: 7248 - protein, 316 aa, Homo sapiens
MTGNAGEWCLMESDPGVFTELIKGFGCRGAQVEEIWSLEPENFEKLKPVHGLIFLFKWQPGEEPAGSVVQDSRLDTIFFAKQVINNACATQAIVSVLLNCTHQDVHLGETLSEFKEFSQSFDAAMKGLALSNSDVIRQVHNSFARQQMFEFDTKTSAKEEDAFHFVSYVPVNGRLYELDGLREGPIDLGACNQDDWISAVRPVIEKRIQKYSEGEIRFNLMAIVSDRKMIYEQKIAELQRQLAEEPMDTDQGNSMLSAIQSEVAKNQMLIEEEVQKLKRYKIENIRRKHNYLPFIMELLKTLAEHQQLIPLVEKGK

SEQ ID NO: 7249 - protein, 328 aa, Homo sapiens
MTGNAGEWCLMESDPGVFTELIKGFGCRGAQVEEIWSLEPENFEKLKPVHGLIFLFKWQPGEEPAGSVVQDSRLDTIFFAKQVINNACATQAIVSVLLNCTHQDVHLGETLSEFKEFSQSFDAAMKGLALSNSDVIRQVHNSFARQQMFEFDTKTSAKEEDAFHFVSYVPVNGRLYELDGLREGPIDLGACNQDDWISAVRPVIEKRIQKYSEGEIRFNLMAIVSDRKMIYEQKIAELQRQLAEEPMDTDQGNSMLSAIQSEVAKNQMLIEEEVQKLKRYKIENIRRKHNYLPFIMELLKTLAEHQQLIPLVEKAKEKQNAKKAQETK

SEQ ID NO: 7250 - protein, 326 aa, Homo sapiens
MTGNAGEWCLMESDPGVFTELIKGFGCRGAQVEEIWSLEPENFEKLKPVHGLIFLFKWQPGEEPAGSVVQDSRLDTIFFAKQVINNACATQAIVSVLLNCTHQDVHLGETLSEFKEFSQSFDAAMKGLALSNSDVIRQVHNSFARQQMFEFDTKTSAKEEDAFHFVSYVPVNGRLYELDGLREGPIDLGACNQDDWISAVRPVIEKRIQKYSEGEIRFNLMAIVSDRKMIYEQKIAELQRQLAEEPMDTDQGNSMLSAIQSEVAKNQMLIEEEVQKLKRYKIENIRRKHNYLPFIMELLKTLAEHQQLIPLVEKFEKHFEKTLLGK

SEQ ID NO: 7251 - protein, 530 aa, Homo sapiens
MEEDSLYLGGEWQFNHFSKLTSSRPDAAFAEIQRTSLPEKSPLSCETRVDLCDDLAPVARQLAPREKLPLSNRRPAAVGAGLQNMGNTCYVNASLQCLTYTPPLANYMLSREHSQTCHRHKGCMLCTMQAHITRALHNPGHVIQPSQALAAGFHRGKQEDAHEFLMFTVDAMKKACLPGHKQVDHHSKDTTLIHQIFGGYWRSQIKCLHCHGISDTFDPYLDIALDIQAAQSVQQALEQLVKPEELNGENAYHCGVCLQRAPASKMLTLLTSAKVLILVLKRFSDVTGNKIAKNVQYPECLDMQPYMSQPNTGPLVYVLYAVLVHAGWSCHNGHYFSYVKAQEGQWYKMDDAEVTASSITSVLSQQAYVLFYIQKSEWERHSESVSRGREPRALGAEDTDRRATQGELKRDHPCLQAPELDEHLVERATQESTLDHWKFLQEQNKTKPEFNVRKVEGTLPPDVLVIHQSKYKCGMKNHHPEQQSSLLKLSSTTPTHQESMNTGTLASLRGRARRSKGKNKHSKRALLVCQ

SEQ ID NO: 7252 - protein, 1187 aa, Homo sapiens
MPLRHWGMARGSKPVGDGAQPMAAMGGLKVLLHWAGPGGGEPWVTFSESSLTAEEVCIHIAHKVGITPPCFNLFALFDAQAQVWLPPNHILEIPRDASLMLYFRIRFYFRNWHGMNPREPAVYRCGPPGTEASSDQTAQGMQLLDPASFEYLFEQGKHEFVNDVASLWELSTEEEIHHFKNESLGMAFLHLCHLALRHGIPLEEVAKKTSFKDCIPRSFRRHIRQHSALTRLRLRNVFRRFLRDFQPGRLSQQMVMVKYLATLERLAPRFGTERVPVCHLRLLAQAEGEPCYIRDSGVAPTDPGPESAAGPPTHEVLVTGTGGIQWWPVEEEVNKEEGSSGSSGRNPQASLFGKKAKAHKAVGQPADRPREPLWAYFCDFRDITHVVLKEHCVSIHRQDNKCLELSLPSRAAALSFVSLVDGYFRLTADSSHYLCHEVAPPRLVMSIRDGIHGPLLEPFVQAKLRPEDGLYLIHWSTSHPYRLILTVAQRSQAPDGMQSLRLRKFPIEQQDGAFVLEGWGRSFPSVRELGAALQGCLLRAGDDCFSLRRCCLPQPGETSNLIIMRGARASPRTLNLSQLSFHRVDQKEITQLSHLGQGTRTNVYEGRLRVEGSGDPEEGKMDDEDPLVPGRDRGQELRVVLKVLDPSHHDIALAFYETASLMSQVSHTHLAFVHGVCVRGPENIMVTEYVEHGPLDVWLRRERGHVPMAWKMVVAQQLASALSYLENKNLVHGNVCGRNILLARLGLAEGTSPFIKLSDPGVGLGALSREERVERIPWLAPECLPGGANSLSTAMDKWGFGATLLEICFDGEAPLQSRSPSEKEHFYQRQHRLPEPSCPQLATLTSQCLTYEPTQRPSFRTILRDLTRLQPHNLADVLTVNPDSPASDPTVFHKRYLKKIRDLGEGHFGKVSLYCYDPTNDGTGEMVAVKALKADCGPQHRSGWKQEIDILRTLYHEHIIKYKGCCEDQGEKSLQLVMEYVPLGSLRDYLPRHSIGLAQLLLFAQQICEGMAYLHAQHYIHRDLAARNVLLDNDRLVKIGDFGLAKAVPEGHEYYRVREDGDSPVFWYAPECLKEYKFYYASDVWSFGVTLYELLTHCDSSQSPPTKFLELIGIAQGQMTVLRLTELLERGERLPRPDKCPCEVYHLMKNCWETEASFRPTFENLIPILKTVHEKYQGQAPSVFSVC

SEQ ID NO: 7253 - protein, 113 aa, Homo sapiens
MGGLEPCSRLLLLPLLLAVSGLRPVQAQAQSDCSCSTVSPGVLAGIVMGDLVLTVLIALAVYFLGRLVPRGRGAAEAATRKQRITETESPYQELQGQRSDVYSDLNTQRPYYK

SEQ ID NO: 7254 - protein, 112 aa, Homo sapiens
MGGLEPCSRLLLLPLLLAVSGLRPVQAQAQSDCSCSTVSPGVLAGIVMGDLVLTVLIALAVYFLGRLVPRGRGAAEATRKQRITETESPYQELQGQRSDVYSDLNTQRPYYK

SEQ ID NO: 7255 - protein, 102 aa, Homo sapiens
MGGLEPCSRLLLLPLLLAVSDCSCSTVSPGVLAGIVMGDLVLTVLIALAVYFLGRLVPRGRGAAEAATRKQRITETESPYQELQGQRSDVYSDLNTQRPYYK

SEQ ID NO: 7256 - protein, 259 aa, Homo sapiens
MLPSTSVNSLVQGNGVLNSRDAARHTAGAKRYKYLRRLFRFRQMDFEFAAWQMLYLFTSPQRVYRNFHYRKQTKDQWARDDPAFLVLLSIWLCVSTIGFGFVLDMGFFETIKLLLWVVLIDCVGVGLLIATLMWFISNKYLVKRQSRDYDVEWGYAFDVHLNAFYPLLVILHFIQLFFINHVILTDTFIGYLVGNTLWLVAVGYYIYVTFLGYSALPFLKNTVILLYPFAPLILLYGLSLALGWNFTHTLCSFYKYRVK

SEQ ID NO: 7257 - protein, 229 aa, Homo sapiens
MQIFVKTLTGKTITLEVEPSDTIENVKAKIQDKEGIPPDQQRLIFAGKQLEDGRTLSDYNIQKESTLHLVLRLRGGMQIFVKTLTGKTITLEVEPSDTIENVKAKIQDKEGIPPDQQRLIFAGKQLEDGRTLSDYNIQKESTLHLVLRLRGGMQIFVKTLTGKTITLEVEPSDTIENVKAKIQDKEGIPPDQQRLIFAGKQLEDGRTLSDYNIQKESTLHLVLRLRGGC

SEQ ID NO: 7258 - protein, 560 aa, Homo sapiens
MEFRQEEFRKLAGRALGKLHRLLEKRQEGAETLELSADGRPVTTQTRDPPVVDCTCFGLPRRYIIAIMSGLGFCISFGIRCNLGVAIVSMVNNSTTHRGGHVVVQKAQFSWDPETVGLIHGSFFWGYIVTQIPGGFICQKFAANRVFGFAIVATSTLNMLIPSAARVHYGCVIFVRILQGLVEGVTYPACHGIWSKWAPPLERSRLATTAFCGSYAGAVVAMPLAGVLVQYSGWSSVFYVYGSFGIFWYLFWLLVSYESPALHPSISEEERKYIEDAIGESAKLMNPLTKFSTPWRRFFTSMPVYAIIVANFCRSWTFYLLLISQPAYFEEVFGFEISKVGLVSALPHLVMTIIVPIGGQIADFLRSRRIMSTTNVRKLMNCGGFGMEATLLLVVGYSHSKGVAISFLVLAVGFSGFAISGFNVNHLDIAPRYASILMGISNGVGTLSGMVCPIIVGAMTKHKTREEWQYVFLIASLVHYGGVIFYGVFASGEKQPWAEPEEMSEEKCGFVGHDQLAGSDDSEMEDEAEPPGAPPAPPPSYGATHSTFQPPRPPPPVRDY

SEQ ID NO: 7259 - protein, 493 aa, Homo sapiens
MSGLGFCISFGIRCNLGVAIVSMVNNSTTHRGGHVVVQKAQFSWDPETVGLIHGSFFWGYIVTQIPGGFICQKFAANRVFGFAIVATSTLNMLIPSAARVHYGCVIFVRILQGLVEGVTYPACHGIWSKWAPPLERSRLATTAFCGSYAGAVVAMPLAGVLVQYSGWSSVFYVYGSFGIFWYLFWLLVSYESPALHPSISEEERKYIEDAIGESAKLMNPLTKFSTPWRRFFTSMPVYAIIVANFCRSWTFYLLLISQPAYFEEVFGFEISKVGLVSALPHLVMTIIVPIGGQIADFLRSRRIMSTTNVRKLMNCGGFGMEATLLLVVGYSHSKGVAISFLVLAVGFSGFAISGFNVNHLDIAPRYASILMGISNGVGTLSGMVCPIIVGAMTKHKTREEWQYVFLIASLVHYGGVIFYGVFASGEKQPWAEPEEMSEEKCGFVGHDQLAGSDDSEMEDEAEPPGAPPAPPPSYGATHSTFQPPRPPPPVRDY

SEQ ID NO: 7260 - protein, 548 aa, Homo sapiens
MGSQLALAGLLEKRQEGAETLELSADGRPVTTQTRDPPVVDCTCFGLPRRYIIAIMSGLGFCISFGIRCNLGVAIVSMVNNSTTHRGGHVVVQKAQFSWDPETVGLIHGSFFWGYIVTQIPGGFICQKFAANRVFGFAIVATSTLNMLIPSAARVHYGCVIFVRILQGLVEGVTYPACHGIWSKWAPPLERSRLATTAFCGSYAGAVVAMPLAGVLVQYSGWSSVFYVYGSFGIFWYLFWLLVSYESPALHPSISEEERKYIEDAIGESAKLMNPLTKFSTPWRRFFTSMPVYAIIVANFCRSWTFYLLLISQPAYFEEVFGFEISKVGLVSALPHLVMTIIVPIGGQIADFLRSRRIMSTTNVRKLMNCGGFGMEATLLLVVGYSHSKGVAISFLVLAVGFSGFAISGFNVNHLDIAPRYASILMGISNGVGTLSGMVCPIIVGAMTKHKTREEWQYVFLIASLVHYGGVIFYGVFASGEKQPWAEPEEMSEEKCGFVGHDQLAGSDDSEMEDEAEPPGAPPAPPPSYGATHSTFQPPRPPPPVRDY

SEQ ID NO: 7261 - protein, 365 aa, Homo sapiens
MLPPLPSRLGLLLLLLLCPAHVGGLWWAVGSPLVMDPTSICRKARRLAGRQAELCQAEPEVVAELARGARLGVRECQFQFRFRRWNCSSHSKAFGRILQQDIRETAFVFAITAAGASHAVTQACSMGELLQCGCQAPRGRAPPRPSGLPGTPGPPGPAGSPEGSAAWEWGGCGDDVDFGDEKSRLFMDARHKRGRGDIRALVQLHNNEAGRLAVRSHTRTECKCHGLSGSCALRTCWQKLPPFREVGARLLERFHGASRVMGTNDGKALLPAVRTLKPPGRADLLYAADSPDFCAPNRRTGSPGTRGRACNSSAPDLSGCDLLCCGRGHRQESVQLEENCLCRFHWCCVVQCHRCRVRKELSLCL

SEQ ID NO: 7262 - protein, 283 aa, Homo sapiens
MCNTPTYCDLGKAAKDVFNKGYGFGMVKIDLKTKSCSGVEFSTSGHAYTDTGKASGNLETKYKVCNYGLTFTQKWNTDNTLGTEISWENKLAEGLKLTLDTIFVPNTGKKSGKLKASYKRDCFSVGSNVDIDFSGPTIYGWAVLAFEGWLAGYQMSFDTAKSKLSQNNFALGYKAADFQLHTHVNDGTEFGGSIYQKVNEKIETSINLAWTAGSNNTRFGIAAKYMLDCRTSLSAKVNNASLIGLGYTQTLRPGVKLTLSALIDGKNFSAGGHKVGLGFELEA

SEQ ID NO: 7263 - protein, 284 aa, Homo sapiens
MCNTPTYCDLGKAAKDVFNKGYGFGMVKIDLKTKSCSGVMEFSTSGHAYTDTGKASGNLETKYKVCNYGLTFTQKWNTDNTLGTEISWENKLAEGLKLTLDTIFVPNTGKKSGKLKASYKRDCFSVGSNVDIDFSGPTIYGWAVLAFEGWLAGYQMSFDTAKSKLSQNNFALGYKAADFQLHTHVNDGTEFGGSIYQKVNEKIETSINLAWTAGSNNTRFGIAAKYMLDCRTSLSAKVNNASLIGLGYTQTLRPGVKLTLSALIDGKNFSAGGHKVGLGFELEA

SEQ ID NO: 7264 - protein, 354 aa, Homo sapiens
MYREWVVVNVFMMLYVQLVQGSSNEHGPVKRSSQSTLERSEQQIRAASSLEELLRITHSEDWKLWRCRLRLKSFTSMDSRSASHRSTRFAATFYDIETLKVIDEEWQRTQCSPRETCVEVASELGKSTNTFFKPPCVNVFRCGGCCNEESLICMNTSTSYISKQLFEISVPLTSVPELVPVKVANHTGCKCLPTAPRHPYSIIRRSIQIPEEDRCSHSKKLCPIDMLWDSNKCKCVLQEENPLAGTEDHSHLQEPALCGPHMMFDEDRCECVCKTPCPKDLIQHPKNCSCFECKESLETCCQKHKLFHPDTCSCEDRCPFHTRPCASGKTACAKHCRFPKEKRAAQGPHSRKNP

SEQ ID NO: 7265 - protein, 91 aa, Homo sapiens
MKLAVTLTLVTLALCCSSASAEICPSFQRVIETLLMDTPSSYEAAMELFSPDQDMREAGAQLKKLVDTLPQKPRESIIKLMEKIAQSSLCN

SEQ ID NO: 7266 - protein, 1242 aa, Homo sapiens
MPGLYCPSSWTPLPLTDSWVRACANGPCLSVRARLTYRNPQPQPVDGVFVYPLAEAEVVSGFEAEAAGRRVSFQLQSRRRSQAACCRALGPGLGTPTPRRCAQGHLVLDLAQARSTLVLPTGIIAAAGTMTVTLHSSRELPSRPDGVLHVALPTVLTPLAPPGPPGPPRPPGLCDDSPTSCFGVGSLQEEGLAWEELAAPRDVFSGPARCPAPYTFSFEMLVTGPCLLAGLESPSHALRADAPPHASSAATICVTLAEGHHCDRALEILLHPSEPHQPHLMLEGGSLSSAEYEARVRARRDFQRLQRRDSDGDRQVWFLQRRFHKDILLNPVLALSFCPDLSSKPGHLGTATRELLFLLDSSSVAHKDAIVLAVKSLPPQTLINLAVFGTLVQPLFPESRPCSDDAVQLICESIETLQVPSGPPDVLAALDWAVGQPQHRAYPRQLFLLTAASPMAATTHRTLELMRWHRGTARCFSFGLGPTCHQLLQGLSALSRGQAYFLRPGQRLQPMLVQALRKALEPALSDISVDWFVPDTVEALLTPREIPALYPGDQLLGYCSLFRVDGFRSRPPGGQEPGWQSSGGSVFPSPEEAPSAASPGTEPTGTSEPLGTGTVSAELSSPWAARDSEQSTDALTDPVTDPGPNPSDTAIWRRIFQSSYIREQYVLTHCSASPEPGPGSTGSSESPGSQGPGSPEGSAPLEPPSQQGCRSLAWGEPAGSRSCPLPAPTPAPFKVGALSTEVLGRQHRAALAGRSLSSPPGRANQVPGRPRKPSLGAILDGPSPEPGQQLGQGLDDSGNLLSPAPMDWDMLMEPPFLFTAVPPSGELAPPAVPPQAPRCHVVIRGLCGEQPMCWEVGVGLETLWGPGDGSQPPSPPVREAAWDQALHRLTAASVVRDNEQLALRGGAETTADRGHARRCWLRALQTSKVSSAPSCFTCPVAVDATTREVLPGALQVCSSEPAEPPGTPPASHSHLDAAPLPTVVYSKGLQRGSPAGAWDSDQNGNSKRALGDPATPTEGPRRPPPRPPCRLSMGRRHKLCSPDPGQANNSEGSDHDYLPLVRLQEAPGSFRLDAPFCAAVRISQERLCRASPFAVHRASLSPTSASLPWALLGPGVGQGDSATASCSPSPSSGSEGPGQVDSGRGSDTEASEGAEGLGGTDLRGRTWATAVALAWLEHRCAAAFDEWELTAAKADCWLRAQHLPDGLDLAALKAAARGLFLLLRHWDQNLQLHLLCYSPANV

SEQ ID NO: 7267 - protein, 541 aa, Homo sapiens
MAGAIIENMSTKKLCIVGGILLVFQIIAFLVGGLIAPGPTTAVSYMSVKCVDARKNHHKTKWFVPWGPNHCDKIRDIEEAIPREIEANDIVFSVHIPLPHMEMSPWFQFMLFILQLDIAFKLNNQIRENAEVSMDVSLAYRDDAFAEWTEMAHERVPRKLKCTFTSPKTPEHEGRYYECDVLPFMEIGSVAHKFYLLNIRLPVNEKKKINVGIGEIKDIRLVGIHQNGGFTKVWFAMKTFLTPSIFIIMVWYWRRITMMSRPPVLLEKVIFALGISMTFINIPVEWFSIGFDWTWMLLFGDIRQGIFYAMLLSFWIIFCGEHMMDQHERNHIAGYWKQVGPIAVGSFCLFIFDMCERGVQLTNPFYSIWTTDIGTELAMAFIIVAGICLCLYFLFLCFMVFQVFRNISGKQSSLPAMSKVRRLHYEGLIFRFKFLMLITLACAAMTVIFFIVSQVTEGHWKWGGVTVQVNSAFFTGIYGMWNLYVFALMFLYAPSHKNYGEDQSNGDLGVHSGEELQLTTTITHVDGPTEIYKLTRKEAQE

SEQ ID NO: 7268 - protein, 543 aa, Homo sapiens
MAGAIIENMSTKKLCIVGGILLVFQIIAFLVGGLIGPTTAVSYMSVKCVDARKNHHKTKWFVPWGPNHCDKIRDIEEAIPREIEANDIVFSVHIPLPHMEMSPWFQFMLFILQLDIAFKLNNQIRENAEVSMDVSLAYRDDAFAEWTEMAHERVPRKLKCTFTSPKTPEHEGRYYECDVLPFMEIGSVAHKFYLLNIRLPVNEKKKINVGIGEIKDIRLVGIHQNGGFTKVWFAMKTFLTPSIFIIMVWYWRRITMMSRPPVLLEKVIFALGISMTFINIPVEWFSIGFDWTWMLLFGDIRQGIFYAMLLSFWIIFCGEHMMDQHERNHIAGYWKQVGPIAVGSFCLFIFDMCERGVQLTNPFYSIWTTDIGTELAMAFIIVAGICLCLYFLFLCFMVFQVFRNISGKQSSLPAMSKVRRLHYEGLIFRFKFLMLITLACAAMTVIFFIVSQVTEGHWKWGGVTVQVNSAFFTGIYGMWNLYVFALMFLYAPSHKNYGEDQSNGMQLPCKSREDCALFVSELYQELFSASKYSFINDNAASGI

SEQ ID NO: 7269 - protein, 450 aa, Homo sapiens
MAGAIIENMSTKKLCIVGGILLVFQIIAFLVGGLIGENAEVSMDVSLAYRDDAFAEWTEMAHERVPRKLKCTFTSPKTPEHEGRYYECDVLPFMEIGSVAHKFYLLNIRLPVNEKKKINVGIGEIKDIRLVGIHQNGGFTKVWFAMKTFLTPSIFIIMVWYWRRITMMSRPPVLLEKVIFALGISMTFINIPVEWFSIGFDWTWMLLFGDIRQGIFYAMLLSFWIIFCGEHMMDQHERNHIAGYWKQVGPIAVGSFCLFIFDMCERGVQLTNPFYSIWTTDIGTELAMAFIIVAGICLCLYFLFLCFMVFQVFRNISGKQSSLPAMSKVRRLHYEGLIFRFKFLMLITLACAAMTVIFFIVSQVTEGHWKWGGVTVQVNSAFFTGIYGMWNLYVFALMFLYAPSHKNYGEDQSNGDLGVHSGEELQLTTTITHVDGPTEIYKLTRKEAQE

SEQ ID NO: 7270 - protein, 686 aa, Homo sapiens
MHARLLGLSALLQAAEQSARLYTVAYYFTTGRLLWGWLALAVLLPGFLVQALSYLWFRADGHPGHCSLMMLHLLQLGVWKRHWDAALTSLQKELEAPHRGWLQLQEADLSALRLLEALLQTGPHLLLQTYVFLASDFTDIVPGVSTLFSWSSLSWALVSYTRFMGFMKPGHLAMPWAALFCQQLWRMGMLGTRVLSLVLFYKAYHFWVFVVAGAHWLVMTFWLVAQQSDIIDSTCHWRLFNLLVGAVYILCYLSFWDSPSRNRMVTFYMVMLLENIILLLLATDFLQGASWTSLQTIAGVLSGFLIGSVSLVIYYSLLHPKSTDIWQGCLRKSCGIAGGDKTERRDSPRATDLAGKRTESSGSCQGASYEPTILGKPPTPEQVPPEAGLGTQVAVEDSFLSHHHWLWVKLALKTGNVSKINAAFGDNSPAYCPPAWGLSQQDYLQRKALSAQQELPSSSRDPSTLENSSAFEGVPKAEADPLETSSYVSFASDQQDEAPTQNPAATQGEGTPKEGADAVSGTQGKGTGGQQRGGEGQQSSTLYFSATAEVATSSQQEGSPATLQTAHSGRRLGKSSPAQPASPHPVGLAPFPDTMADISPILGTGPCRGFCPSAGFPGRTLSISELEEPLEPKRELSHHAAVGVWVSLPQLRTAHEPCLTSTPKSESIQTDCSCREQMKQEPSFFI

SEQ ID NO: 7271 - protein, 86 aa, Homo sapiens
MHARLLGLSALLQAAEQSARLYTVAYYFTTGRLLWGWLALAVLLPGFLVQALSYLWFRADGHPGHCSLMMLHLLQLGVWKRPQIHL

SEQ ID NO: 7272 - protein, 200 aa, Homo sapiens
MTSAETASRAAESGGTPVRPCSRPHRAPSPAAPSRPGAPAAGPRKLLVPGLPCLVRGGWPWTRPDSSPFRPAARPRMSPHRSPAVARRCGRPRRRDPRRRRTPALPRPWPGRGGPGRSLLHRHLFIQQLLRTCWPALPRDRTPAPGGTMPGAALAGPGRQASGSPAPQSEGAPPRPWTPLQPGLHHRPPSSSSGLLSSFF

SEQ ID NO: 7273 - protein, 1189 aa, Homo sapiens
MTDSEHAGHDREDGELEDGEIDDAGFEEIQEKEAKENEKQKSEKAYRKSRKKHKKEREKKKSKRRKREKHKHNSPSSDDSSDYSLDSDVEHTESSHKKRTGFYRDYDIPFTQRGHISGSYITSKKGQHNKKFKSKEYDEYSTYSDDNFGNYSDDNFGNYGQETEEDFANQLKQYRQAKETSNIALGSSFSKESGKKQRMKGVQQGIEQRVKSFNVGRGRGLPKKIKRKERGGRTNKGPNVFSVSDDFQEYNKPGKKWKVMTQEFINQHTVEHKGKQICKYFLEGRCIKGDQCKFDHDAELEKRKEICKFYLQGYCTKGENCIYMHNEFPCKFYHSGAKCYQGDNCKFSHDDLTKETKKLLDKVLNTDEELINEDERELEELRKRGITPLPKPPPGVGLLPTPPEHFPFSDPEDDFQTDFSDDFRKIPSLFEIVVKPTVDLAHKIGRKPPAFYTSASPPGPQFQGSSPHPQHIYSSGSSPGPGPNMSQGHSSPVMHPGSPGHHPCAGPPGLPVPQSPPLPPGPPEIVGPQNQAGVLVQPDTSLTPPSMGGAYHSPGFPGHVMKVPRENHCSPGSSYQQSPGEMQLNTNYESLQNPAEFYDNYYAQHSIHNFQPPNNSGDGMWHGEFAQQQPPVVQDSPNHGSGSDGSSTRTGHGPLPVPGLLPAVQRALFVRLTQRYQEDEEQTSTQPHRAPSKEEDDTVNWYSSSEEEEGSSVKSILKTLQKQTETLRNQQQPSTELSTPTDPRLAKEKSKGNQVVDPRLRTIPRQDIRKPSESAPLDLRLAWDPRKLRGNGSGHIGSSVGGAKFDLHHANAGTNVKHKRGDDDDEDTERELREKAFLIPLDASPGIMLQDPRSQLRQFSHIKMDITLTKPNFAKHIVWAPEDLLPVPLPKPDPVSSINLPLPPLIADQRLNRLWNTKSDLHQNTVSIDPKLAAKAKINTTNREGYLEQFGDSHGSGAKLGDPRLQKNFDPRLHRLPNTESHQVVMKDSHASKGAPHLPRSNPGSSQPSGAGTSNSGSGALPPYAPKLSSSAGLPLGTSTSVLSGISLYDPRDHGSSSTSELATASSGENSKNQKKSGGLKSSDKTEPSPGEAILPQKPSPNVGVTLEGPADPQADVPRSSGKVQVPAVHSLPVQALTGLIRPQYSDPRQARQPGQGSPTPDNDPGRETDDKSLKEVFKTFDPTASPFC

SEQ ID NO: 7274 - protein, 400 aa, Homo sapiens
MAAEIQPKPLTRKPILLQRMEGSQEVVNMAVIVPKEEGVISVSEDRTVRVWLKRDSGQYWPSVYHAMPSPCSCMSFNPETRRLSIGLDNGTISEFILSEDYNKMTPVKNYQAHQSRVTMILFVLELEWVLSTGQDKQFAWHCSESGQRLGGYRTSAVASGLQFDVETRHVFIGDHSGQVTILKLEQENCTLVTTFRGHTGGVTALCWDPVQRVLFSGSSDHSVIMWDIGGRKGTAIELQGHNDRVQALSYAQHTRQLISCGGDGGIVVWNMDVERQETPEWLDSDSCQKCDQPFFWNFKQMWDSKKIGLRQHHCRKCGKAVCGKCSSKRSSIPLMGFEFEVRVCDSCHEAITDEERAPTATFHDSKHNIVHVHFDATRGWLLTSGTDKVIKLWDMTPVVS

SEQ ID NO: 7275 - protein, 95 aa, Homo sapiens
MNNSFNKEDRMSSDTMVGSCDRQTKNGAKWHGGVSSLLDFTLIYIQLSTSFQNAGHSFKKQHICSDFEVMDELSCAVYGNKFYYLLPTLTHPSIQ

SEQ ID NO: 7276 - protein, 223 aa, Homo sapiens
MAPAPVPALGTLGCYRFLFNPRQHLGPSFPARRYGAPRRLCFLPQNTGTPLRVLPSVFWSPPSRKKPVLSARNSRMFGHLSPVRIPHLRGKFNLRLPSLDEQVIPARLPKMEVRAEEPKEATEVKDQVETQEQEDNKRGPCSNGEAASTSRPLETQGNPTSPRYNPRPLEGNVQLKSLTENNQTDKAQVHAVSFYSKGHGVASSHSPAGGFPRGRTPPARQHG

SEQ ID NO: 7277 - protein, 810 aa, Homo sapiens
MPNQGEDCYFFFYSTCTKGDSCPFRHCEAAIGNETVCTLWQEGRCFRQVCRFRHMEIDKKRSEIPCYWENQPTGCQKLNCAFHHNRGRYVDGLFLPPSKTVLPTVPESPEEEVKASQLSVQQNKLSVQSNPSPQLRSVMKVESSENVPSPTHPPVVINAADDDEDDDDQFSEEGDETKTPTLQPTPEVHNGLRVTSVRKPAVNIKQGECLNFGIKTLEEIKSKKMKEKSKKQGEGSSGVSSLLLHPEPVPGPEKENVRTVVRTVTLSTKQGEEPLVRLSLTERLGKRKFSAGGDSDPPLKRSLAQRLGKKVEAPETNIDKTPKKAQVSKSLKERLGMSADPDNEDATDKVNKVGEIHVKTLEEILLERASQKRGELQTKLKTEGPSKTDDSTSGARSSSTIRIKTFSEVLAEKKHRQQEAERQKSKKDTTCIKLKIDSEIKKTVVLPPIVASRGQSEEPAGKTKSMQEVHIKTLEEIKLEKALRVQQSSESSTSSPSQHEATPGARRLLRITKRTGMKEEKNLQEGNEVDSQSSIRTEAKEASGETTGVDITKIQVKRCETMREKHMQKQQEREKSVLTPLRGDVASCNTQVAEKPVLTAVPGITRHLTKRLPTKSSQKVEVETSGIGDSLLNVKCAAQTLEKRGKAKPKVNVKPSVVKVVSSPKLAPKRKAVEMHAAVIAAVKPLSSSSVLQEPPAKKAAVAVVPLVSEDKSVTVPEAENPRDSLVLPPTQSSSDSSPPEVSGPSSSQMSMKTRRLSSASTGKPPLSVEDDFEKLIWEISGGKLEAEIDLDPGKDEDDLLLELSEMIDS

SEQ ID NO: 7278 - protein, 2406 aa, Homo sapiens
MDPEQSVKGTKKAEGSPRKRLTKGEAIQTSVSSSVPYPGSGTAATQESPAQELLAPQPFPGPSSVLREGSQEKTGQQQKPPKRPPIEASVHISQLPQHPLTPAFMSPGKPEHLLEGSTWQLVDPMRPGPSGSFVAPGLHPQSQLLPSHASIIPPEDLPGVPKVFVPRPSQVSLKPTEEAHKKERKPQKPGKYICQYCSRPCAKPSVLQKHIRSHTGERPYPCGPCGFSFKTKSNLYKHRKSHAHRIKAGLASGMGGEMYPHGLEMERIPGEEFEEPTEGESTDSEEETSATSGHPAELSPRPKQPLLSSGLYSSGSHSSSHERCSLSQSSTAQSLEDPPPFVEPSSEHPLSHKPEDTHTIKQKLALRLSERKKVIDEQAFLSPGSKGSTESGYFSRSESAEQQVSPPNTNAKSYAEIIFGKCGRIGQRTAMLTATSTQPLLPLSTEDKPSLVPLSVPRTQVIEHITKLITINEAVVDTSEIDSVKPRRSSLSRRSSMESPKSSLYREPLSSHSEKTKPEQSLLSLQHPPSTAPPVPLLRSHSMPSAACTISTPHHPFRGSYSFDDHITDSEALSHSSHVFTSHPRMLKRQPAIELPLGGEYSSEEPGPSSKDTASKPSDEVEPKESELTKKTKKGLKTKGVIYECNICGARYKKRDNYEAHKKYYCSELQIAKPISAGTHTSPEAEKSQIEHEPWSQMMHYKLGTTLELTPLRKRRKEKSLGDEEEPPAFESTKSQFGSPGPSDAARNLPLESTKSPAEPSKSVPSLEGPTGFQPRTPKPGSGSESGKERRTTSKEISVIQHTSSFEKSDSLEQPSGLEGEDKPLAQFPSPPPAPHGRSAHSLQPKLVRQPNIQVPEILVTEEPDRPDTEPEPPPKEPEKTEEFQWPQRSQTLAQLPAEKLPPKKKRLRLAEMAQSSGESSFESSVPLSRSPSQESNVSLSGSSRSASFERDDHGKAEAPSPSSDMRPKPLGTHMLTVPSHHPHAREMRRSASEQSPNVSHSAHMTETRSKSFDYGSLSLTGPSAPAPVAPPARVAPPERRKCFLVRQASLSRPPESELEVAPKGRQESEEPQPSSSKPSAKSSLSQISSAATSHGGPPGGKGPGQDRPPLGPTVPYTEALQVFHHPVAQTPLHEKPYLPPPVSLFSFQHLVQHEPGQSPEFFSTQAMSSLLSSPYSMPPLPPSLFQAPPLPLQPTVLHPGQLHLPQLMPHPANIPFRQPPSFLPMPYPTSSALSSGFFLPLQSQFALQLPGDVESHLPQIKTSLAPLATGSAGLSPSTEYSSDIRLPPVAPPASSSAPTSAPPLALPACPDTMVSLVVPVRVQTNMPSYGSAMYTTLSQILVTQSQGSSATVALPKFEEPPSKGTTVCGADVHEVGPGPSGLSEEQSRAFPTPYLRVPVTLPERKGTSLSSESILSLEGSSSTAGGSKRVLSPAGSLELTMETQQQKRVKEEEASKADEKLELVKPCSVVLTSTEDGKRPEKSHLGNQGQGRRELEMLSSLSSDPSDTKEIPPLPHPALSHGTAPGSEALKEYPQPSGKPHRRGLTPLSVKKEDSKEQPDLPSLAPPSSLPLSETSSRPAKSQEGTDSKKVLQFPSLHTTTNVSWCYLNYIKPNHIQHADRRSSVYAGWCISLYNPNLPGVSTKAALSLLRSKQKVSKETYTMATAPHPEAGRLVPSSSRKPRMTEVHLPSLVSPEGQKDLARVEKEEERRGEPEEDAPASQRGEPARIKIFEGGYKSNEEYVYVRGRGRGKYVCEECGIRCKKPSMLKKHIRTHTDVRPYVCKHCHFAFKTKGNLTKHMKSKAHSKKCQETGVLEELEAEEGTSDDLFQDSEGREGSEAVEEHQFSDLEDSDSDSDLDEDEDEDEEESQDELSRPSSEAPPPGPPHALRADSSPILGPQPPDAPASGTEATRGSSVSEAERLTASSCSMSSQSMPGLPWLGPAPLGSVEKDTGSALSYKPVSPRRPWSPSKEAGSRPPLARKHSLTKNDSSPQRCSPAREPQASAPSPPGLHVDPGRGMGALPCGSPRLQLSPLTLCPLGRELAPRAHVLSKLEGTTDPGLPRYSPTRRWSPGQAESPPRSAPPGKWALAGPGSPSAGEHGPGLGLDPRVLFPPAPLPHKLLSRSPETCASPWQKAESRSPSCSPGPAHPLSSRPFSALHDFHGHILARTEENIFSHLPLHSQHLTRAPCPLIPIGGIQMVQARPGAHPTLLPGPTAAWVSGFSGGGSDLTGAREAQERGRWSPTESSSASVSPVAKVSKFTLSSELEGGDYPKERERTGGGPGRPPDWTPHGTGAPAEPTPTHSPCTPPDTLPRPPQGRRAAQSWSPRLESPRAPTNPEPSATPPLDRSSSVGCLAEASARFPARTRNLSGEPRTRQDSPKPSGSGEPRAHPHQPEDRVPPNA

SEQ ID NO: 7279 - protein, 2405 aa, Homo sapiens
MDPEQSVKGTKKAEGSPRKRLTKGEAIQTSVSSSVPYPGSGTAATQESPAQELLAPQPFPGPSSVLREGSQEKTGQQQKPPKRPPIEASVHISQLPQHPLTPAFMSPGKPEHLLEGSTWQLVDPMRPGPSGSFVAPGLHPQSQLLPSHASIIPPEDLPGVPKVFVPRPSQVSLKPTEEAHKKERKPQKPGKYICQYCSRPCAKPSVLQKHIRSHTGERPYPCGPCGFSFKTKSNLYKHRKSHAHRIKAGLASGMGGEMYPHGLEMERIPGEEFEEPTEGESTDSEEETSATSGHPAELSPRPKQPLLSSGLYSSGSHSSSHERCSLSQSSTAQSLEDPPPFVEPSSEHPLSHKPEDTHTIKQKLALRLSERKKVIDEQAFLSPGSKGSTESGYFSRSESAEQQVSPPNTNAKSYAEIIFGKCGRIGQRTAMLTATSTQPLLPLSTEDKPSLVPLSVPRTQVIEHITKLITINEAVVDTSEIDSVKPRRSSLSRRSSMESPKSSLYREPLSSHSEKTKPEQSLLSLQHPPSTAPPVPLLRSHSMPSAACTISTPHHPFRGSYSFDDHITDSEALSHSSHVFTSHPRMLKRQPAIELPLGGEYSSEEPGPSSKDTASKPSDEVEPKESELTKKTKKGLKTKGVIYECNICGARYKKRDNYEAHKKYYCSELQIAKPISAGTHTSPEAEKSQIEHEPWSQMMHYKLGTTLELTPLRKRRKEKSLGDEEEPPAFESTKSQFGSPGPSDAARNLPLESTKSPAEPSKSVPSLEGPTGFQPRTPKPGSGSESGKERRTTSKEISVIQHTSSFEKSDSLEQPSGLEGEDKPLAQFPSPPPAPHGRSAHSLQPKLVRQPNIQVPEILVTEEPDRPDTEPEPPPKEPEKTEEFQWPQRSQTLAQLPAEKLPPKKKRLRLAEMAQSSGESSFESSVPLSRSPSQESNVSLSGSSRSASFERDDHGKAEAPSPSSDMRPKPLGTHMLTVPSHHPHAREMRRSASEQSPNVSHSAHMTETRSKSFDYGSLSLTGPSAPAPVAPPARVAPPERRKCFLVRQASLSRPPESELEVAPKGRQESEEPQPSSSKPSAKSSLSQISSAATSHGGPPGGKGPGQDRPPLGPTVPYTEALQVFHHPVAQTPLHEKPYLPPPVSLFSFQHLVQHEPGQSPEFFSTQAMSSLLSSPYSMPPLPPSLFQAPPLPLQPTVLHPGQLHLPQLMPHPANIPFRQPPSFLPMPYPTSSALSSGFFLPLQSQFALQLPGDVESHLPQIKTSLAPLATGSAGLSPSTEYSSDIRLPPVAPPASSSAPTSAPPLALPACPDTMVSLVVPVRVQTNMPSYGSAMYTTLSQILVTQSQGSSATVALPKFEEPPSKGTTVCGADVHEVGPGPSGLSEEQSRAFPTPYLRVPVTLPERKGTSLSSESILSLEGSSSTAGGSKRVLSPAGSLELTMETQQQKRVKEEEASKADEKLELVKPCSVVLTSTEDGKRPEKSHLGNQGQGRRELEMLSSLSSDPSDTKEIPPLPHPALSHGTAPGSEALKEYPQPSGKPHRRGLTPLSVKKEDSKEQPDLPSLAPPSSLPLSETSSRPAKSQEGTDSKKVLQFPSLHTTTNVSWCYLNYIKPNHIQHADRRSSVYAGWCISLYNPNLPGVSTKAALSLLRSKQKVSKETYTMATAPHPEAGRLVPSSSRKPRMTEVHLPSLVSPEGQKDLARVEKEEERRGEPEEDAPASQRGEPARIKIFEGGYKSNEEYVYVRGRGRGKYVCEECGIRCKKPSMLKKHIRTHTDVRPYVCKHCHFAFKTKGNLTKHMKSKAHSKKCQETGVLEELEAEEGTSDDLFQDSEGREGSEAVEEHQFSDLEDSDSDSDLDEDEDEDEEESQDELSRPSSEAPPPGPPHALRADSSPILGPQPPDAPASGTEATRGSSVSEAERLTASSCSMSSQSMPGLPWLGPAPLGSVEKDTGSALSYKPVSPRRPWSPSKEAGSRPPLARKHSLTKNDSSPQRCSPAREPQASAPSPPGLHVDPGRGMGALPCGSPRLQLSPLTLCPLGRELAPRAHVLSKLEGTTDPGLPRYSPTRRWSPGQAESPPRSAPPGKWALAGPGSPSAGEHGPGLGLDPRVLFPPAPLPHKLLSRSPETCASPWKAESRSPSCSPGPAHPLSSRPFSALHDFHGHILARTEENIFSHLPLHSQHLTRAPCPLIPIGGIQMVQARPGAHPTLLPGPTAAWVSGFSGGGSDLTGAREAQERGRWSPTESSSASVSPVAKVSKFTLSSELEGGDYPKERERTGGGPGRPPDWTPHGTGAPAEPTPTHSPCTPPDTLPRPPQGRRAAQSWSPRLESPRAPTNPEPSATPPLDRSSSVGCLAEASARFPARTRNLSGEPRTRQDSPKPSGSGEPRAHPHQPEDRVPPNA

SEQ ID NO: 7280 - protein, 538 aa, Homo sapiens
MVTCAHLGRRARLPAAQPSACPGTCFSQEERMAAGYLPRWSQELVTFEDVSMDFSQEEWELLEPAQKNLYREVMLENYRNVVSLEALKNQCTDVGIKEGPLSPAQTSQVTSLSSWTGYLLFQPVASSHLEQREALWIEEKGTPQASCSDWMTVLRNQDSTYKKVALQEEPASGINMIKLIREDGGWKQLEDSHEDPQGLLSQKASLHVVAVPQEKATAWHGFGENGNLSPALVLSQGSSKGNHLCGSELDITSLASDSVLNHHQLGYADRRPCESNECGNAIRQNSHFIQHGGKMFVYLENGQSLNHGMALTIHNKINTAEKPFECHQCGKVFNRRHSLSEHQRIHTGEKPYECQECGRAFTHSSTLTRHLRTHTGEKPYGCGECGKAFNRISSLTQHQRIHTGEKPYKCEDCGKSFCQSSYLILHKRTHTGEKPYECSECGKAFSDRSSLNQHERTHTGENPYECKQCGRAFSQRSSLVRHERTHTGEKPYRCQECGKAFSQSSSLVTHQKTHSSQKTYKIIDCGKAFYQNRHLIGY

SEQ ID NO: 7281 - protein, 609 aa, Homo sapiens
MPHLLVTFRDVAIDFSQEEWECLDPAQRDLYRDVMLENYSNLISLDLESSCVTKKLSPEKEIYEMESLQWENMGKRINHHLQYNGLGDNMECKGNLEGQEASQEGLYMCVKITCEEKATESHSTSSTFHRIIPTKEKLYKCKECRQGFSYLSCLIQHEENHNIEKCSEVKKHRNTFSKKPSYIQHQRIQTGEKPYECMECGKAFGRTSDLIQHQKIHTNEKPYQCNACGKAFIRGSQLTEHQRVHTGEKPYECKKCGKAFSYCSQYTLHQRIHSGEKPYECKDCGKAFILGSQLTYHQRIHSGEKPYECKECGKAFILGSHLTYHQRVHTGEKPYICKECGKAFLCASQLNEHQRIHTGEKPYECKECGKTFFRGSQLTYHLRVHSGERPYKCKECGKAFISNSNLIQHQRIHTGEKPYKCKECGKAFICGKQLSEHQRIHTGEKPFECKECGKAFIRVAYLTQHEKIHGEKHYECKECGKTFVRATQLTYHQRIHTGEKPYKCKECDKAFIYGSQLSEHQRIHRGEKPYECKQCGKAFIRGSHLTEHLRTHTGEKPYECKECGRAFSRGSELTLHQRIHTGEKPYTCVQCGKDFRCPSQLTQHTRLHN

SEQ ID NO: 7282 - protein, 715 aa, Homo sapiens
MEARSMLVPPQASVCFEDVAMAFTQEEWEQLDLAQRTLYREVTLETWEHIVSLGLFLSKSDVISQLEQEEDLCRAEQEAPRDWKATLEENRLNSEKDRAREELSHHVEVYRSGPEEPPSLVLGKVQDQSNQLREHQENSLRFMVLTSERLFAQREHCELELGGGYSLPSTLSLLPTTLPTSTGFPKPNSQVKELKQNSAFINHEKNGADGKHCESHQCARAFCQSIYLSKLGNVETGKKNPYEYIVSGDSLNYGSSLCFHGRTFSVKKSDDCKDYGNLFSHSVSLNEQKPVHFGKSQYECDECRETCSESLCLVQTERSGPGETPFRCEERCAAFPMASSFSDCNIIQTTEKPSVCNQCGKSFSCCKLIHQRTHTGEKPFECTQCGKSFSQSYDLVIHQRTHTGEKPYECDLCGKSFTQRSKLITHQRIHTGEKPYQCIECRKSFRWNSNLIVHQRIHTGEKPYECTHCGKSFSQSYELVTHKRTHTGEKPFKCTQCGKSFSQKYDLVVHQRTHTGEKPYECNLCGKSFSQSSKLITHQRIHTGEKPYQCIECGKSFRWNSNLVIHQRIHTGEKPYDCTHCGKSFSQSYQLVAHKRTHTGEKPYECNECGKAFNRSTQLIRHLQIHTGEKPYKCNQCNKAFARSSYLVMHQRTHTGEKPFECSQCGKAFSGSSNLLSHHRIHSGEKPYECSDCGKSFRQQSQLVVHRRTHTGEKP

SEQ ID NO: 7283 - protein, 151 aa, Homo sapiens [sequence omitted]

SEQ ID NO: 7284 - protein, 130 aa, Homo sapiens [sequence omitted]

SEQ ID NO: 7285 - protein, 807 aa, Homo sapiens
MRLSPAPLKLSRTPALLALALPLAAALAFSDETLDKVPKSEGYCSRILRAQGTRREGYTEFSLRVEGDPDFYKPGTSYRVTLSAAPPSYFRGFTLIALRENREGDKEEDHAGTFQIIDEEETQFMSNCPVAVTESTPRRRTRIQVFWIAPPAGTGCVILKASIVQKRIIYFQDEGSLTKKLCEQDSTFDGVTDKPILDCCACGTAKYRLTFYGNWSEKTHPKDYPRRANHWSAIIGGSHSKNYVLWEYGGYASEGVKQVAELGSPVKMEEEIRQQSDEVLTVIKAKAQWPAWQPLNVRAAPSAEFSVDRTRHLMSFLTMMGPSPDWNVGLSAEDLCTKECGWVQKVVQDLIPWDAGTDSGVTYESPNKPTIPQEKIRPLTSLDHPQSPFYDPEGGSITQVARVVIERIARKGEQCNIVPDNVDDIVADLAPEEKDEDDTPETCIYSNWSPWSACSSSTCDKGKRMRQRMLKAQLDLSVPCPDTQDFQPCMGPGCSDEDGSTCTMSEWITWSPCSISCGMGMRSRERYVKQFPEDGSVCTLPTEETEKCTVNEECSPSSCLMTEWGEWDECSATCGMGMKKRHRMIKMNPADGSMCKAETSQAEKCMMPECHTIPCLLSPWSEWSDCSVTCGKGMRTRQRMLKSLAELGDCNEDLEQVEKCMLPECPIDCELTEWSQWSECNKSCGKGHVIRTRMIQMEPQFGGAPCPETVQRKKCRIRKCLRNPSIQKLRWREARESRRSEQLKEESEGEQFPGCRMRPWTAWSECTKLCGGGIQERYMTVKKRFKSSQFTSCKDKKEIRACNVHPC

SEQ ID NO: 7286 - protein, 465 aa, Homo sapiens
MASQLTQRGALFLLFFLTPAVTPTWYAGSGYYPDESYNEVYAEEVPQAPALDYRVPRWCYTLNIQDGEATCYSPKGGNYHSSLGTRCELSCDRGFRLIGRRSVQCLPSRRWSGTAYCRQMRCHALPFITSGTYTCTNGVLLDSRCDYSCSSGYHLEGDRSRICMEDGRWSGGEPVCVDIDPPKIRCPHSREKMAEPEKLTARVYWDPPLVKDSADGTITRVTLRGPEPGSHFPEGEHVIRYTAYDRAYNRASCKFIVKVQVRRCPTLKPPQHGYLTCTSAGDNYGATCEYHCDGGYDRQGTPSRVCQSSRQWSGSPPICAPMKINVNVNSAAGLLDQFYEKQRLLIISAPDPSNRYYKMQISMLQQSTCGLDLRHVTIIELVGQPPQEVGRIREQQLSANIIEELRQFQRLTRSYFNMVLIDKQGIDRDRYMEPVTPEEIFTFIDDYLLSNQELTQRREQRDICE

SEQ ID NO: 7287 - protein, 830 aa, Homo sapiens
MGLGLLLPLLLLWTRGTQGSELDPKGQHVCVASSPSAELQCCAGWRQKDQECTIPICEGPDACQKDEVCVKPGLCRCKPGFFGAHCSSRCPGQYWGPDCRESCPCHPHGQCEPATGACQCQADRWGARCEFPCACGPHGRCDPATGVCHCEPGWWSSTCRRPCQCNTAAARCEQATGACVCKPGWWGRRCSFRCNCHGSPCEQDSGRCACRPGWWGPECQQQCECVRGRCSAASGECTCPPGFRGARCELPCPAGSHGVQCAHSCGRCKHNEPCSPDTGSCESCEPGWNGTQCQQPCLPGTFGESCEQQCPHCRHGEACEPDTGHCQRCDPGWLGPRCEDPCPTGTFGEDCGSTCPTCVQGSCDTVTGDCVCSAGYWGPSCNASCPAGFHGNNCSVPCECPEGLCHPVSGSCQPGSGSRDTALIAGSLVPLLLLFLGLACCACCCWAPRSDLKDRPARDGATVSRMKLQVWGTLTSLGSTLPCRSLSSHKLPWVTVSHHDPEVPFNHSFIEPPSAGWATDDSFSSDPESGEADEVPAYCVPPQEGMVPVAQAGSSEASLAAGAFPPPEDASTPFAIPRTSSLARAKRPSVSFAEGTKFAPQSRRSSGELSSPLRKPKRLSRGAQSGPEGREAEESTGPEEAEAPESFPAAASPGDSATGHRRPPLGGRTVAEHVEAIEGSVQESSGPVTTIYMLAGKPRGSEGPVRSVFRHFGSFQKGQAEAKVKRAIPKPPRQALNRKKGSPGLASGSVGQSPNSAPKAGLPGATGPMAVRPEEAVRGLGAGTESSRRAQEPVSGCGSPEQDPQKQAEEERQEEPEYENVVPISRPPEP

SEQ ID NO: 7288 - protein, 744 aa, Homo sapiens
MGLGLLLPLLLLWTRGTQGSELDPKGQHVCVASSPSAELQCCAGWRQKDQECTIPICEGPDACQKDEVCVKPGLCRCKPGFFGAHCSSRCPGQYWGPDCRESCPCHPHGQCEPATGACQCQADRWGARCEFPCACGPHGRCDPATGVCHCEPGWWSSTCRRPCQCNTAAARCEQATGACVCKPGWWGRRCSFRCNCHGSPCEQDSGRCACRPGWWGPECQQQCECVRGRCSAASGECTCPPGFRGARCELPCPAGSHGVQCAHSCGRCKHNEPCSPDTGSCESCEPGWNGTQCQQPCLPGTFGESCEQQCPHCRHGEACEPDTGHCQRCSGSRDTALIAGSLVPLLLLFLGLACCACCCWAPRSDLKDRPARDGATVSRMKLQVWGTLTSLGSTLPCRSLSSHKLPWVTVSHHDPEVPFNHSFIEPPSAGWATDDSFSSDPESGEADEVPAYCVPPQEGMVPVAQAGSSEASLAAGAFPPPEDASTPFAIPRTSSLARAKRPSVSFAEGTKFAPQSRRSSGELSSPLRKPKRLSRGAQSGPEGREAEESTGPEEAEAPESFPAAASPGDSATGHRRPPLGGRTVAEHVEAIEGSVQESSGPVTTIYMLAGKPRGSEGPVRSVFRHFGSFQKGQAEAKVKRAIPKPPRQALNRKKGSPGLASGSVGQSPNSAPKAGLPGATGPMAVRPEEAVRGLGAGTESSRRAQEPVSGCGSPEQDPQKQAEEERQEEPEYENVVPISRPPEP

SEQ ID NO: 7289 - protein, 569 aa, Homo sapiens
MGLGLLLPLLLLWTRGTQGSELDPKGQHVCVASSPSAELQCCAGWRQKDQECTIPICEGPDACQKDEVCVKPGLCRCKPGFFGAHCSSRCPGQYWGPDCRESCPCHPHGQCEPATGACQCQADRWGARCEFPCACGPHGRCDPATGVCHCEPGWWSSTCRRPCQCNTAAARCEQATGACVCKPGWWGRRCSFRCNCHGSPCEQDSGRCACRPGWWGPECQQQCECVRGRCSAASGECTCPPGFRGARCELPCPAGSHGVQCAHSCGRCKHNEPCSPDTGSCESCEPGWNGTQCQQPCLPGTFGESCEQQCPHCRHGEACEPDTGHCQRCDPGWLGPRCEDPCPTGTFGEDCGSTCPTCVQGSCDTVTGDCVCSAGYWGPSCNASCPAGFHGNNCSVPCECPEGLCHPVSGSCQPGSGSRDTALIAGSLVPLLLLFLGLACCACCCWAPRSDLKDRPARDGATVSRMKLQVWGTLTSLGSTLPCRSLSSHKLPWVTASSSRPLPAGPLMTPSHPILSLERQMRFLPTVCHPKKGWSLWPRQGRQRPAWLQVLSRPLRTPPRHSPSRAPPA

SEQ ID NO: 7290 - protein, 337 aa, Homo sapiens
MGLGLLLPLLLLWTRGTQGSELDPKGQHVCVASSPSAELQCCAGWRQKDQECTIPICEGPDACQKDEVCVKPGLCRCKPGFFGAHCSSRCPGQYWGPDCRESCPCHPHGQCEPATGACQCQADRWGARCEFPCACGPHGRCDPATGVCHCEPGWWSSTCRRPCQCNTAAARCEQATGACVCKPGWWGRRCSFRCNCHGSPCEQDSGRCACRPGWWGPECQQQCECVRGRCSAASGECTCPPGFRGARCELPCPAGSHGVQCAHSCGRCKHNEPCSPDTGSCESCEPGWNGTQCQQPCLPGTFGESCEQQCPHCRHGEACEPDTGHCQRCDPGWLGPR

SEQ ID NO: 7291 - protein, 342 aa, Homo sapiens
MGLGLLLPLLLLWTRGTQGSELDPKGQHVCVASSPSAELQCCAGWRQKDQECTIPICEGPDACQKDEVCVKPGLCRCKPGFFGAHCSSRCPGQYWGPDCRESCPCHPHGQCEPATGACQCQADRWGARCEFPCACGPHGRCDPATGVCHCEPGWWSSTCRRPCQCNTAAARCEQATGACVCKPGWWGRRCSFRCNCHGSPCEQDSGRCACRPGWWGPECQQQCECVRGRCSAASGECTCPPGFRGARCELPCPAGSHGVQCAHSCGRCKHNEPCSPDTGSCESCEPGWNGTQCQQPCLPGTFGESCEQQCPHCRHGEACEPDTGHCQRCDPGWLGPRGPVIL

SEQ ID NO: 7292 - protein, 795 aa, Homo sapiens
MAVLLLLLRALRRGPGPGPRPLWGPGPAWSPGFPARPGRGRPYMASRPPGDLAEAGGRALQSLQLRLLTPTFEGINGLLLKQHLVQNPVRLWQLLGGTFYFNTSRLKQKNKEKDKSKGKAPEEDEEERRRRERDDQMYRERLRTLLVIAVVMSLLNALSTSGGSISWNDFVHEMLAKGEVQRVQVVPESDVVEVYLHPGAVVFGRPRLALMYRMQVANIDKFEEKLRAAEDELNIEAKDRIPVSYKRTGFFGNALYSVGMTAVGLAILWYVFRLAGMTGREGGFSAFNQLKMARFTIVDGKMGKGVSFKDVAGMHEAKLEVREFVDYLKSPERFLQLGAKVPKGALLLGPPGCGKTLLAKAVATEAQVPFLAMAGPEFVEVIGGLGAARVRSLFKEARARAPCIVYIDEIDAVGKKRSTTMSGFSNTEEEQTLNQLLVEMDGMGTTDHVIVLASTNRADILDGALMRPGRLDRHVFIDLPTLQERREIFEQHLKSLKLTQSSTFYSQRLAELTPGFSGADIANICNEAALHAAREGHTSVHTLNFEYAVERVLAGTAKKSKILSKEEQKVVAFHESGHALVGWMLEHTEAVMKVSITPRTNAALGFAQMLPRDQHLFTKEQLFERMCMALGGRASEALSFNEVTSGAQDDLRKVTRIAYSMVKQFGMAPGIGPISFPEAQEGLMGIGRRPFSQGLQQMMDHEARLLVAKAYRHTEKVLQDNLDKLQALANALLEKEVINYEDIEALIGPPPHGPKKMIAPQRWIDAQREKQDLGEEETEETQQPPLGGEEPTWPK

SEQ ID NO: 7293 - protein, 489 aa, Homo sapiens
MAVLLLLLRALRRGPGPGPRPLWGPGPAWSPGFPARPGRGRPYMASRPPGDLAEAGGRALQSLQLRLLTPTFEGINGLLLKQHLVQNPVRLWQLLGGTFYFNTSRLKQKNKEKDKSKGKAPEEDEEERRRRERDDQMYRERLRTLLVIAVVMSLLNALSTSGGSISWNDFVHEMLAKGEVQRVQVVPESDVVEVYLHPGAVVFGRPRLALMYRMQVANIDKFEEKLRAAEDELNIEAKDRIPVSYKRTGFFGNALYSVGMTAVGLAILWYVFRLAGMTGREGGFSAFNQLKMARFTIVDGKMGKGVSFKDVAGMHEAKLEVREFVDYLKSPERFLQLGAKVPKGALLLGPPGCGKTLLAKAVATEAQVPFLAMAGPEFVEVIGGLGAARVRSLFKEARARAPCIVYIDEIDAVGKKRSTTMSGFSNTEEEQTLNQLLVEMDGASLDQLPSQGTMRKLRGKTPACSCLTEPTGSRRAMEGHSLCWGCLLH

SEQ ID NO: 7294 - protein, 444 aa, Homo sapiens
MSEETATSDNDNSYARVRAVVMTRDDSSGGWLPLGGSGLSSVTVFKVPHQEENGCADFFIRGERLRDKMVVLECMLKKDLIYNKVTPTFHHWKIDDKKFGLTFQSPADARAFDRGIRRAIEDISQGCPESKNEAEGADDLQANEEDSSSSLVKDHLFQQETVVTSEPYRSSNIRPSPFEDLNARRVYMQSQANQITFGQPGLDIQSRSMEYVQRQISKECGSLKSQNRVPLKSIRHVSFQDEDEIVRINPRDILIRRYADYRHPDMWKNDLERDDADSSIQFSKPDSKKSDYLYSCGDETKLSSPKDSVVFKTQPSSLKIKKSKRRKEDGERSRCVYCQERFNHEENVRGKCQDAPDPIKRCIYQVSCMLCAESMLYHCMSDSEGDFSDPCSCDTSDDKFCLRWLALVALSFIVPCMCCYVPLRMCHRCGEACGCCGGKHKAAG

SEQ ID NO: 7295 - protein, 494 aa, Homo sapiens
MFEIKKICCIGAGYVGGPTCSVIAHMCPEIRVTVVDVNESRINAWNSPTLPIYEPGLKEVVESCRGKNLFFSTNIDDAIKEADLVFISVNTPTKTYGMGKGRAADLKYIEACARRIVQNSNGYKIVTEKSTVPVRAAESIRRIFDANTKPNLNLQVLSNPEFLAEGTAIKDLKNPDRVLIGGDETPEGQRAVQALCAVYEHWVPREKILTTNTWSSELSKLAANAFLAQRISSINSISALCEATGADVEEVATAIGMDQRIGNKFLKASVGFGGSCFQKDVLNLVYLCEALNLPEVARYWQQVIDMNDYQRRRFASRIIDSLFNTVTDKKIAILGFAFKKDTGDTRESSSIYISKYLMDEGAHLHIYDPKVPREQIVVDLSHPGVSEDDQVSRLVTISKDPYEACDGAHAVVICTEWDMFKELDYERIHKKMLKPAFIFDGRRVLDGLHNELQTIGFQIETIGKKVSSKRIPYAPSGEIPKFSLQDPPNKKPKV

SEQ ID NO: 7296 - protein, 427 aa, Homo sapiens
MFEIKKICCIGAGYVGGPTCSVIAHMCPEIRVTVVDVNESRINAWNSPTLPIYEPGLKEVVESCRGKNLFFSTNIDDAIKEADLVFISVLSNPEFLAEGTAIKDLKNPDRVLIGGDETPEGQRAVQALCAVYEHWVPREKILTTNTWSSELSKLAANAFLAQRISSINSISALCEATGADVEEVATAIGMDQRIGNKFLKASVGFGGSCFQKDVLNLVYLCEALNLPEVARYWQQVIDMNDYQRRRFASRIIDSLFNTVTDKKIAILGFAFKKDTGDTRESSSIYISKYLMDEGAHLHIYDPKVPREQIVVDLSHPGVSEDDQVSRLVTISKDPYEACDGAHAVVICTEWDMFKELDYERIHKKMLKPAFIFDGRRVLDGLHNELQTIGFQIETIGKKVSSKRIPYAPSGEIPKFSLQDPPNKKPKV

SEQ ID NO: 7297 - protein, 397 aa, Homo sapiens
MGKGRAADLKYIEACARRIVQNSNGYKIVTEKSTVPVRAAESIRRIFDANTKPNLNLQVLSNPEFLAEGTAIKDLKNPDRVLIGGDETPEGQRAVQALCAVYEHWVPREKILTTNTWSSELSKLAANAFLAQRISSINSISALCEATGADVEEVATAIGMDQRIGNKFLKASVGFGGSCFQKDVLNLVYLCEALNLPEVARYWQQVIDMNDYQRRRFASRIIDSLFNTVTDKKIAILGFAFKKDTGDTRESSSIYISKYLMDEGAHLHIYDPKVPREQIVVDLSHPGVSEDDQVSRLVTISKDPYEACDGAHAVVICTEWDMFKELDYERIHKKMLKPAFIFDGRRVLDGLHNELQTIGFQIETIGKKVSSKRIPYAPSGEIPKFSLQDPPNKKPKV

SEQ ID NO: 7298 - protein, 1512 aa, Homo sapiens
MATLSLTVNSGDPPLGALLAVEHVKDDVSISVEEGKENILHVSENVIFTDVNSILRYLARVATTAGLYGSNLMEHTEIDHWLEFSATKLSSCDSFTSTINELNHCLSLRTYLVGNSLSLADLCVWATLKGNAAWQEQLKQKKAPVHVKRWFGFLEAQQAFQSVGTKWDVSTTKARVAPEKKQDVGKFVELPGAEMGKVTVRFPPEASGYLHIGHAKAALLNQHYQVNFKGKLIMRFDDTNPEKEKEDFEKVILEDVAMLHIKPDQFTYTSDHFETIMKYAEKLIQEGKAYVDDTPAEQMKAEREQRIDSKHRKNPIEKNLQMWEEMKKGSQFGQSCCLRAKIDMSSNNGCMRDPTLYRCKIQPHPRTGNKYNVYPTYDFACPIVDSIEGVTHALRTTEYHDRDEQFYWIIEALGIRKPYIWEYSRLNLNNTVLSKRKLTWFVNEGLVDGWDDPRFPTVRGVLRRGMTVEGLKQFIAAQGSSRSVVNMEWDKIWAFNKKVIDPVAPRYVALLKKEVIPVNVPEAQEEMKEVAKHPKNPEVGLKPVWYSPKVFIEGADAETFSEGEMVTFINWGNLNITKIHKNADGKIISLDAKLNLENKDYKKTTKVTWLAETTHALPIPVICVTYEHLITKPVLGKDEDFKQYVNKNSKHEELMLGDPCLKDLKKGDIIQLQRRGFFICDQPYEPVSPYSCKEAPCVLIYIPDGHTKEMPTSGSKEKTKVEATKNETSAPFKERPTPSLNNNCTTSEDSLVLYNRVAVQGDVVRELKAKKAPKEDVDAAVKQLLSLKAEYKEKTGQEYKPGNPPAEIGQNISSNSSASILESKSLYDEVAAQGEVVRKLKAEKSPKAKINEAVECLLSLKAQYKEKTGKEYIPGQPPLSQSSDSSPTRNSEPAGLETPEAKVLFDKVASQGEVVRKLKTEKAPKDQVDIAVQELLQLKAQYKSLIGVEYKPVSATGAEDKDKKKKEKENKSEKQNKPQKQNDGQRKDPSKNQGGGLSSSGAGEGQGPKKQTRLGLEAKKEENLADWYSQVITKSEMIEYHDISGCYILRPWAYAIWEAIKDFFDAEIKKLGVENCYFPMFVSQSALEKEKTHVADFAPEVAWVTRSGKTELAEPIAIRPTSETVMYPAYAKWVQSHRDLPIKLNQWCNVVRWEFKHPQPFLRTREFLWQEGHSAFATMEEAAEEVLQILDLYAQVYEELLAIPVVKGRKTEKEKFAGGDYTTTIEAFISASGRAIQGGTSHHLGQNFSKMFEIVFEDPKIPGEKQFAYQNSWGLTTRTIGVMTMVHGDNMGLVLPPRVACVQVVIIPCGITNALSEEDKEALIAKCNDYRRRLLSVNIRVRADLRDNYSPGWKFNHWELKGVPIRLEVGPRDMKSCQFVAVRRDTGEKLTVAENEAETKLQAILEDIQVTLFTRASEDLKTHMVVANTMEDFQKILDSGKIVQIPFCGEIDCEDWIKKTTARDQDLEPGAPSMGAKSLCIPFKPLCELQPGAKCVCGKNPAKYYTLFGRSY

SEQ ID NO: 7299 - protein, 761 aa, Homo sapiens
MASERGKVKHNWSSTSEGCPRKRSCLREPCDVAPSSRPAQRSASRSGGPSSPKRLKAQKEDDVACSRRLSWGSSRRRNNSSSSFSPHFLGPGVGGAASKGCLIRNTRGFLSSGGSPLRPANASLEEMASLEEEACSLKVDSKDSSHNSTNSEFAAEAEGQNDTIEEPNKVQKRKRDRLRDQGSTMIYLKAIQGILGKSMPKRKGEAATRAKPSAAEHPSHGEGPARSEGPAKTAEGAARSVTVTAAQKEKDATPEVSMEEDKTVPERSSFYDRRVVIDPQEKPSEEPLGDRRTVIDKCSPPLEFLDDSDSHLEIQKHKDREVVMEHPSSGSDWSDVEEISTVRFSQEEPVSLKPSAVPEPSSFTTDYVMYPPHLYSSPWCDYASYWTSSPKPSSYPSTGSSSNDAAQVGKSSRSRMSDYSPNSTGSVQNTSRDMEASEEGWSQNSRSFRFSRSSEEREVKEKRTFQEEMPPRPCGGHASSSLPKSHLEPSLEEGFIDTHCHLDMLYSKLSFQGTFTKFRKIYSSSFPKEFQGCISDFCDPRTLTDCLWEELLKEDLVWGAFGCHPHFARYYSESQERNLLQALRHPKAVAFGEMGLDYSYKCTTPVPEQHKVFERQLQLAVSLKKPLVIHCREADEDLLEIMKKFVPPDYKIHRHCFTGSYPVIEPLLKYFPNMSVGFTAVLTYSSAWEAREALRQIPLERIIVETDAPYFLPRQVPKSLCQYAHPGLALHTVREIARVKDQPLSLTLAALRENTSRLYSL

SEQ ID NO: 7300 - protein, 1609 aa, Homo sapiens
MAGLRRPQPGCYCRTAAAVNLLLGVFQVLLPCCRPGGAQGQAIEPLPNVVELWQAEEGELLLPTQGDSEEGLEEPSQEQSFSDKLFSGKGLHFQPSVLDFGIQFLGHPVAKILHAYNPSRDSEVVVNSVFAAAGHFHVPPVPCRVIPAMGKTSFRIIFLPTEEGSIESSLFINTSSYGVLSYHVSGIGTRRISTEGSAKQLPNAYFLLPKVQSIQLSQMQAETTNTSLLQVQLECSLHNKVCQQLKGCYLESDDVLRLQMSIMVTMENFSKEFEENTQHLLDHLSIVYVATDESETSDDSAVNMYILHSGNSLIWIQDIRHFSQRDALSLQFEPVLLPTSTTNFTKIASFTCKATSCDSGIIEDVKKTTHTPTLKACLFSSVAQGYFRMDSSATQFHIETHENTSGLWSIWYRNHFDRSVVLNDVFLSKETKHMLKILNFTGPLFLPPGCWNIFSLKLAVKDIAINLFTNVFLTTNIGAIFAIPLQIYSAPTKEGSLGFEVIAHCGMHYFMGKSKAGNPNWNGSLSLDQSTWNVDSELANKLYERWKKYKNGDVCKRNVLGTTRFAHLKKSKESESFVFFLPRLIAEPGLMLNFSATALRSRMIKYFVVQNPSSWPVSLQLLPLSLYPKPEALVHLLHRWFGTDMQMINFTTGEFQLTEACPYLGTHSEESRFGILHLHLQPLEMKRVGVVFTPADYGKVTSLILIRNNLTVIDMIGVEGFGARELLKVGGRLPGAGGSLRFKVPESTLMDCRRQLKDSKQILSITKNFKVENIGPLPITVSSLKINGYNCQGYGFEVLDCHQFSLDPNTSRDISIVFTPDFTSSWVIRDLSLVTAADLEFRFTLNVTLPHHLLPLCADVVPGPSWEESFWRLTVFFVSLSLLGVILIAFQQAQYILMEFMKTRQRQNASSSSQQNNGPMDVISPHSYKSNCKNFLDTYGPSDKGRGKNCLPVNTPQSRIQNAAKRSPATYGHSQKKHKCSVYYSKHKTSTAAASSTSTTTEEKQTSPLGSSLPAAKEDICTDAMRENWISLRYASGINVNLQKNLTLPKNLLNKEENTLKNTIVFSNPSSECSMKEGIQTCMFPKETDIKTSENTAEFKERELCPLKTSKKLPENHLPRNSPQYHQPDLPEISRKNNGNNQQVPVKNEVDHCENLKKVDTKPSSEKKIHKTSREDMFSEKQDIPFVEQEDPYRKKKLQEKREGNLQNLNWSKSRTCRKNKKRGVAPVSRPPEQSDLKLVCSDFERSELSSDINVRSWCIQESTREVCKADAEIASSLPAAQREAEGYYQKPEKKCVDKFCSDSSSDCGSSSGSVRASRGSWGSWSSTSSSDGDKKPMVDAQHFLPAGDSVSQNDFPSEAPISLNLSHNICNPMTVNSLPQYAEPSCPSLPAGPTGVEEDKGLYSPGDLWPTPPVCVTSSLNCTLENGVPCVIQESAPVHNSFIDWSATCEGQFSSAYCPLELNDYNAFPEENMNYANGFPCPADVQTDFIDHNSQSTWNTPPNMPAAWGHASFISSPPYLTSTRSLSPMSGLFGSIWAPQSDVYENCCPINPTTEHSTHMENQAVVCKEYYPGFNPFRAYMNLDIWTTTANRNANFPLSRDSSYCGNV

SEQ ID NO: 7301 - protein, 1239 aa, Homo sapiens
MLLVLECVLFSVAQGYFRMDSSATQFHIETHENTSGLWSIWYRNHFDRSVVLNDVFLSKETKHMLKILNFTGPLFLPPGCWNIFSLKLAVKDIAINLFTNVFLTTNIGAIFAIPLQIYSAPTKEGSLGFEVIAHCGMHYFMGKSKAGNPNWNGSLSLDQSTWNVDSELANKLYERWKKYKNGDVCKRNVLGTTRFAHLKKSKESESFVFFLPRLIAEPGLMLNFSATALRSRMIKYFVVQNPSSWPVSLQLLPLSLYPKPEALVHLLHRWFGTDMQMINFTTGEFQLTEACPYLGTHSEESRFGILHLHLQPLEMKRVGVVFTPADYGKVTSLILIRNNLTVIDMIGVEGFGARELLKVGGRLPGAGGSLRFKVPESTLMDCRRQLKDSKQILSITKNFKVENIGPLPITVSSLKINGYNCQGYGFEVLDCHQFSLDPNTSRDISIVFTPDFTSSWVIRDLSLVTAADLEFRFTLNVTLPHHLLPLCADVVPGPSWEESFWRLTVFFVSLSLLGVILIAFQQAQYILMEFMKTRQRQNASSSSQQNNGPMDVISPHSYKSNCKNFLDTYGPSDKGRGKNCLPVNTPQSRIQNAAKRSPATYGHSQKKHKCSVYYSKHKTSTAAASSTSTTTEEKQTSPLGSSLPAAKEDICTDAMRENWISLRYASGINVNLQKNLTLPKNLLNKEENTLKNTIVFSNPSSECSMKEGIQTCMFPKETDIKTSENTAEFKERELCPLKTSKKLPENHLPRNSPQYHQPDLPEISRKNNGNNQQVPVKNEVDHCENLKKVDTKPSSEKKIHKTSREDMFSEKQDIPFVEQEDPYRKKKLQEKREGNLQNLNWSKSRTCRKNKKRGVAPVSRPPEQSDLKLVCSDFERSELSSDINVRSWCIQESTREVCKADAEIASSLPAAQREAEGYYQKPEKKCVDKFCSDSSSDCGSSSGSVRASRGSWGSWSSTSSSDGDKKPMVDAQHFLPAGDSVSQNDFPSEAPISLNLSHNICNPMTVNSLPQYAEPSCPSLPAGPTGVEEDKGLYSPGDLWPTPPVCVTSSLNCTLENGVPCVIQESAPVHNSFIDWSATCEGQFSSAYCPLELNDYNAFPEENMNYANGFPCPADVQTDFIDHNSQSTWNTPPNMPAAWGHASFISSPPYLTSTRSLSPMSGLFGSIWAPQSDVYENCCPINPTTEHSTHMENQAVVCKEYYPGFNPFRAYMNLDIWTTTANRNANFPLSRDSSYCGNV

SEQ ID NO: 7302 - protein, 1526 aa, Homo sapiens
MAGLRRPQPGCYCRTAAAVNLLLGVFQVLLPCCRPGGAQGQAIEPLPNVVELWQAEEGELLLPTQGDSEEGLEEPSQEQSFSDKLFSGKGLHFQPSVLDFGIQFLGHPVAKILHAYNPSRDSEVVVNSVFAAAGHFHVPPVPCRVIPAMGKTSFRIIFLPTEEGSIESSLFINTSSYGVLSYHVSGIGTRRISTEGSAKQLPNAYFLLPKVQSIQLSQMQAETTNTSLLQVQLECSLHNKVCQQLKGCYLESDDVLRLQMSIMVTMENFSKEFEENTQHLLDHLSIVYVATDESETSDDSAVNMYILHSGNSLIWIQDIRHFSQRDALSLQFEPVLLPTSTTNFTKIASFTCKAATSCDSGIIEDVKKTTHTPTLKACLFSSVAQGYFRMDSSATQFHIETHENTSGLWSIWYRNHFDRSVVLNDVFLSKETKHMLKILNFTGPLFLPPGCWNIFSLKLAVKDIAINLFTNVFLTTNIGAIFAIPLQIYSAPTKEGSLGFEVIAHCGMHYFMGKSKAGNPNWNGSLSLDQSTWNVDSELANKLYERWKKYKNGDVCKFGTDMQMINFTTGEFQLTEACPYLGTHSEESRFGILHLHLQPLEMKRVGVVFTPADYGKVTSLILIRNNLTVIDMIGVEGFGARELLKVGGRLPGAGGSLRFKVPESTLMDCRRQLKDSKQILSITKNFKVENIGPLPITVSSLKINGYNCQGYGFEVLDCHQFSLDPNTSRDISIVFTPDFTSSWVIRDLSLVTAADLEFRFTLNVTLPHHLLPLCADVVPGPSWEESFWRLTVFFVSLSLLGVILIAFQQAQYILMEFMKTRQRQNASSSSQQNNGPMDVISPHSYKSNCKNFLDTYGPSDKGRGKNCLPVNTPQSRIQNAAKRSPATYGHSQKKHKCSVYYSKHKTSTAAASSTSTTTEEKQTSPLGSSLPAAKEDICTDAMRENWISLRYASGINVNLQKNLTLPKNLLNKEENTLKNTIVFSNPSSECSMKEGIQTCMFPKETDIKTSENTAEFKERELCPLKTSKKLPENHLPRNSPQYHQPDLPEISRKNNGNNQQVPVKNEVDHCENLKKVDTKPSSEKKIHKTSREDMFSEKQDIPFVEQEDPYRKKKLQEKREGNLQNLNWSKSRTCRKNKKRGVAPVSRPPEQSDLKLVCSDFERSELSSDINVRSWCIQESTREVCKADAEIASSLPAAQREAEGYYQKPEKKCVDKFCSDSSSDCGSSSGSVRASRGSWGSWSSTSSSDGDKKPMVDAQHFLPAGDSVSQNDFPSEAPISLNLSHNICNPMTVNSLPQYAEPSCPSLPAGPTGVEEDKGLYSPGDLWPTPPVCVTSSLNCTLENGVPCVIQESAPVHNSFIDWSATCEGQFSSAYCPLELNDYNAFPEENMNYANGFPCPADVQTDFIDHNSQSTWNTPPNMPAAWGHASFISSPPYLTSTRSLSPMSGLFGSIWAPQSDVYENCCPINPTTEHSTHMENQAVVCKEYYPGFNPFRAYMNLDIWTTTANRNANFPLSRDSSYCGNV

SEQ ID NO: 7303 - protein, 1610 aa, Homo sapiens
MAGLRRPQPGCYCRTAAAVNLLLGVFQVLLPCCRPGGAQGQAIEPLPNVVELWQAEEGELLLPTQGDSEEGLEEPSQEQSFSDKLFSGKGLHFQPSVLDFGIQFLGHPVAKILHAYNPSRDSEVVVNSVFAAAGHFHVPPVPCRVIPAMGKTSFRIIFLPTEEGSIESSLFINTSSYGVLSYHVSGIGTRRISTEGSAKQLPNAYFLLPKVQSIQLSQMQAETTNTSLLQVQLECSLHNKVCQQLKGCYLESDDVLRLQMSIMVTMENFSKEFEENTQHLLDHLSIVYVATDESETSDDSAVNMYILHSGNSLIWIQDIRHFSQRDALSLQFEPVLLPTSTTNFTKIASFTCKAATSCDSGIIEDVKKTTHTPTLKACLFSSVAQGYFRMDSSATQFHIETHENTSGLWSIWYRNHFDRSVVLNDVFLSKETKHMLKILNFTGPLFLPPGCWNIFSLKLAVKDIAINLFTNVFLTTNIGAIFAIPLQIYSAPTKEGSLGFEVIAHCGMHYFMGKSKAGNPNWNGSLSLDQSTWNVDSELANKLYERWKKYKNGDVCKRNVLGTTRFAHLKKSKESESFVFFLPRLIAEPGLMLNFSATALRSRMIKYFVVQNPSSWPVSLQLLPLSLYPKPEALVHLLHRWFGTDMQMINFTTGEFQLTEACPYLGTHSEESRFGILHLHLQPLEMKRVGVVFTPADYGKVTSLILIRNNLTVIDMIGVEGFGARELLKVGGRLPGAGGSLRFKVPESTLMDCRRQLKDSKQILSITKNFKVENIGPLPITVSSLKINGYNCQGYGFEVLDCHQFSLDPNTSRDISIVFTPDFTSSWVIRDLSLVTAADLEFRFTLNVTLPHHLLPLCADVVPGPSWEESFWRLTVFFVSLSLLGVILIAFQQAQYILMEFMKTRQRQNASSSSQQNNGPMDVISPHSYKSNCKNFLDTYGPSDKGRGKNCLPVNTPQSRIQNAAKRSPATYGHSQKKHKCSVYYSKHKTSTAAASSTSTTTEEKQTSPLGSSLPAAKEDICTDAMRENWISLRYASGINVNLQKNLTLPKNLLNKEENTLKNTIVFSNPSSECSMKEGIQTCMFPKETDIKTSENTAEFKERELCPLKTSKKLPENHLPRNSPQYHQPDLPEISRKNNGNNQQVPVKNEVDHCENLKKVDTKPSSEKKIHKTSREDMFSEKQDIPFVEQEDPYRKKKLQEKREGNLQNLNWSKSRTCRKNKKRGVAPVSRPPEQSDLKLVCSDFERSELSSDINVRSWCIQESTREVCKADAEIASSLPAAQREAEGYYQKPEKKCVDKFCSDSSSDCGSSSGSVRASRGSWGSWSSTSSSDGDKKPMVDAQHFLPAGDSVSQNDFPSEAPISLNLSHNICNPMTVNSLPQYAEPSCPSLPAGPTGVEEDKGLYSPGDLWPTPPVCVTSSLNCTLENGVPCVIQESAPVHNSFIDWSATCEGQFSSAYCPLELNDYNAFPEENMNYANGFPCPADVQTDFIDHNSQSTWNTPPNMPAAWGHASFISSPPYLTSTRSLSPMSGLFGSIWAPQSDVYENCCPINPTTEHSTHMENQAVVCKEYYPGFNPFRAYMNLDIWTTTANRNANFPLSRDSSYCGNV

SEQ ID NO: 7304 - protein, 1462 aa, Homo sapiens
MGKTSFRIIFLPTEEGSIESSLFINTSSYGVLSYHVSGIGTRRISTEGSAKQLPNAYFLLPKVQSIQLSQMQAETTNTSLLQVQLECSLHNKVCQQLKGCYLESDDVLRLQMSIMVTMENFSKEFEENTQHLLDHLSIVYVATDESETSDDSAVNMYILHSGNSLIWIQDIRHFSQRDALSLQFEPVLLPTSTTNFTKIASFTCKAATSCDSGIIEDVKKTTHTPTLKACLFSSVAQGYFRMDSSATQFHIETHENTSGLWSIWYRNHFDRSVVLNDVFLSKETKHMLKILNFTGPLFLPPGCWNIFSLKLAVKDIAINLFTNVFLTTNIGAIFAIPLQIYSAPTKEGSLGFEVIAHCGMHYFMGKSKAGNPNWNGSLSLDQSTWNVDSELANKLYERWKKYKNGDVCKRNVLGTTRFAHLKKSKESESFVFFLPRLIAEPGLMLNFSATALRSRMIKYFVVQNPSSWPVSLQLLPLSLYPKPEALVHLLHRWFGTDMQMINFTTGEFQLTEACPYLGTHSEESRFGILHLHLQPLEMKRVGVVFTPADYGKVTSLILIRNNLTVIDMIGVEGFGARELLKVGGRLPGAGGSLRFKVPESTLMDCRRQLKDSKQILSITKNFKVENIGPLPITVSSLKINGYNCQGYGFEVLDCHQFSLDPNTSRDISIVFTPDFTSSWVIRDLSLVTAADLEFRFTLNVTLPHHLLPLCADVVPGPSWEESFWRLTVFFVSLSLLGVILIAFQQAQYILMEFMKTRQRQNASSSSQQNNGPMDVISPHSYKSNCKNFLDTYGPSDKGRGKNCLPVNTPQSRIQNAAKRSPATYGHSQKKHKCSVYYSKHKTSTAAASSTSTTTEEKQTSPLGSSLPAAKEDICTDAMRENWISLRYASGINVNLQKNLTLPKNLLNKEENTLKNTIVFSNPSSECSMKEGIQTCMFPKETDIKTSENTAEFKERELCPLKTSKKLPENHLPRNSPQYHQPDLPEISRKNNGNNQQVPVKNEVDHCENLKKVDTKPSSEKKIHKTSREDMFSEKQDIPFVEQEDPYRKKKLQEKREGNLQNLNWSKSRTCRKNKKRGVAPVSRPPEQSDLKLVCSDFERSELSSDINVRSWCIQESTREVCKADAEIASSLPAAQREAEGYYQKPEKKCVDKFCSDSSSDCGSSSGSVRASRGSWGSWSSTSSSDGDKKPMVDAQHFLPAGDSVSQNDFPSEAPISLNLSHNICNPMTVNSLPQYAEPSCPSLPAGPTGVEEDKGLYSPGDLWPTPPVCVTSSLNCTLENGVPCVIQESAPVHNSFIDWSATCEGQFSSAYCPLELNDYNAFPEENMNYANGFPCPADVQTDFIDHNSQSTWNTPPNMPAAWGHASFISSPPYLTSTRSLSPMSGLFGSIWAPQSDVYENCCPINPTTEHSTHMENQAVVCKEYYPGFNPFRAYMNLDIWTTTANRNANFPLSRDSSYCGNV

SEQ ID NO: 7305 - protein, 450 aa, Homo sapiens
MREIVHIQAGQCGNQIGAKFWEVISDEHGIDPSGNYVGDSDLQLERISVYYNEASSHKYVPRAILVDLEPGTMDSVRSGAFGHLFRPDNFIFGQSGAGNNWAKGHYTEGAELVDSVLDVVRKECENCDCLQGFQLTHSLGGGTGSGMGTLLISKVREEYPDRIMNTFSVVPSPKVSDTVVEPYNATLSIHQLVENTDETYCIDNEALYDICFRTLKLATPTYGDLNHLVSATMSGVTTSLRFPGQLNADLRKLAVNMVPFPRLHFFMPGFAPLTARGSQQYRALTVPELTQQMFDAKNMMAACDPRHGRYLTVATVFRGRMSMKEVDEQMLAIQSKNSSYFVEWIPNNVKVAVCDIPPRGLKMSSTFIGNSTAIQELFKRISEQFTAMFRRKAFLHWYTGEGMDEMEFTEAESNMNDLVSEYQQYQDATAEEEGEMYEDDEEESEAQGPK

SEQ ID NO: 7306 - protein, 378 aa, Homo sapiens
MDSVRSGAFGHLFRPDNFIFGQSGAGNNWAKGHYTEGAELVDSVLDVVRKECENCDCLQGFQLTHSLGGGTGSGMGTLLISKVREEYPDRIMNTFSVVPSPKVSDTVVEPYNATLSIHQLVENTDETYCIDNEALYDICFRTLKLATPTYGDLNHLVSATMSGVTTSLRFPGQLNADLRKLAVNMVPFPRLHFFMPGFAPLTARGSQQYRALTVPELTQQMFDAKNMMAACDPRHGRYLTVATVFRGRMSMKEVDEQMLAIQSKNSSYFVEWIPNNVKVAVCDIPPRGLKMSSTFIGNSTAIQELFKRISEQFTAMFRRKAFLHWYTGEGMDEMEFTEAESNMNDLVSEYQQYQDATAEEEGEMYEDDEEESEAQGPK

SEQ ID NO: 7307 - protein, 446 aa, Homo sapiens
MRECLSIHIGQAGIQIGDACWELYCLEHGIQPNGVVLDTQQDQLENAKMEHTNASFDTFFCETRAGKHVPRALFVDLEPTVIDGIRTGQHRSLFHPEQLLSGKEDAANNYARGRYSVGSEVIDLVLERTRKLAEQCGGLQGFLIFRSFGGGTGSGFTSLLMERLTGEYSRKTKLEFSVYPAPRISTAVVEPYNSVLTTHSTTEHTDCTFMVDNEAVYDICHRKLGVECPSHASINRLVVQVVSSITASLRFEGPLNVDLIEFQTNLVPYPRIHFPMTAFAPIVSADKAYHEQFSVSDITTACFESSNQLVKCDPRLGKYMACCLLYRGDVVPKEVNAAIAATKSRHSVQFVDWCPTGFKVGINNRPPTVMPGGDLAKVHRSICMLSNTTAIVEAWARLDHKFDLMYAKRAFLHWYLREGMEEAEFLEAREDLAALERDYEEVAQSF

SEQ ID NO: 7308 - protein, 406 aa, Homo sapiens
MDQLENAKMEHTNASFDTFFCETRAGKHVPRALFVDLEPTVIDGIRTGQHRSLFHPEQLLSGKEDAANNYARGRYSVGSEVIDLVLERTRKLAEQCGGLQGFLIFRSFGGGTGSGFTSLLMERLTGEYSRKTKLEFSVYPAPRISTAVVEPYNSVLTTHSTTEHTDCTFMVDNEAVYDICHRKLGVECPSHASINRLVVQVVSSITASLRFEGPLNVDLIEFQTNLVPYPRIHFPMTAFAPIVSADKAYHEQFSVSDITTACFESSNQLVKCDPRLGKYMACCLLYRGDVVPKEVNAAIAATKSRHSVQFVDWCPTGFKVGINNRPPTVMPGGDLAKVHRSICMLSNTTAIVEAWARLDHKFDLMYAKRAFLHWYLREGMEEAEFLEAREDLAALERDYEEVAQSF

SEQ ID NO: 7309 - protein, 758 aa, Homo sapiens
MAEPRQEFEVMEDHAGTYGLGDRKDQGGYTMHQDQEGDTDAGLKESPLQTPTEDGSEEPGSETSDAKSTPTAEDVTAPLVDEGAPGKQAAAQPHTEIPEGTTAEEAGIGDTPSLEDEAAGHVTQEPESGKVVQEGFLREPGPPGLSHQLMSGMPGAPLLPEGPREATRQPSGTGPEDTEGGRHAPELLKHQLLGDLHQEGPPLKGAGGKERPGSKEEVDEDRDVDESSPQDSPPSKASPAQDGRPPQTAAREATSIPGFPAEGAIPLPVDFLSKVSTEIPASEPDGPSVGRAKGQDAPLEFTFHVEITPNVQKEQAHSEEHLGRAAFPGAPGEGPEARGPSLGEDTKEADLPEPSEKQPAAAPRGKPVSRVPQLKARMVSKSKDGTGSDDKKAKTSTRSSAKTLKNRPCLSPKHPTPGSSDPLIQPSSPAVCPEPPSSPKYVSSVTSRTGSSGAKEMKLKGADGKTKIATPRGAAPPGQKGQANATRIPAKTPPAPKTPPSSGEPPKSGDRSGYSSPGSPGTPGSRSRTPSLPTPPTREPKKVAVVRTPPKSPSSAKSRLQTAPVPMPDLKNVKSKIGSTENLKHQPGGGKVQIINKKLDLSNVQSKCGSKDNIKHVPGGGSVQIVYKPVDLSKVTSKCGSLGNIHHKPGGGQVEVKSEKLDFKDRVQSKIGSLDNITHVPGGGNKKIETHKLTFRENAKAKTDHGAEIVYKSPVVSGDTSPRHLSNVSSTGSIDMVDSPQLATLADEVSASLAKQGL

SEQ ID NO: 7310 - protein, 352 aa, Homo sapiens
MAEPRQEFEVMEDHAGTYGLGDRKDQGGYTMHQDQEGDTDAGLKAEEAGIGDTPSLEDEAAGHVTQARMVSKSKDGTGSDDKKAKGADGKTKIATPRGAAPPGQKGQANATRIPAKTPPAPKTPPSSGEPPKSGDRSGYSSPGSPGTPGSRSRTPSLPTPPTREPKKVAVVRTPPKSPSSAKSRLQTAPVPMPDLKNVKSKIGSTENLKHQPGGGKVQIVYKPVDLSKVTSKCGSLGNIHHKPGGGQVEVKSEKLDFKDRVQSKIGSLDNITHVPGGGNKKIETHKLTFRENAKAKTDHGAEIVYKSPVVSGDTSPRHLSNVSSTGSIDMVDSPQLATLADEVSASLAKQGL

SEQ ID NO: 7311 - protein, 316 aa, Homo sapiens
MLRALQQRKREAGIGDTPSLEDEAAGHVTQARMVSKSKDGTGSDDKKAKGADGKTKIATPRGAAPPGQKGQANATRIPAKTPPAPKTPPSSGEPPKSGDRSGYSSPGSPGTPGSRSRTPSLPTPPTREPKKVAVVRTPPKSPSSAKSRLQTAPVPMPDLKNVKSKIGSTENLKHQPGGGKVQIVYKPVDLSKVTSKCGSLGNIHHKPGGGQVEVKSEKLDFKDRVQSKIGSLDNITHVPGGGNKKIETHKLTFRENAKAKTDHGAEIVYKSPVVSGDTSPRHLSNVSSTGSIDMVDSPQLATLADEVSASLAKQGL

SEQ ID NO: 7312 - protein, 381 aa, Homo sapiens
MAEPRQEFEVMEDHAGTYGLGDRKDQGGYTMHQDQEGDTDAGLKESPLQTPTEDGSEEPGSETSDAKSTPTAEAEEAGIGDTPSLEDEAAGHVTQARMVSKSKDGTGSDDKKAKGADGKTKIATPRGAAPPGQKGQANATRIPAKTPPAPKTPPSSGEPPKSGDRSGYSSPGSPGTPGSRSRTPSLPTPPTREPKKVAVVRTPPKSPSSAKSRLQTAPVPMPDLKNVKSKIGSTENLKHQPGGGKVQIVYKPVDLSKVTSKCGSLGNIHHKPGGGQVEVKSEKLDFKDRVQSKIGSLDNITHVPGGGNKKIETHKLTFRENAKAKTDHGAEIVYKSPVVSGDTSPRHLSNVSSTGSIDMVDSPQLATLADEVSASLAKQGL

SEQ ID NO: 7313 - protein, 410 aa, Homo sapiens
MAEPRQEFEVMEDHAGTYGLGDRKDQGGYTMHQDQEGDTDAGLKESPLQTPTEDGSEEPGSETSDAKSTPTAEDVTAPLVDEGAPGKQAAAQPHTEIPEGTTAEEAGIGDTPSLEDEAAGHVTQARMVSKSKDGTGSDDKKAKGADGKTKIATPRGAAPPGQKGQANATRIPAKTPPAPKTPPSSGEPPKSGDRSGYSSPGSPGTPGSRSRTPSLPTPPTREPKKVAVVRTPPKSPSSAKSRLQTAPVPMPDLKNVKSKIGSTENLKHQPGGGKVQIVYKPVDLSKVTSKCGSLGNIHHKPGGGQVEVKSEKLDFKDRVQSKIGSLDNITHVPGGGNKKIETHKLTFRENAKAKTDHGAEIVYKSPVVSGDTSPRHLSNVSSTGSIDMVDSPQLATLADEVSASLAKQGL

SEQ ID NO: 7314 - protein, 383 aa, Homo sapiens
MAEPRQEFEVMEDHAGTYGLGDRKDQGGYTMHQDQEGDTDAGLKAEEAGIGDTPSLEDEAAGHVTQARMVSKSKDGTGSDDKKAKGADGKTKIATPRGAAPPGQKGQANATRIPAKTPPAPKTPPSSGEPPKSGDRSGYSSPGSPGTPGSRSRTPSLPTPPTREPKKVAVVRTPPKSPSSAKSRLQTAPVPMPDLKNVKSKIGSTENLKHQPGGGKVQIINKKLDLSNVQSKCGSKDNIKHVPGGGSVQIVYKPVDLSKVTSKCGSLGNIHHKPGGGQVEVKSEKLDFKDRVQSKIGSLDNITHVPGGGNKKIETHKLTFRENAKAKTDHGAEIVYKSPVVSGDTSPRHLSNVSSTGSIDMVDSPQLATLADEVSASLAKQGL

SEQ ID NO: 7315 - protein, 412 aa, Homo sapiens
MAEPRQEFEVMEDHAGTYGLGDRKDQGGYTMHQDQEGDTDAGLKESPLQTPTEDGSEEPGSETSDAKSTPTAEAEEAGIGDTPSLEDEAAGHVTQARMVSKSKDGTGSDDKKAKGADGKTKIATPRGAAPPGQKGQANATRIPAKTPPAPKTPPSSGEPPKSGDRSGYSSPGSPGTPGSRSRTPSLPTPPTREPKKVAVVRTPPKSPSSAKSRLQTAPVPMPDLKNVKSKIGSTENLKHQPGGGKVQIINKKLDLSNVQSKCGSKDNIKHVPGGGSVQIVYKPVDLSKVTSKCGSLGNIHHKPGGGQVEVKSEKLDFKDRVQSKIGSLDNITHVPGGGNKKIETHKLTFRENAKAKTDHGAEIVYKSPVVSGDTSPRHLSNVSSTGSIDMVDSPQLATLADEVSASLAKQGL

SEQ ID NO: 7316 - protein, 441 aa, Homo sapiens
MAEPRQEFEVMEDHAGTYGLGDRKDQGGYTMHQDQEGDTDAGLKESPLQTPTEDGSEEPGSETSDAKSTPTAEDVTAPLVDEGAPGKQAAAQPHTEIPEGTTAEEAGIGDTPSLEDEAAGHVTQARMVSKSKDGTGSDDKKAKGADGKTKIATPRGAAPPGQKGQANATRIPAKTPPAPKTPPSSGEPPKSGDRSGYSSPGSPGTPGSRSRTPSLPTPPTREPKKVAVVRTPPKSPSSAKSRLQTAPVPMPDLKNVKSKIGSTENLKHQPGGGKVQIINKKLDLSNVQSKCGSKDNIKHVPGGGSVQIVYKPVDLSKVTSKCGSLGNIHHKPGGGQVEVKSEKLDFKDRVQSKIGSLDNITHVPGGGNKKIETHKLTFRENAKAKTDHGAEIVYKSPVVSGDTSPRHLSNVSSTGSIDMVDSPQLATLADEVSASLAKQGL

SEQ ID NO: 7317 - protein, 776 aa, Homo sapiens
MAEPRQEFEVMEDHAGTYGLGDRKDQGGYTMHQDQEGDTDAGLKESPLQTPTEDGSEEPGSETSDAKSTPTAEDVTAPLVDEGAPGKQAAAQPHTEIPEGTTAEEAGIGDTPSLEDEAAGHVTQEPESGKVVQEGFLREPGPPGLSHQLMSGMPGAPLLPEGPREATRQPSGTGPEDTEGGRHAPELLKHQLLGDLHQEGPPLKGAGGKERPGSKEEVDEDRDVDESSPQDSPPSKASPAQDGRPPQTAAREATSIPGFPAEGAIPLPVDFLSKVSTEIPASEPDGPSVGRAKGQDAPLEFTFHVEITPNVQKEQAHSEEHLGRAAFPGAPGEGPEARGPSLGEDTKEADLPEPSEKQPAAAPRGKPVSRVPQLKARMVSKSKDGTGSDDKKAKTSTRSSAKTLKNRPCLSPKHPTPGSSDPLIQPSSPAVCPEPPSSPKYVSSVTSRTGSSGAKEMKLKGADGKTKIATPRGAAPPGQKGQANATRIPAKTPPAPKTPPSSATKQVQRRPPPAGPRSERGEPPKSGDRSGYSSPGSPGTPGSRSRTPSLPTPPTREPKKVAVVRTPPKSPSSAKSRLQTAPVPMPDLKNVKSKIGSTENLKHQPGGGKVQIINKKLDLSNVQSKCGSKDNIKHVPGGGSVQIVYKPVDLSKVTSKCGSLGNIHHKPGGGQVEVKSEKLDFKDRVQSKIGSLDNITHVPGGGNKKIETHKLTFRENAKAKTDHGAEIVYKSPVVSGDTSPRHLSNVSSTGSIDMVDSPQLATLADEVSASLAKQGL

SEQ ID NO: 7318 - protein, 808 aa, Homo sapiens
MAETAAGVGRFKTNYAVERKIEPFYKGGKAQLDQTGQHLFCVCGTRVNILEVASGAVLRSLEQEDQEDITAFDLSPDNEVLVTASRALLLAQWAWQEGSVTRLWKAIHTAPVATMAFDPTSTLLATGGCDGAVRVWDIVRHYGTHHFRGSPGVVHLVAFHPDPTRLLLFSSATDAAIRVWSLQDRSCLAVLTAHYSAVTSLAFSADGHTMLSSGRDKICIIWDLQSCQATRTVPVFESVEAAVLLPEEPVSQLGVKSPGLYFLTAGDQGTLRVWEAASGQCVYTQAQPPGPGQELTHCTLAHTAGVVLTATADHNLLLYEARSLRLQKQFAGYSEEVLDVRFLGPEDSHVVVASNSPCLKVFELQTSACQILHGHTDIVLALDVFRKGWLFASCAKDQSVRIWRMNKAGQVMCVAQGSGHTHSVGTVCCSRLKESFLVTGSQDCTVKLWPLPKALLSKNTAPDNGPILLQAQTTQRCHDKDINSVAIAPNDKLLATGSQDRTAKLWALPQCQLLGVFSGHRRGLWCVQFSPMDQVLATASADGTIKLWALQDFSCLKTFEGHDASVLKVAFVSRGTQLLSSGSDGLVKLWTIKNNECVRTLDAHEDKVWGLHCSRLDDHALTGASDSRVILWKDVTEAEQAEEQARQEEQVVRQQELDNLLHEKRYLRALGLAISLDRPHTVLTVIQAIRRDPEACEKLEATMLRLRRDQKEALLRFCVTWNTNSRHCHEAQAVLGVLLRREAPEELLAYEGVRAALEALLPYTERHFQRLSRTLQAAAFLDFLWHNMKLPVPAAAPTPWETHKGALP

SEQ ID NO: 7319 - protein, 470 aa, Homo sapiens
MPGFDYKFLEKPKRRLLCPLCGKPMREPVQVSTCGHRFCDTCLQEFLSEGVFKCPEDQLPLDYAKIYPDPELEVQVLGLPIRCIHSEEGCRWSGPLRHLQGHLNTCSFNVIPCPNRCPMKLSRRDLPAHLQHDCPKRRLKCEFCGCDFSGEAYESHEGMCPQESVYCENKCGARMMRRLLAQHATSECPKRTQPCTYCTKEFVFDTIQSHQYQCPRLPVACPNQCGVGTVAREDLPGHLKDSCNTALVLCPFKDSGCKHRCPKLAMARHVEESVKPHLAMMCALVSRQRQELQELRRELEELSVGSDGVLIWKIGSYGRRLQEAKAKPNLECFSPAFYTHKYGYKLQVSAFLNGNGSGEGTHLSLYIRVLPGAFDNLLEWPFARRVTFSLLDQSDPGLAKPQHVTETFHPDPNWKNFQKPGTWRGSLDESSLGFGYPKFISHQDIRKRNYVRDDAVFIRAAVELPRKILS

SEQ ID NO: 7320 - protein, 198 aa, Homo sapiens
MPGFDYKFLEKPKRRLLCPLCGKPMREPVQVSTCGHRFCDTCLQEFLSEGVFKCPEDQLPLDYAKIYPDPELEVQVLGLPIRCIHSEEGCRWSGPLRHLQGHLNTCSFNVIPCPNRCPMKLSRRDLPAHLQHDCPKRRLKCEFCGCDFSGEAYESHESSLGFGYPKFISHQDIRKRNYVRDDAVFIRAAVELPRKILS

SEQ ID NO: 7321 - protein, 493 aa, Homo sapiens
MEPLRAPALRRLLPPLLLLLLSLPPRARAKYVRGNLSSKEDWVFLTRFCFLSDYGRLDFRFRYPEAKCCQNILLYFDDPSQWPAVYKAGDKDCLAKESVIRPENNQVINLTTQYAWSGCQVVSEEGTRYLSCSSGRSFRSGDGLQLEYEMVLTNGKSFWTRHFSADEFGILETDVTFLLIFILIFFLSCYFGYLLKGRQLLHTTYKMFMAAAGVEVLSLLFFCIYWGQYATDGIGNESVKILAKLLFSSSFLIFLLMLILLGKGFTVTRGRISHAGSVKLSVYMTLYTLTHVVLLIYEAEFFDPGQVLYTYESPAGYGLIGLQVAAYVWFCYAVLVSLRHFPEKQPFYVPFFAAYTLWFFAVPVMALIANFGIPKWAREKIVNGIQLGIHLYAHGVFLIMTRPSAANKNFPYHVRTSQIASAGVPGPGGSQSADKAFPQHVYGNVTFISDSVPNFTELFSIPPPATSPLPRAAPDSGLPLFRDLRPPGPLRDL

SEQ ID NO: 7322 - protein, 928 aa, Homo sapiens
MEGAGENAPESSSSAPGSEESARDPQVPPPEEESGDCARSLEAVPKKLCGYLSKFGGKGPIRGWKSRWFFYDERKCQLYYSRTAQDANPLDSIDLSSAVFDCKADAEEGIFEIKTPSRVITLKAATKQAMLYWLQQLQMKRWEFHNSPPAPPATPDAALAGNGPVLHLELGQEEAELEEFLCPVKTPPGLVGVAAALQPFPALQNISLKHLGTEIQNTMHNIRGNKQAQGTGHEPPGEDSPQSGEPQREEQPLASDASTPGREPEDSPKPAPKPSLTISFAQKAKRQNNTFPFFSEGITRNRTAQEKVAALEQQVLMLTKELKSQKELVKILHKALEAAQQEKRASSAYLAAAEDKDRLELVRHKVRQIAELGRRVEALEQERESLAHTASLREQQVQELQQHVQLLMDKNHAKQQVICKLSEKVTQDFTHPPDQSPLRPDAANRDFLSQQGKIEHLKDDMEAYRTQNCFLNSEIHQVTKIWRKVAEKEKALLTKCAYLQARNCQVESKYLAGLRRLQEALGDEASECSELLRQLVQEALQWEAGEASSDSIELSPISKYDEYGFLTVPDYEVEDLKLLAKIQALESRSHHLLGLEAVDRPLRERWAALGDLVPSAELKQLLRAGVPREHRPRVWRWLVHLRVQHLHTPGCYQELLSRGQAREHPAARQIELDLNRTFPNNKHFTCPTSSFPDKLRRVLLAFSWQNPTIGYCQGLNRLAAIALLVLEEEESAFWCLVAIVETIMPADYYCNTLTASQVDQRVLQDLLSEKLPRLMAHLGQHHVDLSLVTFNWFLVVFADSLISNILLRVWDAFLYEGTKVVFRYALAIFKYNEKEILRLQNGLEIYQYLRFFTKTISNSRKLMNIAFNDMNPFRMKQLRQLRMVHRERLEAELRELEQLKAEYLERRASRRRAVSEGCASEDEVEGEA

SEQ ID NO: 7323 - protein, 917 aa, Homo sapiens
MEGAGENAPESSSSAPGSEESARDPQVPPPEEESGDCARSLEAVPKKLCGYLSKFGGKGPIRGWKSRWFFYDERKCQLYYSRTAQDANPLDSIDLSSAVFDCKADAEEGIFEIKTPSRVITLKAATKQAMLYWLQQLQMKRWEFHNSPPAPPATPDAALAGNGPVLHLELGQEEAELEEFLCPVKTPPGLVGVAAALQPFPALQNISLKHLGTEIQNTMHNIRGNKQAQGTGHEPPGEDSPQSGEPQREEQPLASDASTPGREPEDSPKPAPKPSLTISFAQKAKRQNNTFPFFSEGITRNRTAQEKVAALEQQVLMLTKELKSQKELVKILHKALEAAQQEKRASSAYLAAAEDKDRLELVRHKVRQIAELGRRVEALEQERESLAHTASLREQQVQELQQHVQLLMDKNHAKQQVICKLSEKVTQDFTHPPDQSPLRPDAANRDFLSQQGKIEHLKDDMEAYRTQNCFLNSEIHQVTKIWRKVAEKEKALLTKCAYLQARNCQVESKYLAGLRRLQEALGDEASECSELLRQLVQEALQWEAGEASSDSIELSPISKYDEYGFLTVPDYEVEDLKLLAKIQALESRSHHLLGLEAVDRPLRERWAALGDLVPSAELKQLLRAGVPREHRPRVWRWLVHLRVQHLHTPGCYQELLSRGQAREHPAARQIELDLNRTFPNNKHFTCPTSSFPDKLRRVLLAFSWQNPTIGYCQGLNRLAAIALLVLEEEESAFWCLVAIVETIMPADYYCNTLTASQVDQRVLQDLLSEKLPRLMAHLGQHHVDLSLVTFNWFLVVFADSLISNILLRVWDAFLYEGTKYNEKEILRLQNGLEIYQYLRFFTKTISNSRKLMNIAFNDMNPFRMKQLRQLRMVHRERLEAELRELEQLKAEYLERRASRRRAVSEGCASEDEVEGEA

SEQ ID NO: 7324 - protein, 860 aa, Homo sapiens
MEGAGENAPESSSSAPGSEESARDPQVPPPEEESGDCARSLEAVPKKLCGYLSKFGGKGPIRGWKSRWFFYDERKCQLYYSRTAQDANPLDSIDLSSAVFDCKADAEEGIFEIKTPSRVITLKAATKQAMLYWLQQLQMKRWEFHNSPPAPPATPDAALAGNGPVLHLELGQEEAELEEFLCPVKTPPGLVGVAAALQPFPALQNISLKHLGTEIQNTMHNIRGNKQAQGTGHEPPGEDSPQSGEPQREEQPLASDASTPGREPEDSPKPAPKPSLTISFAQKAKRQNNTFPFFSEGITRNRTAQEKVAALEQQVLMLTKELKSQKELVKILHKALEAAQQEKRASSAYLAAAEDKDRLELVRHKVRQIAELGRRVEALEQERESLAHTASLREQQVQELQQHVQLLMDKNHAKQQVICKLSEKVTQDFTHPPDQSPLRPDAANRDFLSQQGKIEHLKDDMEAYRTQNCFLNSEIHQVTKIWRKVAEKEKALLTKCAYLQARNCQVESKYLAGLRRLQEALGDEASECSELLRQLVQEALQWEAGEASSDSIELSPISKYDEYGFLTVPDYEVEDLKLLAKIQALESRSHHLLGLEAVDRPLRERWAALGDLVPSAELKQLLRAGVPREHRPRVWRWLVHLRVQHLHTPGCYQELLSRGQAREHPAARQIELDLNRTFPNNKHFTCPTSSFPDKLRRVLLAFSWQNPTIGYCQGLNRLAAIALLVLEEEESAFWCLVAIVETIMPADYYCNTLTASQVDQRVLQDLLSEKLPRLMAHLGQHHVDLSLVTFNWFLVVFADSLISNILLRVWDAFLYEGTKVVFRYALAIFKYNEKEILRLQNGLEIYQYLRFFTKTISNSR

SEQ ID NO: 7325 - protein, 710 aa, Homo sapiens
MHNIRGNKQAQGTGHEPPGEDSPQSGEPQREEQPLASDASTPGREPEDSPKPAPKPSLTISFAQKAKRQNNTFPFFSEGITRNRTAQEKVAALEQQVLMLTKELKSQKELVKILHKALEAAQQEKRASSAYLAAAEDKDRLELVRHKVRQIAELGRRVEALEQERESLAHTASLREQQVQELQQHVQLLMDKNHAKQQVICKLSEKVTQDFTHPPDQSPLRPDAANRDFLSQQGKIEHLKDDMEAYRTQNCFLNSEIHQVTKIWRKVAEKEKALLTKCAYLQARNCQVESKYLAGLRRLQEALGDEASECSELLRQLVQEALQWEAGEASSDSIELSPISKYDEYGFLTVPDYEVEDLKLLAKIQALESRSHHLLGLEAVDRPLRERWAALGDLVPSAELKQLLRAGVPREHRPRVWRWLVHLRVQHLHTPGCYQELLSRGQAREHPAARQIELDLNRTFPNNKHFTCPTSSFPDKLRRVLLAFSWQNPTIGYCQGLNRLAAIALLVLEEEESAFWCLVAIVETIMPADYYCNTLTASQVDQRVLQDLLSEKLPRLMAHLGQHHVDLSLVTFNWFLVVFADSLISNILLRVWDAFLYEGTKVVFRYALAIFKYNEKEILRLQNGLEIYQYLRFFTKTISNSRKLMNIAFNDMNPFRMKQLRQLRMVHRERLEAELRELEQLKAEYLERRASRRRAVSEGCASEDEVEGEA

SEQ ID NO: 7326 - protein, 502 aa, Homo sapiens
MPIPWTASTSPLRPDAANRDFLSQQGKIEHLKDDMEAYRTQNCFLNSEIHQVTKIWRKVAEKEKALLTKCAYLQARNCQVESKYLAGLRRLQEALGDEASECSELLRQLVQEALQWEAGEASSDSIELSPISKYDEYGFLTVPDYEVEDLKLLAKIQALESRSHHLLGLEAVDRPLRERWAALGDLVPSAELKQLLRAGVPREHRPRVWRWLVHLRVQHLHTPGCYQELLSRGQAREHPAARQIELDLNRTFPNNKHFTCPTSSFPDKLRRVLLAFSWQNPTIGYCQGLNRLAAIALLVLEEEESAFWCLVAIVETIMPADYYCNTLTASQVDQRVLQDLLSEKLPRLMAHLGQHHVDLSLVTFNWFLVVFADSLISNILLRVWDAFLYEGTKVVFRYALAIFKYNEKEILRLQNGLEIYQYLRFFTKTISNSRKLMNIAFNDMNPFRMKQLRQLRMVHRERLEAELRELEQLKAEYLERRASRRRAVSEGCASEDEVEGEA

SEQ ID NO: 7327 - protein, 468 aa, Homo sapiens
MEAYRTQNCFLNSEIHQVTKIWRKVAEKEKALLTKCAYLQARNCQVESKYLAGLRRLQEALGDEASECSELLRQLVQEALQWEAGEASSDSIELSPISKYDEYGFLTVPDYEVEDLKLLAKIQALESRSHHLLGLEAVDRPLRERWAALGDLVPSAELKQLLRAGVPREHRPRVWRWLVHLRVQHLHTPGCYQELLSRGQAREHPAARQIELDLNRTFPNNKHFTCPTSSFPDKLRRVLLAFSWQNPTIGYCQGLNRLAAIALLVLEEEESAFWCLVAIVETIMPADYYCNTLTASQVDQRVLQDLLSEKLPRLMAHLGQHHVDLSLVTFNWFLVVFADSLISNILLRVWDAFLYEGTKVVFRYALAIFKYNEKEILRLQNGLEIYQYLRFFTKTISNSRKLMNIAFNDMNPFRMKQLRQLRMVHRERLEAELRELEQLKAEYLERRASRRRAVSEGCASEDEVEGEA

SEQ ID NO: 7328 - protein, 353 aa, Homo sapiens
MELTELLLVVMLLLTARLTLSSPAPPACDLRVLSKLLRDSHVLHSRLSQCPEVHPLPTPVLLPAVDFSLGEWKTQMEETKAQDILGAVTLLLEGVMAARGQLGPTCLSSLLGQLSGQVRLLLGALQSLLGTQLPPQGRTTAHKDPNAIFLSFQHLLRGKVRFLMLVGGSTLCVRRAPPTTAVPSRTSLVLTLNELPNRTSGLLETNFTASARTTGSGLLKWQQGFRAKIPGLLNQTSRSLDQIPGYLNRIHELLNGTRGLFPGPSRRTLGAPDISSGTSDTGSLPPNLQPGYSPSPTHPPTGQYTLFPLPPTLPTPVVQLHPLLPDPSAPTPTPTSPLLNTSYTHSQNLSQEG

SEQ ID NO: 7329 - protein, 349 aa, Homo sapiens
MELTELLLVVMLLLTARLTLSSPAPPACDLRVLSKLLRDSHVLHSRLSQCPEVHPLPTPVLLPAVDFSLGEWKTQMEETKAQDILGAVTLLLEGVMAARGQLGPTCLSSLLGQLSGQVRLLLGALQSLLGTQGRTTAHKDPNAIFLSFQHLLRGKVRFLMLVGGSTLCVRRAPPTTAVPSRTSLVLTLNELPNRTSGLLETNFTASARTTGSGLLKWQQGFRAKIPGLLNQTSRSLDQIPGYLNRIHELLNGTRGLFPGPSRRTLGAPDISSGTSDTGSLPPNLQPGYSPSPTHPPTGQYTLFPLPPTLPTPVVQLHPLLPDPSAPTPTPTSPLLNTSYTHSQNLSQEG

SEQ ID NO: 7330 - protein, 314 aa, Homo sapiens
MELTELLLVVMLLLTARLTLSSPAPPACDLRVLSKLLRDSHVLHSRLSQCPEVHPLPTPVLLPAVDFSLGEWKTQMEETKAQDILGAVTLLLEGVMAARGQLGPTCLSSLLGQLSGQVRLLLGALQSLLGTQLPPQGRTTAHKDPNAIFLSFQHLLRGKTSGLLETNFTASARTTGSGLLKWQQGFRAKIPGLLNQTSRSLDQIPGYLNRIHELLNGTRGLFPGPSRRTLGAPDISSGTSDTGSLPPNLQPGYSPSPTHPPTGQYTLFPLPPTLPTPVVQLHPLLPDPSAPTPTPTSPLLNTSYTHSQNLSQEG

SEQ ID NO: 7331 - protein, 189 aa, Homo sapiens
MEEGGNLGGLIKMVHLLVLSGAWGMQMWVTFVSGFLLFRSLPRHTFGLVQSKLFPFYFHISMGCAFINLCILASQHAWAQLTFWEASQLYLLFLSLTLATVNARWLEPRTTAAMWALQTVEKERGLGGEVPGSHQGPDPYRQLREKDPKYSALRQNFFRYHGLSSLCNLGCVLSNGLCLAGLALEIRSL

SEQ ID NO: 7332 - protein, 586 aa, Homo sapiens
MQAGARFQRRRRQLQQQQPRRRQPLLWPMDAEPPPPPPWVWMVPGSAGLLRLSAGVVVPPVLLASAPPPAAPLLPGLPGWPAPSEPVLPLLPLPSAPDSAAAAAAHPFPALHGQWLFGGHSPSLGLPPSSTVELVPVFPHLCPSALATPIGKSWIDKRIPNCKIFFNNSFALDSTWIHPEESRFFHGHEKPRLLANQVAVSLSRPAPASRPLPTVVLAPQPIPGGCHNSLKVTSSPAIAIATAAAAAMVSVDPENLRGPSPSSVQPRHFLTLAPIKIPLRTSPVSDTRTERGRVARPPALMLRAQKSRDGDKEDKEPPPMLGGGEDSTARGNRPVASTPVPGSPWCVVWTGDDRVFFFNPTMHLSVWEKPMDLKDRGDLNRIIEDPPHKRKLEAPATDNSDGSSSEDNREDQDVKTKRNRTEGCGSPKPEEAKREDKGTRTPPPQILLPLEERVTHFRDMLLERGVSAFSTWEKELHKIVFDPRYLLLNSEERKQIFEQFVKTRIKEEYKEKKSKLLLAKEEFKKLLEESKVSPRTTFKEFAEKYGRDQRFRLVQKRKDQEHFFNQFILILKKRDKENRLRLRKMR

SEQ ID NO: 7333 - protein, 283 aa, Homo sapiens
MVSAAAPSLLILLLLLLGSVPATDARSVPLKATFLEDVAGSGEAEGSSASSPSLPPPWTPALSPTSMGPQPITLGGPSPPTNFLDGIVDFFRQYVMLIAVVGSLAFLLMFIVCAAVITRQKQKASAYYPSSFPKKKYVDQSDRAGGPRAFSEVPDRAPDSRPEEALDSSRQLQADILAATQNLKSPTRAALGGGDGARMVEGRGAEEEEKGSQEGDQEVQGHGVPVETPEAQEEPCSGVLEGAVVAGEGQGELEGSLLLAQEAQGPVGPPESPCACSSVHPSV

SEQ ID NO: 7334 - protein, 297 aa, Homo sapiens
MAGYATTPSPMQTLQEEAVCAICLDYFKDPVSISCGHNFCRGCVTQLWSKEDEEDQNEEEDEWEEEEDEEAVGAMDGWDGSIREVLYRGNADEELFQDQDDDELWLGDSGITNWDNVDYMWDEEEEEEEEDQDYYLGGLRPDLRIDVYREEEILEAYDEDEDEELYPDIHPPPSLPLPGQFTCPQCRKSFTRRSFRPNLQLANMVQIIRQMCPTPYRGNRSNDQGMCFKHQEALKLFCEVDKEAICVVCRESRSHKQHSVLPLEEVVQEYQEIKLETTLVGILQIEQESIHSKAYNQ

SEQ ID NO: 7335 - protein, 286 aa, Homo sapiens
MAGYATTPSPMQTLQEEAVCAICLDYFKDPVSISCGHNFCRGCVTQLWSKEDEEDQNEEEDEWEEEEDEEAVGAMDGWDGSIREVLYRGNADEELFQDQDDDELWLGDSGITNWDNVDYMWDEEEEEEEEDQDYYLGGLRPDLRIDVYREEEILEAYDEDEDEELYPDIHPPPSLPLPGQFTCPQCRKSFTRRSFRPNLQLANMVQIIRQMCPTPYRGNRSNDQGMCFKHQEALKLFCEVDKEAICVVCRESRSHKQHSVLPLEEVVQEYQVREMRECGGMKGVER

SEQ ID NO: 7336 - protein, 134 aa, Homo sapiens
MTEEPIKEILGAPKAHMAATMEKSPKSEVVITTVPLVSEIQLMAATGGTELSCYRCIIPFAVVVFIAGIVVTAVAYSFNSHGSIISIFGLVVLSSGLFLLASSALCWKVRQRSKKAKRRESQTALVANQRSLFA

SEQ ID NO: 7337 - protein, 209 aa, Homo sapiens
MEFVTALADLRAEASCPICLDYLKDPVTISCGHNFCLSCIIMSWKDLHDSFPCPFCHFCCPERKFISNPQLGSLTEIAKQLQIRSKKRKRQEEKHVCKKHNQVLTFFCQKDLELLCPRCSLSTDHQHHCVWPIKKAASYHRKKLEEYNAPWKERVELIEKVITMQTRKSLELKKKMESPSVTRLECSCTISAHFNLRLPGSSDSSASGS

SEQ ID NO: 7338 - protein, 223 aa, Homo sapiens
MRVHLGGLAGAAALTGALSFVLLAAAIGTDFWYIIDTERLERTGPGAQDLLGSINRSQPEPLSSHSGLWRTCRVQSPCTPLMNPFRLENVTVSESSRQLLTMHGTFVILLPLSLILMVFGGMTGFLSFLLQAYLLLLLTGILFLFGAMVTLAGISVYIAYSAAAFREALCLLEEKALLDQVDISFGWSLALGWISFIAELLTGAAFLAAARELSLRRRQDQAI

SEQ ID NO: 7339 - protein, 677 aa, Homo sapiens
MTGRVCRGCGGTDIELDAARGDAVCTACGSVLEDNIIVSEVQFVESSGGGSSAVGQFVSLDGAGKTPTLGGGFHVNLGKESRAQTLQNGRRHIHHLGNQLQLNQHCLDTAFNFFKMAVSRHLTRGRKMAHVIAACLYLVCRTEGTPHMLLDLSDLLQVNVYVLGKTFLLLARELCINAPAIDPCLYIPRFAHLLEFGEKNHEVSMTALRLLQRMKRDWMHTGRRPSGLCGAALLVAARMHDFRRTVKEVISVVKVCESTLRKRLTEFEDTPTSQLTIDEFMKIDLEEECDPPSYTAGQRKLRMKQLEQVLSKKLEEVEGEISSYQDAIEIELENSRPKAKGGLASLAKDGSTEDTASSLCGEEDTEDEELEAAASHLNKDLYRELLGGAPGSSEAAGSPEWGGRPPALGSLLDPLPTAASLGISDSIRECISSQSSDPKDASGDGELDLSGIDDLEIDRYILNESEARVKAELWMRENAEYLREQREKEARIAKEKELGIYKEHKPKKSCKRREPIQASTAREAIEKMLEQKKISSKINYSVLRGLSSAGGGSPHREDAQPEHSASARKLSRRRTPASRSGADPVTSVGKRLRPLVSTQPAKKVATGEALLPSSPTLGAEPARPQAVLVESGPVSYHADEEADEEEPDEEDGEPCVSALQMMGSNDYGCDGDEDDGY

SEQ ID NO: 7340 - protein, 134 aa, Homo sapiens
MTALRLLQRMKRDWMHTGRRPSGLCGAALLVAARMHDFRRTVKEVISVVKVCESTLRKRLTEFEDTPTSQLTIDEFMKIDLEEECDPPIEEGGQTEAREPPQASSWEGPSTTRRRSQLWHGCPGCGRGGFTLCP

SEQ ID NO: 7341 - protein, 473 aa, Homo sapiens
MTALRLLQRMKRDWMHTGRRPSGLCGAALLVAARMHDFRRTVKEVISVVKVCESTLRKRLTEFEDTPTSQLTIDEFMKIDLEEECDPPSYTAGQRKLRMKQLEQVLSKKLEEVEGEISSYQDAIEIELENSRPKAKGGLASLAKDGSTEDTASSLCGEEDTEDEELEAAASHLNKDLYRELLGGAPGSSEAAGSPEWGGRPPALGSLLDPLPTAASLGISDSIRECISSQSSDPKDASGDGELDLSGIDDLEIDRYILNESEARVKAELWMRENAEYLREQREKEARIAKEKELGIYKEHKPKKSCKRREPIQASTAREAIEKMLEQKKISSKINYSVLRGLSSAGGGSPHREDAQPEHSASARKLSRRRTPASRSGADPVTSVGKRLRPLVSTQPAKKVATGEALLPSSPTLGAEPARPQAVLVESGPVSYHADEEADEEEPDEEDGEPCVSALQMMGSNDYGCDGDEDDGY

SEQ ID NO: 7342 - protein, 242 aa, Homo sapiens
MTGRVCRGCGGTDIELDAARGDAVCTACGSVLEDNIIVSEVQFVESSGGGSSAVGQFVSLDGAGKTPTLGGGFHVNLGKESRAQTLQNGRRHIHHLGNQLQLNQHCLDTAFNFFKMAVSRHLTRGRKMAHVIAACLYLVCRTEGTPHMLLDLSDLLQVDSLRPASFPTWGCDLGVVTRVVTGVYPRCASRISVAGLCCLPSQEVLVCRMRGLHDMGVTVRDLWECGSPWQEGHLPMLGTVGC

SEQ ID NO: 7343 - protein, 650 aa, Homo sapiens
MTGRVCRGCGGTDIELDAARGDAVCTACGSVLEDNIIVSEVQFVESSGGGSSAVGQFVSLDGRRHIHHLGNQLQLNQHCLDTAFNFFKMAVSRHLTRGRKMAHVIAACLYLVCRTEGTPHMLLDLSDLLQVNVYVLGKTFLLLARELCINAPAIDPCLYIPRFAHLLEFGEKNHEVSMTALRLLQRMKRDWMHTGRRPSGLCGAALLVAARMHDFRRTVKEVISVVKVCESTLRKRLTEFEDTPTSQLTIDEFMKIDLEEECDPPSYTAGQRKLRMKQLEQVLSKKLEEVEGEISSYQDAIEIELENSRPKAKGGLASLAKDGSTEDTASSLCGEEDTEDEELEAAASHLNKDLYRELLGGAPGSSEAAGSPEWGGRPPALGSLLDPLPTAASLGISDSIRECISSQSSDPKDASGDGELDLSGIDDLEIDRYILNESEARVKAELWMRENAEYLREQREKEARIAKEKELGIYKEHKPKKSCKRREPIQASTAREAIEKMLEQKKISSKINYSVLRGLSSAGGGSPHREDAQPEHSASARKLSRRRTPASRSGADPVTSVGKRLRPLVSTQPAKKVATGEALLPSSPTLGAEPARPQAVLVESGPVSYHADEEADEEEPDEEDGEPCVSALQMMGSNDYGCDGDEDDGY

SEQ ID NO: 7344 - protein, 208 aa, Homo sapiens
MTGRVCRGCGGTDIELDAARGDAVCTACGSVLEDNIIVSEVQFVESSGGGSSAVGQFVSLDGAGKTPTLGGGFHVNLGKESRAQTLQNGRRHIHHLGNQLQLNQHCLDTAFNFFKMAVSRHLTRGRKMAHVIAACLYLVCRTEGTPHMLLDLSDLLQVDSLRPASFPTWGCDLGVVTRVVTGVYPRCLHASQWPVCAACPVRKFWSVG

SEQ ID NO: 7345 - protein, 562 aa, Homo sapiens
MAVSRHLTRGRKMAHVIAACLYLVCRTEGTPHMLLDLSDLLQVNVYVLGKTFLLLARELCINAPAIDPCLYIPRFAHLLEFGEKNHEVSMTALRLLQRMKRDWMHTGRRPSGLCGAALLVAARMHDFRRTVKEVISVVKVCESTLRKRLTEFEDTPTSQLTIDEFMKIDLEEECDPPSYTAGQRKLRMKQLEQVLSKKLEEVEGEISSYQDAIEIELENSRPKAKGGLASLAKDGSTEDTASSLCGEEDTEDEELEAAASHLNKDLYRELLGGAPGSSEAAGSPEWGGRPPALGSLLDPLPTAASLGISDSIRECISSQSSDPKDASGDGELDLSGIDDLEIDRYILNESEARVKAELWMRENAEYLREQREKEARIAKEKELGIYKEHKPKKSCKRREPIQASTAREAIEKMLEQKKISSKINYSVLRGLSSAGGGSPHREDAQPEHSASARKLSRRRTPASRSGADPVTSVGKRLRPLVSTQPAKKVATGEALLPSSPTLGAEPARPQAVLVESGPVSYHADEEADEEEPDEEDGEPCVSALQMMGSNDYGCDGDEDDGY

SEQ ID NO: 7346 - protein, 584 aa, Homo sapiens
MAVSRHLTRGRKMAHVIAACLYLVCRTEGTPHMLLDLSDLLQVNVYVLGKTFLLLARELCINAPAIDPCLYIPRFAHLLEFGEKNHEVSMTALRLLQRMKRDWMHTGRRPSGLCGAALLVAARMHDFRRTVKEVISVVKVCESTLRKRLTEFEDTPTSQLTIDEFMKIDLEEECDPPSYTAGQRKLRMKQLEQVLSKKLEEVEGEISSYQDAIEIELENSRPKAKGGLASLAKDGSTEDTASSLCGEEDTEDEELEAAASHLNKDLYRELLGGAPGSSEAAGSPEWGGRPPALGSLLDPLPTAASLGISDSIRECISSQSSDPKDASGDGELDLSGIDDLEIDRRDLSMPRCAKAKSQPHFPVLAQYILNESEARVKAELWMRENAEYLREQREKEARIAKEKELGIYKEHKPKKSCKRREPIQASTAREAIEKMLEQKKISSKINYSVLRGLSSAGGGSPHREDAQPEHSASARKLSRRRTPASRSGADPVTSVGKRLRPLVSTQPAKKVATGEALLPSSPTLGAEPARPQAVLVESGPVSYHADEEADEEEPDEEDGEPCVSALQMMGSNDYGCDGDEDDGY

SEQ ID NO: 7347 - protein, 439 aa, Homo sapiens
MHDFRRTVKEVISVVKVCESTLRKRLTEFEDTPTSQLTIDEFMKIDLEEECDPPSYTAGQRKLRMKQLEQVLSKKLEEVEGEISSYQDAIEIELENSRPKAKGGLASLAKDGSTEDTASSLCGEEDTEDEELEAAASHLNKDLYRELLGGAPGSSEAAGSPEWGGRPPALGSLLDPLPTAASLGISDSIRECISSQSSDPKDASGDGELDLSGIDDLEIDRYILNESEARVKAELWMRENAEYLREQREKEARIAKEKELGIYKEHKPKKSCKRREPIQASTAREAIEKMLEQKKISSKINYSVLRGLSSAGGGSPHREDAQPEHSASARKLSRRRTPASRSGADPVTSVGKRLRPLVSTQPAKKVATGEALLPSSPTLGAEPARPQAVLVESGPVSYHADEEADEEEPDEEDGEPCVSALQMMGSNDYGCDGDEDDGY

SEQ ID NO: 7348 - protein, 517 aa, Homo sapiens
MAAQLLEEKLTCAICLGLYQDPVTLPCGHNFCGACIRDWWDRCGKACPECREPFPDGAELRRNVALSGVLEVVRAGPARDPGPDPGPGPDPAARCPRHGRPLELFCRTEGRCVCSVCTVRECRLHERALLDAERLKREAQLRASLEVTQQQATQAEGQLLELRKQSSQIQNSACILASWVSGKFSSLLQALEIQHTTALRSIEVAKTQALAQARDEEQRLRVHLEAVARHGCRIRELLEQVDEQTFLQESQLLQPPGPLGPLTPLQWDEDQQLGDLKQLLSRLCGLLLEEGSHPGAPAKPVDLAPVEAPGPLAPVPSTVCPLRRKLWQNYRNLTFDPVSANRHFYLSRQDQQVKHCRQSRGPGGPGSFELWQVQCAQSFQAGHHYWEVRASDHSVTLGVSYPQLPRCRLGPHTDNIGRGPCSWGLCVQEDSLQAWHNGEAQRLPGVSGRLLGMDLDLASGCLTFYSLEPQTQPLYTFHALFNQPLTPVFWLLEGRTLTLCHQPGAVFPLGPQEEVLS

SEQ ID NO: 7349 - protein, 348 aa, Homo sapiens
MGQEEELLRIAKKLEKMVARKNTEGALDLLKKLHSCQMSIQLLQTTRIGVAVNGVRKHCSDKEVVSLAKVLIKNWKRLLDSPGPPKGEKGEEREKAKKKEKGLECSDWKPEAGLSPPRKKREDPKTRRDSVDSKSSASSSPKRPSVERSNSSKSKAESPKTPSSPLTPTFASSMCLLAPCYLTGDSVRDKCVEMLSAALKADDDYKDYGVNCDKMASEIEDHIYQELKSTDMKYRNRVRSRISNLKDPRNPGLRRNVLSGAISAGLIAKMTAEEMASDELRELRNAMTQEAIREHQMAKTGGTTTDLFQCSKCKKKNCTYNQVQTRSADEPMTTFVLCNECGNRWKFC

SEQ ID NO: 7350 - protein, 154 aa, Homo sapiens
MGQEEELLRIAKKLEKMVARKNTEGALDLLKKLHSCQMSIQLLQTTRIGVAVNGVRKHCSDKEVVSLAKVLIKNWKRLLDSPGPPKGEKGEEREKAKKKEKGLECSDWKPEAGLSPPRKKREDPKTRRDSVDSKSSASSSPKRPSVERACSLMQ

SEQ ID NO: 7351 - protein, 295 aa, Homo sapiens
METPAWPRVPRPETAVARTLLLGWVFAQVAGASGTTNTVAAYNLTWKSTNFKTILEWEPKPVNQVYTVQISTKSGDWKSKCFYTTDTECDLTDEIVKDVKQTYLARVFSYPAGNVESTGSAGEPLYENSPEFTPYLETNLGQPTIQSFEQVGTKVNVTVEDERTLVRRNNTFLSLRDVFGKDLIYTLYYWKSSSSGKKTAKTNTNEFLIDVDKGENYCFSVQAVIPSRTVNRKSTDSPVECMGQEKGEFREIFYIIGAVVFVVIILVIILAISLHKCRKAGVGQSWKENSPLNVS

SEQ ID NO: 7352 - protein, 238 aa, Homo sapiens
METPAWPRVPRPETAVARTLLLGWVFAQVAGASGTTNTVAAYNLTWKSTNFKTILEWEPKPVNQVYTVQISTKSGDWKSKCFYTTDTECDLTDEIVKDVKQTYLARVFSYPAGNVESTGSAGEPLYENSPEFTPYLETNLGQPTIQSFEQVGTKVNVTVEDERTLVRRNNTFLSLRDVFGKDLIYTLYYWKSSSSGKKYSTSLELWYLWSSSLSSSWLYLYTSVERQEWGRAGRRTPH

SEQ ID NO: 7353 - protein, 663 aa, Homo sapiens
MSARLPVLSPPRWPRLLLLSLLLLGAVPGPRRSGAFYLPGLAPVNFCDEEKKSDECKAEIELFVNRLDSVESVLPYEYTAFDFCQASEGKRPSENLGQVLFGERIEPSPYKFTFNKKETCKLVCTKTYHTEKAEDKQKLEFLKKSMLLNYQHHWIVDNMPVTWCYDVEDGQRFCNPGFPIGCYITDKGHAKDACVISSDFHERDTFYIFNHVDIKIYYHVVETGSMGARLVAAKLEPKSFKHTHIDKPDCSGPPMDISNKASGEIKIAYTYSVSFEEDDKIRWASRWDYILESMPHTHIQWFSIMNSLVIVLFLSGMVAMIMLRTLHKDIARYNQMDSTEDAQEEFGWKLVHGDIFRPPRKGMLLSVFLGSGTQILIMTFVTLFFACLGFLSPANRGALMTCAVVLWVLLGTPAGYVAARFYKSFGGEKWKTNVLLTSFLCPGIVFADFFIMNLILWGEGSSAAIPFGTLVAILALWFCISVPLTFIGAYFGFKKNAIEHPVRTNQIPRQIPEQSFYTKPLPGIIMGGILPFGCIFIQLFFILNSIWSHQMYYMFGFLFLVFIILVITCSEATILLCYFHLCAEDYHWQWRSFLTSGFTAVYFLIYAVHYFFSKLQITGTASTILYFGYTMIMVLIFFLFTGTIGFFACFWFVTKIYSVVKVD

SEQ ID NO: 7354 - protein, 1024 aa, Homo sapiens
MGEDDAALRAGSRGLSDPWADSVGVRPRTTERHIAVHKRLVLAFAVSLVALLAVTMLAVLLSLRFDECGASATPGADGGPSGFPERGGNGSLPGSARRNHHAGGDSWQPEAGGVASPGTTSAQPPSEEEREPWEPWTQLRLSGHLKPLHYNLMLTAFMENFTFSGEVNVEIACRNATRYVVLHASRVAVEKVQLAEDRAFGAVPVAGFFLYPQTQVLVVVLNRTLDAQRNYNLKIIYNALIENELLGFFRSSYVLHGERRFLGVTQFSPTHARKAFPCFDEPIYKATFKISIKHQATYLSLSNMPVETSVFEEDGWVTDHFSQTPLMSTYYLAWAICNFTYRETTTKSGVVVRLYARPDAIRRGSGDYALHITKRLIEFYEDYFKVPYSLPKLDLLAVPKHPYAAMENWGLSIFVEQRILLDPSVSSISYLLDVTMVIVHEICHQWFGDLVTPVWWEDVWLKEGFAHYFEFVGTDYLYPGWNMEKQRFLTDVLHEVMLLDGLASSHPVSQEVLQATDIDRVFDWIAYKKGAALIRMLANFMGHSVFQRGLQDYLTIHKYGNAARNDLWNTLSEALKRNGKYVNIQEVMDQWTLQMGYPVITILGNTTAENRIIITQQHFIYDISAKTKALKLQNNSYLWQIPLTIVVGNRSHVSSEAIIWVSNKSEHHRITYLDKGSWLLGNINQTGYFRVNYDLRNWRLLIDQLIRNHEVLSVSNRAGLIDDAFSLARAGYLPQNIPLEIIRYLSEEKDFLPWHAASRALYPLDKLLDRMENYNIFNEYILKQVATTYIKLGWPKNNFNGSLVQASYQHEELRREVIMLACSFGNKHCHQQASTLISDWISSNRNRIPLNVRDIVYCTGVSLLDEDVWEFIWMKFHSTTAVSEKKILLEALTCSDDRNLLNRLLNLSLNSEVVLDQDAIDVIIHVARNPHGRDLAWKFFRDKWKILNTRYGEALFMNSKLISGVTEFLNTEGELKELKNFMKNYDGVAAASFSRAVETVEANVRWKMLYQDELFQWLGKALRH

SEQ ID NO: 7355 - protein, 420 aa, Homo sapiens
MPGGCSRGPAAGDGRLRLARLALVLLGWVSSSSPTSSASSFSSSAPFLASAVSAQPPLPDQCPALCECSEAARTVKCVNRNLTEVPTDLPAYVRNLFLTGNQLAVLPAGAFARRPPLAELAALNLSGSRLDEVRAGAFEHLPSLRQLDLSHNPLADLSPFAFSGSNASVSAPSPLVELILNHIVPPEDERQNRSFEGMVVAALLAGRALQGLRRLELASNHFLYLPRDVLAQLPSLRHLDLSNNSLVSLTYVSFRNLTHLESLHLEDNALKVLHNGTLAELQGLPHIRVFLDNNPWVCDCHMADMVTWLKETEVVQGKDRLTCAYPEKMRNRVLLELNSADLDCDPILPPSLQTSYVFLGIVLALIGAIFLLVLYLNRKGIKKWMHNIRDACRDHMEGYHYRYEINADPRLTNLSSNSDV

SEQ ID NO: 7356 - protein, 450 aa, Homo sapiens
MDSDTLRVFQNELICCICVNYFIDPVTTDCVHSFCRPCLCLCSEEGRAPMRCPLCRKISEKPNFNTNVALKKLASLARQTRPQNINSSDNICVLHEETKELFCEADKRLLCGPCSESPEHMAHSHSPIGWAAEECRVQKLIKEMDYLWKINQETQNNLNQETSKFCSLVDYVSLRKVIITIQYQKMHIFLDEEEQRHLQALEREAKELFQQLQDSQVRMTQHLEGMKDMYRELWETYHMPDVELLQDVGNISARTDLAQMPKPQPVNPELTSWCITGVLDMLNNFRVDNALSTEMTPCYISLSEDVRRVIFGDDHRSAPMDPQGVESFAVWCAQAFTSGKHYWEVDVTHSSNWILGVCRDSRTADTNIVIDSDKTFFSISSKTSNHYSLSTNSPPLIQYVQRPLGWVGVFLDYDNGSVSFFDVSKGSLIYGFPPSSFSSPLRPFFCFGCT

SEQ ID NO: 7357 - protein, 760 aa, Homo sapiens
MSPKKVQIKVEEKEDETEESSSEEEEEVEDKLPRRESLRPKRKRTRDVINEDDPEPEPEDEETRKAREKERRRRLKRGAEEEEIDEEELERLKAELDEKRQIIATVKCKPWKMEKKIEVLKEAKKFVSENEGALGKGKGKRWFAFKMMMAKKWAKFLRDFENFKAACVPWENKIKAIESQFGSSVASYFLFLRWMYGVNMVLFILTFSLIMLPEYLWGLPYGSLPRKTVPRAEEASAANFGVLYDFNGLAQYSVLFYGYYDNKRTIGWMNFRLPLSYFLVGIMCIGYSFLVVLKAMTKNIGDDGGGDDNTFNFSWKVFTSWDYLIGNPETADNKFNSITMNFKEAITEEKAAQVEENVHLIRFLRFLANFFVFLTLGGSGYLIFWAVKRSQEFAQQDPDTLGWWEKNEMNMVMSLLGMFCPTLFDLFAELEDYHPLIALKWLLGRIFALLLGNLYVFILALMDEINNKIEEEKLVKANITLWEANMIKAYNASFSENSTGPPFFVHPADVPRGPCWETMVGQEFVRLTVSDVLTTYVTILIGDFLRACFVRFCNYCWCWDLEYGYPSYTEFDISGNVLALIFNQGMIWMGSFFAPSLPGINILRLHTSMYFQCWAVMCCNVPEARVFKASRSNNFYLGMLLLILFLSTMPVLYMIVSLPPSFDCGPFSGKNRMFEVIGETLEHDFPSWMAKILRQLSNPGLVIAVILVMVLAIYYLNATAKGQKAANLDLKKKMKMQALENKMRNKKMAAARAAAAAGRQ

SEQ ID NO: 7358 - protein, 184 aa, Homo sapiens
MESFSSKSLALQAEKKLLSKMAGRSVAHLFIDETSSEVLDELYRVSKEYTHSRPQAQRVIKDLIKVAIKVAVLHRNGSFGPSELALATRFRQKLRQGAMTALSFGEVDFTFEAAVLAGLLTECRDVLLELVEHHLTPKSHGRIRHVFDHFSDPGLLTALYGPDFTQHLGKICDGLRKLLDEGKL

SEQ ID NO: 7359 - protein, 260 aa, Homo sapiens
MLFLALGSPWAVELPLCGRRTALCAAAALRGPRASVSRASSSSGPSGPVAGWSTGPSGAARLLRRPGRAQIPVYWEGYVRFLNTPSDKSEDGRLIYTGNMARAVFGVKCFSYSTSLIGLTFLPYIFTQNNAISESVPLPIQIIFYGIMGSFTVITPVLLHFITKGYVIRLYHEATTDTYKAITYNAMLAETSTVFHQNDVKIPDAKHVFTTFYAKTKSLLVNPVLFPNREDYIHLMGYDKEEFILYMEETSEEKRHKDDK

SEQ ID NO: 7360 - protein, 161 aa, Homo sapiens
MARAVFGVKCFSYSTSLIGLTFLPYIFTQNNAISESVPLPIQIIFYGIMGSFTVITPVLLHFITKGYVIRLYHEATTDTYKAITYNAMLAETSTVFHQNDVKIPDAKHVFTTFYAKTKSLLVNPVLFPNREDYIHLMGYDKEEFILYMEETSEEKRHKDDK

SEQ ID NO: 7361 - protein, 107 aa, Homo sapiens
MLFLALGSPWAVELPLCGRRTALCAAAALRGPRASVSRASSSSGPSGPVAGWSTGPSGAARLLRRPGRAQIPVYWEGYVRFLNTPSDKSEDGRLIYTGNMARAVFGK

SEQ ID NO: 7362 - protein, 417 aa, Homo sapiens
MEVNPPKQEHLLALKVMRLTKPTLFTNIPVTCEEKDLPGDLFNQLMRDDPSTVNGAEVLMLGEMLTLPQNFGNIFLGETFSSYISVHNDSNQVVKDILVKADLQTSSQRLNLSASNAAVAELKPDCCIDDVIHHEVKEIGTHILVCAVSYTTQAGEKMYFRKFFKFQVLKPLDVKTKFYNAESDLSSVTDEVFLEAQIQNMTTSPMFMEKVSLEPSIMYNVTELNSVSQAGECVSTFGSRAYLQPMDTRQYLYCLKPKNEFAEKAGIIKGVTVIGKLDIVWKTNLGERGRLQTSQLQRMAPGYGDVRLSLEAIPDTVNLEEPFHITCKITNCSERTMDLVLEMCNTNSIHWCGISGRQLGKLHPSSSLCLALTLLSSVQGLQSISGLRLTDTFLKRTYEYDDIAQVCVVSSAIKVES

SEQ ID NO: 7363 - protein, 411 aa, Homo sapiens
MEVNPPKQEHLLALKVMRLTKPTLFTNIPVTCEEKDLPGDLFNQLMRDDPSTVNGAEVLMLGEMLTLPQNFGNIFLGETFSSYISVHNDSNQVVKDILVKADLQTSSQRLNLSASNAAVAELKPDCCIDDVIHHEVKEIGTHILVCAVSYTTQAGEKMYFRKFFKFQVLKPLDVKTKFYNAETDEVFLEAQIQNMTTSPMFMEKVSLEPSIMYNVTELNSVSQAGECVSTFGSRAYLQPMDTRQYLYCLKPKNEFAEKAGIIKGVTVIGKLDIVWKTNLGERGRLQTSQLQRMAPGYGDVRLSLEAIPDTVNLEEPFHITCKITNCSERTMDLVLEMCNTNSIHWCGISGRQLGKLHPSSSLCLALTLLSSVQGLQSISGLRLTDTFLKRTYEYDDIAQVCVVSSAIKVES

SEQ ID NO: 7364 - protein, 412 aa, Homo sapiens
MEVNPPKQEHLLALKVMRLTKPTLFTNIPVTCEEKDLPGDLFNQLMRDDPSTVNGAEVLMLGEMLTLPQNFGNIFLGETFSSYISVHNDSNQVVKDILVKADLQTSSQRLNLSASNAAVAELKPDCCIDDVIHHEVKEIGTHILVCAVSYTTQAGEKMYFRKFFKFQVLKPLDVKTKFYNAETDEVFLEAQIQNMTTSPMFMEKVSLEPSIMYNVTELNSVSQAGECVSTFGSRAYLQPMDTRQYLYCLKPKNEFAEKAGIIKGVTVIGKLDIVWKTNLGERGRLQTSQLQRMAPGYGDVRLSLEAIPDTVNLEEPFHITCKITNCSSERTMDLVLEMCNTNSIHWCGISGRQLGKLHPSSSLCLALTLLSSVQGLQSISGLRLTDTFLKRTYEYDDIAQVCVVSSAIKVES

SEQ ID NO: 7365 - protein, 418 aa, Homo sapiens
MEVNPPKQEHLLALKVMRLTKPTLFTNIPVTCEEKDLPGDLFNQLMRDDPSTVNGAEVLMLGEMLTLPQNFGNIFLGETFSSYISVHNDSNQVVKDILVKADLQTSSQRLNLSASNAAVAELKPDCCIDDVIHHEVKEIGTHILVCAVSYTTQAGEKMYFRKFFKFQVLKPLDVKTKFYNAESDLSSVTDEVFLEAQIQNMTTSPMFMEKVSLEPSIMYNVTELNSVSQAGECVSTFGSRAYLQPMDTRQYLYCLKPKNEFAEKAGIIKGVTVIGKLDIVWKTNLGERGRLQTSQLQRMAPGYGDVRLSLEAIPDTVNLEEPFHITCKITNCSSERTMDLVLEMCNTNSIHWCGISGRQLGKLHPSSSLCLALTLLSSVQGLQSISGLRLTDTFLKRTYEYDDIAQVCVVSSAIKVES

SEQ ID NO: 7366 - protein, 309 aa, Homo sapiens
MEVNPPKQEHLLALKVMRLTKPTLFTNIPVTCEEKDLPGDLFNQLMRDDPSTVNGAEVLMLGEMLTLPQNFGNIFLGETFSSYISVHNDSNQVVKDILVKADLQTSSQRLNLSASNAAVAELKPDCCIDDVIHHEVKEIGTHILVCAVSYTTQAGEKMYFRKFFKFQVLKPLDVKTKFYNAETDEVFLEAQIQNMTTSPMFMEKVSLEPSIMYNVTELNSVSQAGECVSTFGSRAYLQPMDTRQYLYCLKPKNEFAEKAGIIKGVTVIGKLDIVWKTNLGERGRLQTSQLQRMVSLEKTSLGFWCVKDR

SEQ ID NO: 7367 - protein, 34350 aa, Homo sapiens
MTTQAPTFTQPLQSVVVLEGSTATFEAHISGFPVPEVSWFRDGQVISTSTLPGVQISFSDGRAKLTIPAVTKANSGRYSLKATNGSGQATSTAELLVKAETAPPNFVQRLQSMTVRQGSQVRLQVRVTGIPTPVVKFYRDGAEIQSSLDFQISQEGDLYSLLIAEAYPEDSGTYSVNATNSVGRATSTAELLVQGEEEVPAKKTKTIVSTAQISESRQTRIEKKIEAHFDARSIATVEMVIDGAAGQQLPHKTPPRIPPKPKSRSPTPPSIAAKAQLARQQSPSPIRHSPSPVRHVRAPTPSPVRSVSPAARISTSPIRSVRSPLLMRKTQASTVATGPEVPPPWKQEGYVASSSEAEMRETTLTTSTQIRTEERWEGRYGVQEQVTISGAAGAAASVSASASYAAEAVATGAKEVKQDADKSAAVATVVAAVDMARVREPVISAVEQTAQRTTTTAVHIQPAQEQVRKEAEKTAVTKVVVAADKAKEQELKSRTKEVITTKQEQMHVTHEQIRKETEKTFVPKVVISAAKAKEQETRISEEITKKQKQVTQEAIRQETEITAASMVVVATAKSTKLETVPGAQEETTTQQDQMHLSYEKIMKETRKTVVPKVIVATPKVKEQDLVSRGREGITTKREQVQITQEKMRKEAEKTALSTIAVATAKAKEQETILRTRETMATRQEQIQVTHGKVDVGKKAEAVATVVAAVDQARVREPREPGHLEESYAQQTTLEYGYKERISAAKVAEPPQRPASEPHVVPKAVKPRVIQAPSETHIKTTDQKGMHISSQIKKTTDLTTERLVHVDKRPRTASPHFTVSKISVPKTEHGYEASIAGSAIATLQKELSATSSAQKITKSVKAPTVKPSETRVRAEPTPLPQFPFADTPDTYKSEAGVEVKKEVGVSITGTTVREERFEVLHGREAKVTETARVPAPVEIPVTPPTLVSGLKNVTVIEGESVTLECHISGYPSPTVTWYREDYQIESSIDFQITFQSGIARLMIREAFAEDSGRFTCSAVNEAGTVSTSCYLAVQVSEEFEKETTAVTEKFTTEEKRFVESRDVVMTDTSLTEEQAGPGEPAAPYFITKPVVQKLVEGGSVVFGCQVGGNPKPHVYWKKSGVPLTTGYRYKVSYNKQTGECKLVISMTFADDAGEYTIVVRNKHGETSASASLLEEADYELLMKSQQEMLYQTQVTAFVQEPKVGETAPGFVYSEYEKEYEKEQALIRKKMAKDTVVVRTYVEDQEFHISSFEERLIKEIEYRIIKTTLEELLEEDGEEKMAVDISESEAVESGFDSRIKNYRILEGMGVTFHCKMSGYPLPKIAWYKDGKRIKHGERYQMDFLQDGRASLRIPVVLPEDEGIYTAFASNIKGNAICSGKLYVEPAAPLGAPTYIPTLEPVSRIRSLSPRSVSRSPIRMSPARMSPARMSPARMSPARMSPGRRLEETDESQLERLYKPVFVLKPVSFKCLEGQTARFDLKVVGRPMPETFWFHDGQQIVNDYTHKVVIKEDGTQSLIIVPATPSDSGEWTVVAQNRAGRSSISVILTVEAVEHQVKPMFVEKLKNVNIKEGSRLEMKVRATGNPNPDIVWLKNSDIIVPHKYPKIRIEGTKGEAALKIDSTVSQDSAWYTATAINKAGRDTTRCKVNVEVEFAEPEPERKLIIPRGTYRAKEIAAPELEPLHLRYGQEQWEEGDLYDKEKQQKPFFKKKLTSLRLKRFGPAHFECRLTPIGDPTMVVEWLHDGKPLEAANRLRMINEFGYCSLDYGVAYSRDSGIITCRATNKYGTDHTSATLIVKDEKSLVEESQLPEGRKGLQRIEELERMAHEGALTGVTTDQKEKQKPDIVLYPEPVRVLEGETARFRCRVTGYPQPKVNWYLNGQLIRKSKRFRVRYDGIHYLDIVDCKSYDTGEVKVTAENPEGVIEHKVKLEIQQREDFRSVLRRAPEPRPEFHVHEPGKLQFEVQKVDRPVDTTETKEVVKLKRAERITHEKVPEESEELRSKFKRRTEEGYYEAITAVELKSRKKDESYEELLRKTKDELLHWTKELTEEEKKALAEEGKITIPTFKPDKIELSPSMEAPKIFERIQSQTVGQGSDAHFRVRVVGKPDPECEWYKNGVKIERSDRIYWYWPEDNVCELVIRDVTAEDSASIMVKAINIAGETSSHAFLLVQAKQLITFTQELQDVVAKEKDTMATFECETSEPFVKVKWYKDGMEVHEGDKYRMHSDRKVHFLSILTIDTSDAEDYSCVLVEDENVKTTAKLIVEGAVVEFVKELQDIEVPESYSGELECIVSPENIEGKWYHNDVELKSNGKYTITSRRGRQNLTVKDVTKEDQGEYSFVIDGKKTTCKLKMKPRPIAILQGLSDQKVCEGDIVQLEVKVSLESVEGVWMKDGQEVQPSDRVHIVIDKQSHMLLIEDMTKEDAGNYSFTIPALGLSTSGRVSVYSVDVITPLKDVNVIEGTKAVLECKVSVPDVTSVKWYLNDEQIKPDDRVQAIVKGTKQRLVINRTHASDEGPYKLIVGRVETNCNLSVEKIKIIRGLRDLTCTETQNVVFEVELSHSGIDVLWNFKDKEIKPSSKYKIEAHGKIYKLTVLNMMKDDEGKYTFYAGENMTSGKLTVAGGAISKPLTDQTVAESQEAVFECEVANPDSKGEWLRDGKHLPLTNNIRSESDGHKRRLIIAATKLDDIGEYTYKVATSKTSAKLKVEAVKIKKTLKNLTVTETQDAVFTVELTHPNVKGVQWIKNGVVLESNEKYAISVKGTIYSLRIKNCAIVDESVYGFRLGRLGASARLHVETVKIIKKPKDVTALENATVAFEVSVSHDTVPVKWFHKSVEIKPSDKHRLVSERKVHKLMLQNISPSDAGEYTAVVGQLECKAKLFVETLHITKTMKNIEVPETKTASFECEVSHFNVPSMWLKNGVEIEMSEKFKIVVQGKLHQLIIMNTSTEDSAEYTFVCGNDQVSATLTVTPIMITSMLKDINAEEKDTITFEVTVNYEGISYKWLKNGVEIKSTDKCQMRTKKLTHSLNIRNVHFGDAADYTFVAGKATSTATLYVEARHIEFRKHIKDIKVLEKKRAMFECEVSEPDITVQWMKDDQELQITDRIKIQKEKYVHRLLIPSTRMSDAGKYTVVAGGNVSTAKLFVEGRDVRIRSIKKEVQVIEKQRAVVEFEVNEDDVDAHWYKDGIEINFQVQERHKYVVERRIHRMFISETRQSDAGEYTFVAGRNRSSVTLYVNAPEPPQVLQELQPVTVQSGKPARFCAVISGRPQPKISWYKEEQLLSTGFKCKFLHDGQEYTLLLIEAFPEDAAVYTCEAKNDYGVATTSASLSVEVPEVVSPDQEMPVYPPAIITPLQDTVTSEGQPARFQCRVSGTDLKVSWYSKDKKIKPSRFFRMTQFEDTYQLEIAEAYPEDEGTYTFVASNAVGQVSSTANLSLEAPESILHERIEQEIEMEMKEFSSSFLSAEEEGLHSAELQLSKINETLELLSESPVYPTKFDSEKEGTGPIFIKEVSNADISMGDVATLSVTVIGIPKPKIQWFFNGVLLTPSADYKFVFDGDDHSLIILFTKLEDEGEYTCMASNDYGKTICSAYLKINSKGEGHKDTETESAVAKSLEKLGGPCPPHFLKELKPIRCAQGLPAIFEYTVVGEPAPTVTWFKENKQLCTSVYYTIIHNPNGSGTFIVNDPQREDSGLYICKAENMLGESTCAAELLVLLEDTDMTDTPCKAKSTPEAPEDFPQTPLKGPAVEALDSEQEIATFVKDTILKAALITEENQQLSYEHIAKANELSSQLPLGAQELQSILEQDKLTPESTREFLCINGSIHFQPLKEPSPNLQLQIVQSQKTFSKEGILMPEEPETQAVLSDTEKIFPSAMSIEQINSLTVEPLKTLLAEPEGNYPQSSIEPPMHSYLTSVAEEVLSPKEKTVSDTNREQRVTLQKQEAQSALILSQSLAEGHVESLQSPDVMISQVNYEPLVPSEHSCTEGGKILIESANPLENAGQDSAVRIEEGKSLRFPLALEEKQVLLKEEHSDNVVMPPDQIIESKREPVAIKKVQEVQGRDLLSKESLLSGIPEEQRLNLKIQICRALQAAVASEQPGLFSEWLRNIEKVEVEAVNITQEPRHIMCMYLVTSAKSVTEEVTIIIEDVDPQMANLKMELRDALCAIIYEEIDILTAEGPRIQQGAKTSLQEEMDSFSGSQKVEPITEPEVESKYLISTEEVSYFNVQSRVKYLDATPVTKGVASAVVSDEKQDESLKPSEEKEESSSESGTEEVATVKIQEAEGGLIKEDGPMIHTPLVDTVSEEGDIVHLTTSITNAKEVNWYFENKLVPSDEKFKCLQDQNTYTLVIDKVNTEDHQGEYVCEALNDSGKTATSAKLTVVKRAAPVIKRKIEPLEVALGHLAKFTCEIQSAPNVRFQWFKAGREIYESDKCSIRSSKYISSLEILRTQVVDCGEYTCKASNEYGSVSCTATLTVTEAYPPTFLSRPKSLTTFVGKAAKFICTVTGTPVIETIWQKDGAALSPSPNWRISDAENKHILELSNLTIQDRGVYSCKASNKFGADICQAELIIIDKPHFIKELEPVQSAINKKVHLECQVDEDRKVTVTWSKDGQKLPPGKDYKICFEDKIATLEIPLAKLKDSGTYVCTASNEAGSSSCSATVTVREPPSFVKKVDPSYLMLPGESARLHCKLKGSPVIQVTWFKNNKELSESNTVRMYFVNSEAILDITDVKVEDSGSYSCEAVNDVGSDSCSTEIVIKEPPSFIKTLEPADIVRGTNALLQCEVSGTGPFEISWFKDKKQIRSSKKYRLFSQKSLVCLEIFSFNSADVGEYECVVANEVGKCGCMATHLLKEPPTFVKKVDDLIALGGQTVTLQAAVRGSEPISVTWMKGQEVIREDGKIKMSFSNGVAVLIIPDVQISFGGKYTCLAENEAGSQTSVGELIVKEPAKIIERAELIQVTAGDPATLEYTVAGTPELKPKWYKDGRPLVASKKYRISFKNNVAQLKFYSAELHDSGQYTFEISNEVGSSSCETTFTVLDRDIAPFFTKPLRNVDSVVNGTCRLDCKIAGSLPMRVSWFKDGKEIAASDRYRIAFVEGTASLEIIRVDMNDAGNFTCRATNSVGSKDSSGALIVQEPPSFVTKPGSKDVLPGSAVCLKSTFQGSTPLTIRWFKGNKELVSGGSCYITKEALESSLELYLVKTSDSGTYTCKVSNVAGGVECSANLFVKEPATFVEKLEPSQLLKKGDATQLACKVTGTPPIKITWFANDREIKESSKHRMSFVESTAVLRLTDVGIEDSGEYMCEAQNEAGSDHCSSIVIVKESPYFTKEFKPIEVLKEYDVMLLAEVAGTPPFEITWFKDNTILRSGRKYKTFIQDHLVSLQILKFVAADAGEYQCRVTNEVGSSICSARVTLREPPSFIKKIESTSSLRGGTAAFQATLKGSLPITVTWLKDSDEITEDDNIRMTFENNVASLYLSGIEVKHDGKYVCQAKNDAGIQRCSALLSVKEPATITEEAVSIDVTQGDPATLQVKFSGTKEITAKWFKDGQELTLGSKYKISVTDTVSILKIISTEKKDSGEYTFEVQNDVGRSSCKARINVLDLIIPPSFTKKLKKMDSIKGSFIDLECIVAGSHPISIQWFKDDQEISASEKYKFSFHDNTAFLEISQLEGTDSGTYTCSATNKAGHNQCSGHLTVKEPPYFVEKPQSQDVNPNTRVQLKALVGGTAPMTIKWFKDNKELHSGAARSVWKDDTSTSLELFAAKATDSGTYICQLSNDVGTATSKATLFVKEPPQFIKKPSPVLVLRNGQSTTFECQITGTPKIRVSWYLDGNEITAIQKHGISFIDGLATFQISGARVENSGTYVCEARNDAGTASCSIELKVKEPPTFIRELKPVEVVKYSDVELECEVTGTPPFEVTWLKNNREIRSSKKYTLTDRVSVFNLHITKCDPSDTGEYQCIVSNEGGSCSCSTRVALKEPPSFIKKIENTTTVLKSSATFQSTVAGSPPISITWLKDDQILDEDDNVYISFVDSVATLQIRSVDNGHSGRYTCQAKNESGVERCYAFLLVQEPAQIVEKAKSVDVTEKDPMTLECVVAGTPELKVKWLKDGKQIVPSRYFSMSFENNVASFRIQSVMKQDSGQYTFKVENDFGSSSCDAYLRVLDQNIPPSFTKKLTKMDKVLGSSIHMECKVSGSLPISAQWFKDGKEISTSAKYRLVCHERSVSLEVNNLELEDTANYTCKVSNVAGDDACSGILTVKEPPSFLVKPGRQQAIPDSTVEFKAILKGTPPFKIKWFKDDVELVSGPKCFIGLEGSTSFLNLYSVDASKTGQYTCHVTNDVGSDSCTTMLLVTEPPKFVKKLEASKIVKAGDSSRLECKIAGSPEIRVVWFRNEHELPASDKYRMTFIDSVAVIQMNNLSTEDSGDFICEAQNPAGSTSCSTKVIVKEPPVFSSFPPIVETLKNAEVSLECELSGTPPFEVVWYKDKRQLRSSKKYKIASKNFHTSIHILNVDTSDIGEYHCKAQNEVGSDTCVCTVKLKEPPRFVSKLNSLTVVAGEPAELQASIEGAQPIFVQWLKEKEEVIRESENIRITFVENVATLQFAKAEPANAGKYICQIKNDGGMRENMATLMVLEPAVIVEKAGPMTVTVGETCTLECKVAGTPELSVEWYKDGKLLTSSQKHKFSFYNKISSLRILSVERQDAGTYTFQVQNNVGKSSCTAVVDVSDRAVPPSFTRRLKNTGGVLGASCILECKVAGSSPISVAWFHEKTKIVSGAKYQTTFSDNVCTLQLNSLDSSDMGNYTCVAANVAGSDECRAVLTVQEPPSFVKEPEPLEVLPGKNVTFTSVIRGTPPFKVNWFRGARELVKGDRCNIYFEDTVAELELFNIDISQSGEYTCVVSNNAGQASCTTRLFVKEPAAFLKRLSDHSVEPGKSIILESTYTGTLPISVTWKKDGFNITTSEKCNIVTTEKTCILEILNSTKRDAGQYSCEIENEAGRDVCGALVSTLEPPYFVTELEPLEAAVGDSVSLQCQVAGTPEITVSWYKGDTKLRPTPEYRTYFTNNVATLVFNKVNINDSGEYTCKAENSIGTASSKTVFRIQERQLPPSFARQLKDIEQTVGLPVTLTCRLNGSAPIQVCWYRDGVLLRDDENLQTSFVDNVATLKILQTDLSHSGQYSCSASNPLGTASSSARLTAREPKKSPFFDIKPVSIDVIAGESADFECHVTGAQPMRITWSKDNKEIRPGGNYTITCVGNTPHLRILKVGKGDSGQYTCQATNDVGKDMCSAQLSVKEPPKFVKKLEASKVAKQGESIQLECKISGSPEIKVSWFRNDSELHESWKYNMSFINSVALLTINEASAEDSGDYICEAHNGVGDASCSTALTVKAPPVFTQKPSPVGALKGSDVILQCEISGTPPFEVVWVKDRKQVRNSKKFKITSKHFDTSLHILNLEASDVGEYHCKATNEVGSDTCSCSVKFKEPPRFVKKLSDTSTLIGDAVELRAIVEGFQPISVVWLKDRGEVIRESENTRISFIDNIATLQLGSPEASNSGKYICQIKNDAGMRECSAVLTVLEPARIIEKPEPMTVTTGNPFALECVVTGTPELSAKWFKDGRELSADSKHHITFINKVASLKIPCAEMSDKGLYSFEVKNSVGKSNCTVSVHVSDRIVPPSFIRKLKDVNAILGASVVLECRVSGSAPISVGWFQDGNEIVSGPKCQSSFSENVCTLNLSLLEPSDTGIYTCVAANVAGSDECSAVLTVQEPPSFEQTPDSVEVLPGMSLTFTSVIRGTPPFKVKWFKGSRELVPGESCNISLEDFVTELELFEVQPLESGDYSCLVTNDAGSASCTTHLFVKEPATFVKRLADFSVETGSPIVLEATYTGTPPISVSWIKDEYLISQSERCSITMTEKSTILEILESTIEDYAQYSCLIENEAGQDICEALVSVLEPPYFIEPLEHVEAVIGEPATLQCKVDGTPEIRISWYKEHTKLRSAPAYKMQFKNNVASLVINKVDHSDVGEYSCKADNSVGAVASSAVLVIKARKLPPFFARKLKDVHETLGFPVAFECRINGSEPLQVSWYKDGVLLKDDANLQTSFVHNVATLQILQTDQSHIGQYNCSASNPLGTASSSAKLILSEHEVPPFFDLKPVSVDLALGESGTFKCHVTGTAPIKITWAKDNREIRPGGNYKMTLVENTATLTVLKVGKGDAGQYTCYASNIAGKDSCSAQLGVQEPPRFIKKLEPSRIVKQDEFTRYECKIGGSPEIKVLWYKDETEIQESSKFRMSFVDSVAVLEMHNLSVEDSGDYTCEAHNAAGSASSSTSLKVKEPPIFRKKPHPIETLKGADVHLECELQGTPPFHVSWYKDKRELRSGKKYKIMSENFLTSIHILNVDAADIGEYQCKATNDVGSDTCVGSIALKAPPRFVKKLSDISTVVGKEVQLQTTIEGAEPISVVWFKDKGEIVRESDNIWISYSENIATLQFSRVEPANAGKYTCQIKNDAGMQECFATLSVLEPATIVEKPESIKVTTGDTCTLECTVAGTPELSTKWFKDGKELTSDNKYKISFFNKVSGLKIINVAPSDSGVYSFEVQNPVGKDSCTASLQVSDRTVPPSFTRKLKETNGLSGSSVVMECKVYGSPPISVSWFHEGNEISSGRKYQTTLTDNTCALTVNMLEESDSGDYTCIATNMAGSDECSAPLTVREPPSFVQKPDPMDVLTGTNVTFTSIVKGTPPFSVSWFKGSSELVPGDRCNVSLEDSVAELELFDVDTSQSGEYTCIVSNEAGKASCTTHLYIKAPAKFVKRLNDYSIEKGKPLILEGTFTGTPPISVTWKKNGINVTPSQRCNITTTEKSAILEIPSSTVEDAGQYNCYIENASGKDSCSAQILILEPPYFVKQLEPVKVSVGDSASLQCQLAGTPEIGVSWYKGDTKLRPTTTYKMHFRNNVATLVFNQVDINDSGEYICKAENSVGEVSASTFLTVQEQKLPPSFSRQLRDVQETVGLPVVFDCAISGSEPISVSWYKDGKPLKDSPNVQTSFLDNTATLNIFKTDRSLAGQYSCTATNPIGSASSSARLILTEGKNPPFFDIRLAPVDAVVGESADFECHVTGTQPIKVSWAKDSREIRSGGKYQISYLENSAHLTVLKVDKGDSGQYTCYAVNEVGKDSCTAQLNIKERLIPPSFTKRLSETVEETEGNSFKLEGRVAGSQPITVAWYKNNIEIQPTSNCEITFKNNTLVLQVRKAGMNDAGLYTCKVSNDAGSALCTSSIVIKEPKKPPVFDQHLTPVTVSEGEYVQLSCHVQGSEPIRIQWLKAGREIKPSDRCSFSFASGTAVLELRDVAKADSGDYVCKASNVAGSDTTKSKVTIKDKPAVAPATKKAAVDGRLFFVSEPQSIRVVEKTTATFIAKVGGDPIPNVKWTKGKWRQLNQGGRVFIHQKGDEAKLEIRDTTKTDSGLYRCVAFNEHGEIESNVNLQVDERKKQEKIEGDLRAMLKKTPILKKGAGEEEEIDIMELLKNVDPKEYEKYARMYGITDFRGLLQAFELLKQSQEEETHRLEIEEIERSERDEKEFEELVSFIQQRLSQTEPVTLIKDIENQTVLKDNDAVFEIDIKINYPEIKLSWYKGTEKLEPSDKFEISIDGDRHTLRVKNCQLKDQGNYRLVCGPHIASAKLTVIEPAWERHLQDVTLKEGQTCTMTCQFSVPNVKSEWFRNGRILKPQGRHKTEVEHKVHKLTIADVRAEDQGQYTCKYEDLETSAELRIEAEPIQFTKRIQNIVVSEHQSATFECEVSFDDAIVTWYKGPTELTESQKYNFRNDGRCHYMTIHNVTPDDEGVYSVIARLEPRGEARSTAELYLTTKEIKLELKPPDIPDSRVPIPTMPIRAVPPEEIPPVVAPPIPLLLPTPEEKKPPPKRIEVTKKAVKKDAKKVVAKPKEMTPREEIVKKPPPPTTLIPAKAPEIIDVSSKAEEVKIMTITRKKEVQKEKEAVYEKKQAVHKEKRVFIESFEEPYDELEVEPYTEPFEQPYYEEPDEDYEEIKVEAKKEVHEEWEEDFEEGQEYYEREEGYDEGEEEWEEAYQEREVIQVQKEVYEESHERKVPAKVPEKKAPPPPKVIKKPVIEKIEKTSRRMEEEKVQVTKVPEVSKKIVPQKPSRTPVQEEVIEVKVPAVHTKKMVISEEKMFFASHTEEEVSVTVPEVQKEIVTEEKIHVAISKRVEPPPKVPELPEKPAPEEVAPVPIPKKVEPPAPKVPEVPKKPVPEEKKPVPVPKKEPAAPPKVPEVPKKPVPEEKIPVPVAKKKEAPPAKVPEVQKGVVTEEKITIVTQREESPPPAVPEIPKKKVPEERKPVPRKEEEVPPPPKVPALPKKPVPEEKVAVPVPVAKKAPPPRAEVSKKTVVEEKRFVAEEKLSFAVPQRVEVTRHEVSAEEEWSYSEEEEGVSISVYREEEREEEEEAEVTEYEVMEEPEEYVVEEKLHIISKRVEAEPAEVTERQEKKIVLKPKIPAKIEEPPPAKVPEAPKKIVPEKKVPAPVPKKEKVPPPKVPEEPKKPVPEKKVPPKVIKMEEPLPAKVTERHMQITQEEKVLVAVTKKEAPPKARVPEEPKRAVPEEKVLKLKPKREEEPPAKVTEFRKRVVKEEKVSIEAPKREPQPIKEVTIMEEKERAYTLEEEAVSVQREEEYEEYEEYDYKEFEEYEPTEEYDQYEEYEEREYERYEEHEEYITEPEKPIPVKPVPEEPVPTKPKAPPAKVLKKAVPEEKVPVPIPKKLKPPPPKVPEEPKKVFEEKIRISITKREKEQVTEPAAKVPMKPKRVVAEEKVPVPRKEVAPPVRVPEVPKELEPEEVAFEEEVVTHVEEYLVEEEEEYIHEEEEFITEEEVVPVIPVKVPEVPRKPVPEEKKPVPVPKKKEAPPAKVPEVPKKPEEKVPVLIPKKEKPPPAKVPEVPKKPVPEEKVPVPVPKKVEAPPAKVPEVPKKPVPEKKVPVPAPKKVEAPPAKVPEVPKKLIPEEKKPTPVPKKVEAPPPKVPKKREPVPVPVALPQEEEVLFEEEIVPEEEVLPEEEEVLPEEEEVLPEEEEVLPEEEEIPPEEEEVPPEEEYVPEEEEFVPEEEVLPEVKPKVPVPAPVPEIKKKVTEKKVVIPKKEEAPPAKVPEVPKKVEEKRIILPKEEEVLPVEVTEEPEEEPISEEEIPEEPPSIEEVEEVAPPRVPEVIKKAVPEAPTPVPKKVEAPPAKVSKKIPEEKVPVPVQKKEAPPAKVPEVPKKVPEKKVLVPKKEAVPPAKGRTVLEEKVSVAFRQEVVVKERLELEVVEAEVEEIPEEEEFHEVEEYFEEGEFHEVEEFIKLEQHRVEEEHRVEKVHRVIEVFEAEEVEVFEKPKAPPKGPEISEKIIPPKKPPTKVVPRKEPPAKVPEVPKKIVVEEKVRVPEEPRVPPTKVPEVLPPKEVVPEKKVPVPPAKKPEAPPPKVPEAPKEVVPEKKVPVPPPKKPEVPPTKVPEVPKAAVPEKKVPEAIPPKPESPPPEVPEAPKEVVPEKKVPAAPPKKPEVTPVKVPEAPKEVVPEKKVPVPPPKKPEVPPTKVPEVPKVAVPEKKVPEAIPPKPESPPPEVFEEPEEVALEEPPAEVVEEPEPAAPPQVTVPPKKPVPEKKAPAVVAKKPELPPVKVPEVPKEVVPEKKVPLVVPKKPEAPPAKVPEVPKEVVPEKKVAVPKKPEVPPAKVPEVPKKPVLEEKPAVPVPERAESPPPEVYEEPEEIAPEEEIAPEEEKPVPVAEEEEPEVPPPAVPEEPKKIIPEKKVPVIKKPEAPPPKEPEPEKVIEKPKLKPRPPPPPPAPPKEDVKEKIFQLKAIPKKKVPEKPQVPEKVELTPLKVPGGEKKVRKLLPERKPEPKEEVVLKSVLRKRPEEEEPKVEPKKLEKVKKPAVPEPPPPKPVEEVEVPTVTKRERKIPEPTKVPEIKPAIPLPAPEPKPKPEAEVKTIKPPPVEPEPTPIAAPVTVPVVGKKAEAKAPKEEAAKPKGPIKGVPKKTPSPIEAERRKLRPGSGGEKPPDEAPFTYQLKAVPLKFVKEIKDIILTESEFVGSSAIFECLVSPSTAITTWMKDGSNIRESPKHRFIADGKDRKLHIIDVQLSDAGEYTCVLRLGNKEKTSTAKLVVEELPVRFVKTLEEEVTVVKGQPLYLSCELNKERDVVWRKDGKIVVEKPGRIVPGVIGLMRALTINDADDTDAGTYTVTVENANNLECSSCVKVVEVIRDWLVKPIRDQHVKPKGTAIFACDIAKDTPNIKWFKGYDEIPAEPNDKTEILRDGNHLYLKIKNAMPEDIAEYAVEIEGKRYPAKLTLGEREVELLKPIEDVTIYEKESASFDAEISEADIPGQWKLKGELLRPSPTCEIKAEGGKRFLTLHKVKLDQAGEVLYQALNAITTAILTVKEIELDFAVPLKDVTVPERRQARFECVLTREANVIWSKGPDIIKSSDKFDIIADGKKHILVINDSQFDDEGVYTAEVEGKKTSARLFVTGIRLKFMSPLEDQTVKEGETATFVCELSHEKMHVVWFKNDAKLHTSRTVLISSEGKTHKLEMKEVTLDDISQIKAQVKELSSTAQLKVLEADPYFTVKLHDKTAVEKDEITLKCEVSKDVPVKWFKDGEEIVPSPKYSIKADGLRRILKIKKADLKDKGEYVCDCGTDKTKANVTVEARLIKVEKPLYGVEVFVGETAHFEIELSEPDVHGQWKLKGQPLTASPDCEIIEDGKKHILILHNCQLGMTGEVSFQAANAKSAANLKVKELPLIFITPLSDVKVFEKDEAKFECEVSREPKTFRWLKGTQEITGDDRFELIKDGTKHSMVIKSAAFEDEAKYMFEAEDKHTSGKLIIEGIRLKFLTPLKDVTAKEKESAVFTVELSHDNIRVKWFKNDQRLHTTRSVSMQDEGKTHSITFKDLSIDDTSQIRVEAMGMSSEAKLTVLEGDPYFTGKLQDYTGVEKDEVILQCEISKADAPVKWFKDGKEIKPSKNAVIKADGKKRMLILKKALKSDIGQYTCDCGTDKTSGKLDIEDREIKLVRPLHSVEVMETETARFETEISEDDIHANWKLKGEALLQTPDCEIKEEGKIHSLVLHNCRLDQTGGVDFQAANVKSSAHLRVKPRVIGLLRPLKDVTVTAGETATFDCELSYEDIPVEWYLKGKKLEPSDKVVPRSEGKVHTLTLRDVKLEDAGEVQLTAKDFKTHANLFVKEPPVEFTKPLEDQTVEEGATAVLECEVSRENAKVKWFKNGTEILKSKKYEIVADGRVRKLVIHDCTPEDIKTYTCDAKDFKTSCNLNVVPPHVEFLRPLTDLQVREKEMARFECELSRENAKVKWFKDGAEIKKGKKYDIISKGAVRILVINKCLLDDEAEYSCEVRTARTSGMLTVLEEEAVFTKNLANIEVSETDTIKLVCEVSKPGAEVIWYKGDEEIIETGRYEILTEGRKRILVIQNAHLEDAGNYNCRLPSSRTDGKVKVHELAAEFISKPQNLEILEGEKAEFVCSISKESFPVQWKRDDKTLESGDKYDVIADGKKRVLVVKDATLQDMGTYVVMVGAARAAAHLTVIEKLRIVVPLKDTRVKEQQEVVFNCEVNTEGAKAKWFRNEEAIFDSSKYIILQKDLVYTLRIRDAHLDDQANYNVSLTNHRGENVKSAANLIVEEEDLRIVEPLKDIETMEKKSVTFWCKVNRLNVTLKWTKNGEEVPFDNRVSYRVDKYKHMLTIKDCGFPDEGEYIVTAGQDKSVAELLIIEAPTEFVEHLEDQTVTEFDDAVFSCQLSREKANVKWYRNGREIKEGKKYKFEKDGSIHRLIIKDCRLDDECEYACGVEDRKSRARLFVEEIPVEIIRPPQDILEAPGADVVFLAELNKDKVEVQWLRNNMVVVQGDKHQMMSEGKIHRLQICDIKPRDQGEYRFIAKDKEARAKLELAAAPKIKTADQDLVVDVGKPLTMVVPYDAYPKAEAEWFKENEPLSTKTIDTTAEQTSFRILEAKKGDKGRYKIVLQNKHGKAEGFINLKVIDVPGPVRNLEVTETFDGEVSLAWEEPLTDGGSKIIGYVVERRDIKRKTWVLATDRAESCEFTVTGLQKGGVEYLFRVSARNRVGTGEPVETDNPVEARSKYDVPGPPLNVTITDVNRFGVSLTWEPPEYDGGAEITNYVIELRDKTSIRWDTAMTVRAEDLSATVTDVVEGQEYSFRVRAQNRIGVGKPSAATPFVKVADPIERPSPPVNLTSSDQTQSSVQLKWEPPLKDGGSPILGYIIERCEEGKDNWIRCNMKLVPELTYKVTGLEKGNKYLYRVSAENKAGVSDPSEILGPLTADDAFVEPTMDLSAFKDGLEVIVPNPITILVPSTGYPRPTATWCFGDKVLETGDRVKMKTLSAYAELVISPSERSDKGIYTLKLENRVKTISGEIDVNVIARPSAPKELKFGDITKDSVHLTWEPPDDDGGSPLTGYVVEKREVSRKTWTKVMDFVTDLEFTVPDLVQGKEYLFKVCARNKCGPGEPAYVDEPVNMSTPATVPDPPENVKWRDRTANSIFLTWDPPKNDGGSRIKGYIVERCPRGSDKWVACGEPVAETKMEVTGLEEGKWYAYRVKALNRQGASKPSRPTEEIQAVDTQEAPEIFLDVKLLAGLTVKAGTKIELPATVTGKPEPKITWTKADMILKQDKRITIENVPKKSTVTIVDSKRSDTGTYIIEAVNVCGRATAVVEVNVLDKPGPPAAFDITDVTNESCLLTWNPPRDDGGSKITNYVVERRATDSEVWHKLSSTVKDTNFKATKLIPNKEYIFRVAAENMYGVGEPVQASPITAKYQFDPPGPPTRLEPSDITKDAVTLTWCEPDDDGGSPITGYWVERLDPDTDKWVRCNKMPVKDTTYRVKGLTNKKKYRFRVLAENLAGPGKPSKSTEPILIKDPIDPPWPPGKPTVKDVGKTSVRLNWTKPEHDGGAKIESYVIEMLKTGTDEWVRVAEGVPTTQHLLPGLMEGQEYSFRVRAVNKAGESEPSEPSDPVLCREKLYPPSPPRWLEVINITKNTADLKWTVPEKDGGSPITNYIVEKRDVRRKGWQTVDTTVKDTKCTVTPLTEGSLYVFRVAAENAIGQSDYTEIEDSVLAKDTFTTPGPPYALAVVDVTKRHVDLKWEPPKNDGGRPIQRYVIEKKERLGTRWVKAGKTAGPDCNFRVTDVIEGTEVQFQVRAENEAGVGHPSEPTEILSIEDPTSPPSPPLDLHVTDAGRKHIAIAWKPPEKNGGSPIIGYHVEMCPVGTEKWMRVNSRPIKDLKFKVEEGVVPDKEYVLRVRAVNAIGVSEPSEISENVVAKDPDCKPTIDLETHDIIVIEGEKLSIPVPFRAVPVPTVSWHKDGKEVKASDRLTMKNDHISAHLEVPKSVRADAGIYTITLENKLGSATASINVKVIGLPGPCKDIKASDITKSSCKLTWEPPEFDGGTPILHYVLERREAGRRTYIPVMSGENKLSWTVKDLIPNGEYFFRVKAVNKVGGGEYIELKNPVIAQDPKQPPDPPVDVEVHNPTAEAMTITWKPPLYDGGSKIMGYIIEKIAKGEERWKRCNEHLVPILTYTAKGLEEGKEYQFRVRAENAAGISEPSRATPPTKAVDPIDAPKVILRTSLEVKRGDEIALDASISGSPYPTITWIKDENVIVPEEIKKRAAPLVRRRKGEVQEEEPFVLPLTQRLSIDNSKKGESQLRVRDSLRPDHGLYMIKVENDHGIAKAPCTVSVLDTPGPPINFVFEDIRKTSVLCKWEPPLDDGGSEIINYTLEKKDKTKPDSEWIVVTSTLRHCKYSVTKLIEGKEYLFRVRAENRFGPGPPCVSKPLVAKDPFGPPDAPDKPIVEDVTSNSMLVKWNEPKDNGSPILGYWLEKREVNSTHWSRVNKSLLNALKANVDGLLEGLTYVFRVCAENAAGPGKFSPPSDPKTAHDPISPPGPPIPRVTDTSSTTIELEWEPPAFNGGGEIVGYFVDKQLVGTNEWSRCTEKMIKVRQYTVKEIREGADYKLRVSAVNAAGEGPPGETQPVTVAEPQEPPAVELDVSVKGGIQIMAGKTLRIPAVVTGRPVPTKVWTKEEGELDKDRVVIDNVGTKSELIIKDALRKDHGRYVITATNSCGSKFAAARVEVFDVPGPVLDLKPVVTNRKMCLLNWSDPEDDGGSEITGFIIERKDAKMHTWRQPIETERSKCDITGLLEGQEYKFRVIAKNKFGCGPPVEIGPILAVDPLGPPTSPERLTYTERTKSTITLDWKEPRSNGGSPIQGYIIEKRRHDKPDFERVNKRLCPTTSFLVENLDEHQMYEFRVKAVNEIGESEPSLPLNVVIQDDEVPPTIKLRLSVRGDTIKVKAGEPVHIPADVTGLPMPKIEWSKNETVIEKPTDALQITKEEVSRSEAKTELSIPKAVREDKGTYTVTASNRLGSVFRNVHVEVYDRPSPPRNLAVTDIKAESCYLTWDAPLDNGGSEITHYVIDKRDASRKKAEWEEVTNTAVEKRYGIWKLIPNGQYEFRVRAVNKYGISDECKSDKVVIQDPYRLPGPPGKPKVLARTKGSMLVSWTPPLDNGGSPITGYWLEKREEGSPYWSRVSRAPITKVGLKGVEFNVPRLLEGVKYQFRAMAINAAGIGPPSEPSDPEVAGDPIFPPGPPSCPEVKDKTKSSISLGWKPPAKDGGSPIKGYIVEMQEEGTTDWKRVNEPDKLITTCECVVPNLKELRKYRFRVKAVNEAGESEPSDTTGEIPATDIQEEPEVFIDIGAQDCLVCKAGSQIRIPAVIKGRPTPKSSWEFDGKAKKAMKDGVHDIPEDAQLETAENSSVIIIPECKRSHTGKYSITAKNKAGQKTANCRVKVMDVPGPPKDLKVSDITRGSCRLSWKMPDDDGGDRIKGYVIEKRTIDGKAWTKVNPDCGSTTFVVPDLLSEQQYFFRVRAENRFGIGPPVETIQRTTARDPIYPPDPPIKLKIGLITKNTVHLSWKPPKNDGGSPVTHYIVECLAWDPTGTKKEAWRQCNKRDVEELQFTVEDLVEGGEYEFRVKAVNAAGVSKPSATVGPVTVKDQTCPPSIDLKEFMEVEEGTNVNIVAKIKGVPFPTLTWFKAPPKKPDNKEPVLYDTHVNKLVVDDTCTLVIPQSRRSDTGLYTITAVNNLGTASKEMRLNVLGRPGPPVGPIKFESVSADQMTLSWFPPKDDGGSKITNYVIEKREANRKTWVHVSSEPKECTYTIPKLLEGHEYVFRIMAQNKYGIGEPLDSEPETARNLFSVPGAPDKPTVSSVTRNSMTVNWEEPEYDGGSPVTGYWLEMKDTTSKRWKRVNRDPIKAMTLGVSYKVTGLIEGSDYQFRVYAINAAGVGPASLPSDPATARDPIAPPGPPFPKVTDWTKSSADLEWSPPLKDGGSKVTGYIVEYKEEGKEEWEKGKDKEVRGTKLVVTGLKEGAFYKFRVRAVNIAGIGEPGEVTDVIEMKDRLVSPDLQLDASVRDRIVVHAGGVIRIIAYVSGKPPPTVTWNMNERTLPQEATIETTAISSSMVIKNCQRSHQGVYSLLAKNEAGERKKTIIVDVLDVPGPVGTPFLAHNLTNESCKLTWFSPEDDGGSPITNYVIEKRESDRRAWTPVTYTVTRQNATVQGLIQGKAYFFRIAAENSIGMGPFVETSEALVIREPITVPERPEDLEVKEVTKNTVTLTWNPPKYDGGSEIINYVLESRLIGTEKFHKVTNDNLLSRKYTVKGLKEGDTYEYRVSAVNIVGQGKPSFCTKPITCKDELAPPTLHLDFRDKLTIRVGEAFALTGRYSGKPKPKVSWFKDEADVLEDDRTHIKTTPATLALEKIKAKRSDSGKYCVVVENSTGSRKGFCQVNVVDRPGPPVGPVSFDEVTKDYMVISWKPPLDDGGSKITNYIIEKKEVGKDVWMPVTSASAKTTCKVSKLLEGKDYIFRIHAENLYGISDPLVSDSMKAKDRFRVPDAPDQPIVTEVTKDSALVTWNKPHDGGKPITNYILEKRETMSKRWARVTKDPIHPYTKFRVPDLLEGCQYEFRVSAENEIGIGDPSPPSKPVFAKDPIAKPSPPVNPEAIDTTCNSVDLTWQPPRHDGGSKILGYIVEYQKVGDEEWRRANHTPESCPETKYKVTGLRDGQTYKFRVLAVNAAGESDPAHVPEPVLVKDRLEPPELILDANMAREQHIKVGDTLRLSAIIKGVPFPKVTWKKEDRDAPTKARIDVTPVGSKLEIRNAAHEDGGIYSLTVENPAGSKTVSVKVLVLDKPGPPRDLEVSEIRKDSCYLTWKEPLDDGGSVITNYVVERRDVASAQWSPLSATSKKKSHFAKHLNEGNQYLFRVAAENQYGRGPFVETPKPIKALDPLHPPGPPKDLHHVDVDKTEVSLVWNKPDRDGGSPITGYLVEYQEEGTQDWIKFKTVTNLECVVTGLQQGKTYRFRVKAENIVGLGLPDTTIPIECQEKLVPPSVELDVKLIEGLVVKAGTTVRFPAIIRGVPVPTAKWTTDGSEIKTDEHYTVETDNFSSVLTIKNCLRRDTGEYQITVSNAAGSKTVAVHLTVLDVPGPPTGPINILDVTPEHMTISWQPPKDDGGSPVINYIVEKQDTRKDTWGVVSSGSSKTKLKIPHLQKGCEYVFRVRAENKIGVGPPLDSTPTVAKHKFSPPSPPGKPVVTDITENAATVSWTLPKSDGGSPITGYYMERREVTGKWVRVNKTPIADLKFRVTGLYEGNTYEFRVFAENLAGLSKPSPSSDPIKACRPIKPPGPPINPKLKDKSRETADLVWTKPLSDGGSPILGYVVECQKPGTAQWNRINKDELIRQCAFRVPGLIEGNEYRFRIKAANIVGEGEPRELAESVIAKDILHPPEVELDVTCRDVITVRVGQTIRILARVKGRPEPDITWTKEGKVLVREKRVDLIQDLPRVELQIKEAVRADHGKYIISAKNSSGHAQGSAIVNVLDRPGPCQNLKVTNVTKENCTISWENPLDNGGSEITNFIVEYRKPNQKGWSIVASDVTKRLIKANLLANNEYYFRVCAENKVGVGPTIETKTPILAINPIDRPGEPENLHIADKGKTFVYLKWRRPDYDGGSPNLSYHVERRLKGSDDWERVHKGSIKETHYMVDRCVENQIYEFRVQTKNEGGESDWVKTEEVVVKEDLQKPVLDLKLSGVLTVKAGDTIRLEAGVRGKPFPEVAWTKDKDATDLTRSPRVKIDTRADSSKFSLTKAKRSDGGKYVVTATNTAGSFVAYATVNVLDKPGPVRNLKIVDVSSDRCTVCWDPPEDDGGCEIQNYILEKCETKRMVWSTYSATVLTPGTTVTRLIEGNEYIFRVRAENKIGTGPPTESKPVIAKTKYDKPGRPDPPEVTKVSKEEMTVVWNPPEYDGGKSITGYFLEKKEKHSTRWVPVNKSAIPERRMKVQNLLPDHEYQFRVKAENEIGIGEPSLPSRPVVAKDPIEPPGPPTNFRVVDTTKHSITLGWGKPVYDGGAPIIGYVVEMRPKIADASPDEGWKRCNAAAQLVRKEFTVTSLDENQEYEFRVCAQNQVGIGRPAELKEAIKPKEILEPPEIDLDASMRKLVIVRAGCPIRLFAIVRGRPAPKVTWRKVGIDNVVRKGQVDLVDTMAFLVIPNSTRDDSGKYSLTLVNPAGEKAVFVNVRVLDTPGPVSDLKVSDVTKTSCHVSWAPPENDGGSQVTHYIVEKREADRKTWSTVTPEVKKTSFHVTNLVPGNEYYFRVTAVNEYGPGVPTDVPKPVLASDPLSEPDPPRKLEVTEMTKNSATLAWLPPLRDGGAKIDGYITSYREEEQPADRWTEYSVVKDLSLVVTGLKEGKKYKFRVAARNAVGVSLPREAEGVYEAKEQLLPPKILMPEQITIKAGKKLRIEAHVYGKPHPTCKWKKGEDEVVTSSHLAVHKADSSSILIIKDVTRKDSGYYSLTAENSSGTDTQKIKVVVMDAPGPPQPPFDISDIDADACSLSWHIPLEDGGSNITNYIVEKCDVSRGDWVTALASVTKTSCRVGKLIPGQEYIFRVRAENRFGISEPLTSPKMVAQFPFGVPSEPKNARVTKVNKDCIFVAWDRPDSDGGSPIIGYLIERKERNSLLWVKANDTLVRSTEYPCAGLVEGLEYSFRIYALNKAGSSPPSKPTEYVTARMPVDPPGKPEVIDVTKSTVSLIWARPKHDGGSKIIGYFVEACKLPGDKWVRCNTAPHQIPQEEYTATGLEEKAQYQFRAIARTAVNISPPSEPSDPVTILAENVPPRIDLSVAMKSLLTVKAGTNVCLDATVFGKPMPTVSWKKDGTLLKPAEGIKMAMQRNLCTLELFSVNRKDSGDYTITAENSSGSKSATIKLKVLDKPGPPASVKINKMYSDRAMLSWEPPLEDGGSEITNYIVDKRETSRPNWAQVSATVPITSCSVEKLIEGHEYQFRICAENKYGVGDPVFTEPAIAKNPYDPPGRCDPPVISNITKDHMTVSWKPPADDGGSPITGYLLEKRETQAVNWTKVNRKPIIERTLKATGLQEGTEYEFRVTAINKAGPGKPSDASKAAYARDPQYPPGPPAFPKVYDTTRSSVSLSWGKPAYDGGSPIIGYLVEVKRADSDNWVRCNLPQNLQKTRFEVTGLMEDTQYQFRVYAVNKIGYSDPSDVPDKHYPKDILIPPEGELDADLRKTLILRAGVTMRLYVPVKGRPPPKITWSKPNVNLRDRIGLDIKSTDFDTFLRCENVNKYDAGKYILTLENSCGKKEYTIVVKVLDTPGPPVNVTVKEISKDSAYVTWEPPIIDGGSPIINYVVQKRDAERKSWSTVTTECSKTSFRVANLEEGKSYFFRVFAENEYGIGDPGETRDAVKASQTPGPVVDLKVRSVSKSSCSIGWKKPHSDGGSRIIGYVVDFLTEENKWQRVMKSLSLQYSAKDLTEGKEYTFRVSAENENGEGTPSEITVVARDDVVAPDLDLKGLPDLCYLAKENSNFRLKIPIKGKPAPSVSWKKGEDPLATDTRVSVESSAVNTTLIVYDCQKSDAGKYTITLKNVAGTKEGTISIKVVGKPGIPTGPIKFDEVTAEAMTLKWAPPKDDGGSEITNYILEKRDSVNNKWVTCASAVQKTTFRVTRLHEGMEYTFRVSAENKYGVGEGLKSEPIVARHPFDVPDAPPPPNIVDVRHDSVSLTWTDPKKTGGSPITGYHLEFKERNSLLWKRANKTPIRMRDFKVTGLTEGLEYEFRVMAINLAGVGKPSLPSEPVVALDPIDPPGKPEVINITRNSVTLIWTEPKYDGGHKLTGYIVEKRDLPSKSWMKANHVNVPECAFTVTDLVEGGKYEFRIRAKNTAGAISAPSESTETIICKDEYEAPTIVLDPTIKDGLTIKAGDTIVLNAISILGKPLPKSSWSKAGKDIRPSDITQITSTPTSSMLTIKYATRKDAGEYTITATNPFGTKVEHVKVTVLDVPGPPGPVEISNVSAEKATLTWTPPLEDGGSPIKSYILEKRETSRLLWTVVSEDIQSCRHVATKLIQGNEYIFRVSAVNHYGKGEPVQSEPVKMVDRFGPPGPPEKPEVSNVTKNTATVSWKRPVDDGGSEITGYHVERREKKSLRWVRAIKTPVSDLRCKVTGLQEGSTYEFRVSAENRAGIGPPSEASDSVLMKDAAYPPGPPSNPHVTDTTKKSASLAWGKPHYDGGLEITGYVVEHQKVGDEAWIKDTTGTALRITQFVVPDLQTKEKYNFRISAINDAGVGEPAVIPDVEIVEREMAPDFELDAELRRTLVVRAGLSIRIFVPIKGRPAPEVTWTKDNINLKNRANIENTESFTLLIIPECNRYDTGKFVMTIENPAGKKSGFVNVRVLDTPGPVLNLRPTDITKDSVTLHWDLPLIDGGSRITNYIVEKREATRKSYSTATTKCHKCTYKVTGLSEGCEYFFRVMAENEYGIGEPTETTEPVKASEAPSPPDSLNIMDITKSTVSLAWPKPKHDGGSKITGYVIEAQRKGSDQWTHITTVKGLECVVRNLTEGEEYTFQVMAVNSAGRSAPRESRPVIVKEQTMLPELDLRGIYQKLVIAKAGDNIKVEIPVLGRPKPTVTWKKGDQILKQTQRVNFETTATSTILNINECVRSDSGPYPLTARNIVGEVGDVITIQVHDIPGPPTGPIKFDEVSSDFVTFSWDPPENDGGVPISNYVVEMRQTDSTTWVELATTVIRTTYKATRLTTGLEYQFRVKAQNRYGVGPGITSACIVANYPFKVPGPPGTPQVTAVTKDSMTISWHEPLSDGGSPILGYHVERKERNGILWQTVSKALVPGNIFKSSGLTDGIAYEFRVIAENMAGKSKPSKPSEPMLALDPIDPPGKPVPLNITRHTVTLKWAKPEYTGGFKITSYIVEKRDLPNGRWLKANFSNILENEFTVSGLTEDAAYEFRVIAKNAAGAISPPSEPSDAITCRDDVEAPKIKVDVKFKDTVILKAGEAFRLEADVSGRPPPTMEWSKDGKELEGTAKLEIKIADFSTNLVNKDSTRRDSGAYTLTATNPGGFAKHIFNVKVLDRPGPPEGPLAVTEVTSEKCVLSWFPPLDDGGAKIDHYIVQKRETSRLAWTNVASEVQVTKLKVTKLLKGNEYIFRVMAVNKYGVGEPLESEPVLAVNPYGPPDPPKNPEVTTITKDSMVVCWGHPDSDGGSEIINYIVERRDKAGQRWIKCNKKTLTDLRYKVSGLTEGHEYEFRIMAENAAGISAPSPTSPFYKACDTVFKPGPPGNPRVLDTSRSSISIAWNKPIYDGGSEITGYMVEIALPEEDEWQIVTPPAGLKATSYTITGLTENQEYKIRIYAMNSEGLGEPALVPGTPKAEDRMLPPEIELDADLRKVVTIRACCTLRLFVPIKGRPAPEVKWARDHGESLDKASIESTSSYTLLIVGNVNRFDSGKYILTVENSSGSKSAFVNVRVLDTPGPPQDLKVKEVTKTSVTLTWDPPLLDGGSKIKNYIVEKRESTRKAYSTVATNCHKTSWKVDQLQEGCSYYFRVLAENEYGIGLPAETAESVKASERPLPPGKITLMDVTRNSVSLSWEKPEHDGGSRILGYIVEMQTKGSDKWATCATVKVTEATITGLIQGEEYSFRVSAQNEKGISDPRQLSVPVIAKDLVIPPAFKLLFNTFTVLAGEDLKVDVPFIGRPTPAVTWHKDNVPLKQTTRVNAESTENNSLLTIKDACREDVGHYVVKLTNSAGEAIETLNVIVLDKPGPPTGPVKMDEVTADSITLSWGPPKYDGGSSINNYIVEKRDTSTTTWQIVSATVARTTIKACRLKTGCEYQFRIAAENRYGKSTYLNSEPTVAQYPFKVPGPPGTPVVTLSSRDSMEVQWNEPISDGGSRVIGYHLERKERNSILWVKLNKTPIPQTKFKTTGLEEGVEYEFRVSAENIVGIGKPSKVSECYVARDPCDPPGRPEAIIVTRNSVTLQWKKPTYDGGSKITGYIVEKKELPEGRWMKASFTNIIDTHFEVTGLVEDHRYEFRVIARNAAGVFSEPSESTGAITARDEVDPPRISMDPKYKDTIVVHAGESFKVDADIYGKPIPTIQWIKGDQELSNTARLEIKSTDFATSLSVKDAVRVDSGNYILKAKNVAGERSVTVNVKVLDRPGPPEGPVVISGVTAEKCTLAWKPPLQDGGSDIINYIVERRETSRLVWTVVDANVQTLSCKVTKLLEGNEYTFRIMAVNKYGVGEPLESEPVVAKNPFVVPDAPKAPEVTTVTKDSMIVVWERPASDGGSEILGYVLEKRDKEGIRWTRCHKRLIGELRLRVTGLIENHDYEFRVSAENAAGLSEPSPPSAYQKACDPIYKPGPPNNPKVIDITRSSVFLSWSKPIYDGGCEIQGYIVEKCDVSVGEWTMCTPPTGINKTNIEVEKLLEKHEYNFRICAINKAGVGEHADVPGPIIVEEKLEAPDIDLDLELRKIINIRAGGSLRLFVPIKGRPTPEVKWGKVDGEIRDAAIIDVTSSFTSLVLDNVNRYDSGKYTLTLENSSGTKSAFVTVRVLDTPSPPVNLKVTEITKDSVSITWEPPLLDGGSKIKNYIVEKREATRKSYAAVVTNCHKNSWKIDQLQEGCSYYFRVTAENEYGIGLPAQTADPIKVAEVPQPPGKITVDDVTRNSVSLSWTKPEHDGGSKIIQYIVEMQAKHSEKWSECARVKSLQAVITNLTQGEEYLFRVVAVNEKGRSDPRSLAVPIVAKDLVIEPDVKPAFSSYSVQVGQDLKIEVPISGRPKPTITWTKDGLPLKQTTRINVTDSLDLTTLSIKETHKDDGGQYGITVANVVGQKTASIEIVTLDKPDPPKGPVKFDDVSAESITLSWNPPLYTGGCQITNYIVQKRDTTTTVWDVVSATVARTTLKVTKLKTGTEYQFRIFAENRYGQSFALESDPIVAQYPYKEPGPPGTPFATAISKDSMVIQWHEPVNNGGSPVIGYHLERKERNSILWTKVNKTIIHDTQFKAQNLEEGIEYEFRVYAENIVGVGKASKNSECYVARDPCDPPGTPEPIMVKRNEITLQWTKPVYDGGSMITGYIVEKRDLPDGRWMKASFTNVIETQFTVSGLTEDQRYEFRVIAKNAAGAISKPSDSTGPITAKDEVELPRISMDPKFRDTIVVNAGETFRLEADVHGKPLPTIEWLRGDKEIEESARCEIKNTDFKALLIVKDAIRIDGGQYILRASNVAGSKSFPVNVKVLDRPGPPEGPVQVTGVTSEKCSLTWSPPLQDGGSDISHYVVEKRETSRLAWTVVASEVVTNSLKVTKLLEGNEYVFRIMAVNKYGVGEPLESAPVLMKNPFVLPGPPKSLEVTNIAKDSMTVCWNRPDSDGGSEIIGYIVEKRDRSGIRWIKCNKRRITDLRLRVTGLTEDHEYEFRVSAENAAGVGEPSPATVYYKACDPVFKPGPPTNAHIVDTTKNSITLAWGKPIYDGGSEILGYVVEICKADEEEWQIVTPQTGLRVTRFEISKLTEHQEYKIRVCALNKVGLGEATSVPGTVKPEDKLEAPELDLDSELRKGIVVRAGGSARIHIPFKGRPTPEITWSREEGEFTDKVQIEKGVNYTQLSIDNCDRNDAGKYILKLENSSGSKSAFVTVKVLDTPGPPQNLAVKEVRKDSAFLVWEPPIIDGGAKVKNYVIDKRESTRKAYANVSSKCSKTSFKVENLTEGAIYYFRVMAENEFGVGVPVETVDAVKAAEPPSPPGKVTLTDVSQTSASLMWEKPEHDGGSRVLGYVVEMQPKGTEKWSIVAESKVCNAVVTGLSSGQEYQFRVKAYNEKGKSDPRVLGVPVIAKDLTIQPSLKLPFNTYSIQAGEDLKIEIPVIGRPRPNISWVKDGEPLKQTTRVNVEETATSTVLHIKEGNKDDFGKYTVTATNSAGTATENLSVIVLEKPGPPVGPVRFDEVSADFVVISWEPPAYTGGCQISNYIVEKRDTTTTTWHMVSATVARTTIKITKLKTGTEYQFRIFAENRYGKSAPLDSKAVIVQYPFKEPGPPGTPFVTSISKDQMLVQWHEPVNDGGTKIIGYHLEQKEKNSILWVKLNKTPIQDTKFKTTGLDEGLEYEFKVSAENIVGIGKPSKVSECFVARDPCDPPGRPEAIVITRNNVTLKWKKPAYDGGSKITGYIVEKKDLPDGRWMKASFTNVLETEFTVSGLVEDQRYEFRVIARNAAGNFSEPSDSSGAITARDEIDAPNASLDPKYKDVIVVHAGETFVLEADIRGKPIPDVVWSKDGKELEETAARMEIKSTIQKTTLVVKDCIRTDGGQYILKLSNVGGTKSIPITVKVLDRPGPPEGPLKVTGVTAEKCYLAWNPPLQDGGANISHYIIEKRETSRLSWTQVSTEVQALNYKVTKLLPGNEYIFRVMAVNKYGIGEPLESGPVTACNPYKPPGPPSTPEVSAITKDSMVVTWARPVDDGGTEIEGYILEKRDKEGVRWTKCNKKTLTDLRLRVTGLTEGHSYEFRVAAENAAGVGEPSEPSVFYRACDALYPPGPPSNPKVTDTSRSSVSLAWSKPIYDGGAPVKGYVVEVKEAAADEWTTCTPPTGLQGKQFTVTKLKENTEYNFRICAINSEGVGEPATLPGSVVAQERIEPPEIELDADLRKVVVLRASATLRLFVTIKGRPEPEVKWEKAEGILTDRAQIEVTSSFTMLVIDNVTRFDSGRYNLTLENNSGSKTAFVNVRVLDSPSAPVNLTIREVKKDSVTLSWEPPLIDGGAKITNYIVEKRETTRKAYATITNNCTKTTFRIENLQEGCSYYFRVLASNEYGIGLPAETTEPVKVSEPPLPPGRVTLVDVTRNTATIKWEKPESDGGSKITGYVVEMQTKGSEKWSTCTQVKTLEATISGLTAGEEYVFRVAAVNEKGRSDPRQLGVPVIARDIEIKPSVELPFHTFNVKAREQLKIDVPFKGRPQATVNWRKDGQTLKETTRVNVSSSKTVTSLSIKEASKEDVGTYELCVSNSAGSITVPITIIVLDRPGPPGPIRIDEVSCDSITISWNPPEYDGGCQISNYIVEKKETTSTTWHIVSQAVARTSIKIVRLTTGSEYQFRVCAENRYGKSSYSESSAVVAEYPFSPPGPPGTPKVVHATKSTMLVTWQVPVNDGGSRVIGYHLEYKERSSILWSKANKILIADTQMKVSGLDEGLMYEYRVYAENIAGIGKCSKSCEPVPARDPCDPPGQPEVTNITRKSVSLKWSKPHYDGGAKITGYIVERRELPDGRWLKCNYTNIQETYFEVTELTEDQRYEFRVFARNAADSVSEPSESTGPIIVKDDVEPPRVMMDVKFRDVIVVKAGEVLKINADIAGRPLPVISWAKDGIEIEERARTEIISTDNHTLLTVKDCIRRDTGQYVLTLKNVAGTRSVAVNCKVLDKPGPPAGPLEINGLTAEKCSLSWGRPQEDGGADIDYYIVEKRETSHLAWTICEGELQMTSCKVTKLLKGNEYIFRVTGVNKYGVGEPLESVAIKALDPFTVPSPPTSLEITSVTKESMTLCWSRPESDGGSEISGYIIERREKNSLRWVRVNKKPVYDLRVKSTGLREGCEYEYRVYAENAAGLSLPSETSPLIRAEDPVFLPSPPSKPKIVDSGKTTITIAWVKPLFDGGAPITGYTVEYKKSDDTDWKTSIQSLRGTEYTISGLTTGAEYVFRVKSVNKVGASDPSDSSDPQIAKEREEEPLFDIDSEMRKTLIVKAGASFTMTVPFRGRPVPNVLWSKPDTDLRTRAYVDTTDSRTSLTIENANRNDSGKYTLTIQNVLSAASLTLVVKVLDTPGPPTNITVQDVTKESAVLSWDVPENDGGAPVKNYHIEKREASKKAWVSVTNNCNRLSYKVTNLQEGAIYYFRVSGENEFGVGIPAETKEGVKITEKPSPPEKLGVTSISKDSVSLTWLKPEHDGGSRIVHYVVEALEKGQKNWVKCAVAKSTHHVVSGLRENSEYFFRVFAENQAGLSDPRELLLPVLIKEQLEPPEIDMKNFPSHTVYVRAGSNLKVDIPISGKPLPKVTLSRDGVPLKATMRFNTEITAENLTINLKESVTADAGRYEITAANSSGTTKAFINIVVLDRPGPPTGPVVISDITEESVTLKWEPPKYDGGSQVTNYILLKRETSTAVWTEVSATVARTMMKVMKLTTGEEYQFRIKAENRFGISDHIDSACVTVKLPYTTPGPPSTPWVTNVTRESITVGWHEPVSNGGSAVVGYHLEMKDRNSILWQKANKLVIRTTHFKVTTISAGLIYEFRVYAENAAGVGKPSHPSEPVLAIDACEPPRNVRITDISKNSVSLSWQQPAFDGGSKITGYIVERRDLPDGRWTKASFTNVTETQFIISGLTQNSQYEFRVFARNAVGSISNPSEVVGPITCIDSYGGPVIDLPLEYTEVVKYRAGTSVKLRAGISGKPAPTIEWYKDDKELQTNALVCVENTTDLASILIKDADRLNSGCYELKLRNAMGSASATIRVQILDKPGPPGGPIEFKTVTAEKITLLWRPPADDGGAKITHYIVEKRETSRVVWSMVSEHLEECIITTTKIIKGNEYIFRVRAVNKYGIGEPLESDSVVAKNAFVTPGPPGIPEVTKITKNSMTVVWSRPIADGGSDISGYFLEKRDKKSLGWFKVLKETIRDTRQKVTGLTENSDYQYRVCAVNAAGQGPFSEPSEFYKAADPIDPPGPPAKIRIADSTKSSITLGWSKPVYDGGSAVTGYVVEIRQGEEEEWTTVSTKGEVRTTEYVVSNLKPGVNYYFRVSAVNCAGQGEPIEMNEPVQAKDILEAPEIDLDVALRTSVIAKAGEDVQVLIPFKGRPPPTVTWRKDEKNLGSDARYSIENTDSSSLLTIPQVTRNDTGKYILTIENGVGEPKSSTVSVKVLDTPAACQKLQVKHVSRGTVTLLWDPPLIDGGSPIINYVIEKRDATKRTWSVVSHKCSSTSFKLIDLSEKTPFFFRVLAENEIGIGEPCETTEPVKAAEVPAPIRDLSMKDSTKTSVILSWTKPDFDGGSVITEYVVERKGKGEQTWSHAGISKTCEIEVSQLKEQSVLEFRVFAKNEKGLSDPVTIGPITVKELIITPEVDLSDIPGAQVTVRIGHNVHLELPYKGKPKPSISWLKDGLPLKESEFVRFSKTENKITLSIKNAKKEHGGKYTVILDNAVCRIAVPITVITLGPPSKPKGPIRFDEIKADSVILSWDVPEDNGGGEITCYSIEKRETSQTNWKMVCSSVARTTFKVPNLVKDAEYQFRVRAENRYGVSQPLVSSIIVAKHQFRIPGPPGKPVIYNVTSDGMSLTWDAPVYDGGSEVTGFHVEKKERNSILWQKVNTSPISGREYRATGLVEGLDYQFRVYAENSAGLSSPSDPSKFTLAVSPVDPPGTPDYIDVTRETITLKWNPPLRDGGSKIVGYSIEKRQGNERWVRCNFTDVSECQYTVTGLSPGDRYEFRIIARNAVGTISPPSQSSGIIMTRDENVPPIVEFGPEYFDGLIIKSGESLRIKALVQGRPVPRVTWFKDGVEIEKRMNMEITDVLGSTSLFVRDATRDHRGVYTVEAKNASGSAKAEIKVKVQDTPGKVVGPIRFTNITGEKMTLWWDAPLNDGCAPITHYIIEKRETSRLAWALIEDKCEAQSYTAIKLINGNEYQFRVSAVNKFGVGRPLDSDPVVAQIQYTVPDAPGIPEPSNITGNSITLTWARPESDGGSEIQQYILERREKKSTRWVKVISKRPISETRFKVTGLTEGNEYEFHVMAENAAGVGPASGISRLIKCREPVNPPGPPTVVKVTDTSKTTVSLEWSKPVFDGGMEIIGYIIEMCKADLGDWHKVNAEACVKTRYTVTDLQAGEEYKFRVSAINGAGKGDSCEVTGTIKAVDRLTAPELDIDANFKQTHVVRAGASIRLFIAYQGRPTPTAVWSKPDSNLSLRADIHTTDSFSTLTVENCNRNDAGKYTLTVENNSGSKSITFTVKVLDTPGPPGPITFKDVTRGSATLMWDAPLLDGGARIHHYVVEKREASRRSWQVISEKCTRQIFKVNDLAEGVPYYFRVSAVNEYGVGEPYEMPEPIVATEQPAPPRRLDVVDTSKSSAVLAWLKPDHDGGSRITGYLLEMRQKGSDFWVEAGHTKQLTFTVERLVEKTEYEFRVKAKNDAGYSEPREAFSSVIIKEPQIEPTADLTGITNQLITCKAGSPFTIDVPISGRPAPKVTWKLEEMRLKETDRVSITTTKDRTTLTVKDSMRGDSGRYFLTLENTAGVKTFSVTVVVIGRPGPVTGPIEVSSVSAESCVLSWGEPKDGGGTEITNYIVEKRESGTTAWQLVNSSVKRTQIKVTHLTKYMEYSFRVSSENRFGVSKPLESAPIIAEHPFVPPSAPTRPEVYHVSANAMSIRWEEPYHDGGSKIIGYWVEKKERNTILWVKENKVPCLECNYKVTGLVEGLEYQFRTYALNAAGVSKASEASRPIMAQNPVDAPGRPEVTDVTRSTVSLIWSAPAYDGGSKVVGYIIERKPVSEVGDGRWLKCNYTIVSDNFFTVTALSEGDTYEFRVLAKNAAGVISKGSESTGPVTCRDEYAPPKAELDARLHGDLVTIRAGSDLVLDAAVGGKPEPKIIWTKGDKELDLCEKVSLQYTGKRATAVIKFCDRSDSGKYTLTVKNASGTKAVSVMVKVLDSPGPCGKLTVSRVTQEKCTLAWSLPQEDGGAEITHYIVERRETSRLNWVIVEGECPTLSYVVTRLIKNNEYIFRVRAVNKYGPGVPVESEPIVARNSFTIPSPPGIPEEVGTGKEHIIIQWTKPESDGGNEISNYLVDKREKKSLRWTRVNKDYVVYDTRLKVTSLMEGCDYQFRVTAVNAAGNSEPSEASNFISCREPSYTPGPPSAPRVVDTTKHSISLAWTKPMYDGGTDIVGYVLEMQEKDTDQWYRVHTNATIRNTEFTVPDLKMGQKYSFRVAAVNVKGMSEYSESIAEIEPVERIEIPDLELADDLKKTVTIRAGASLRLMVSVSGRPPPVITWSKQGIDLASRAIIDTTESYSLLIVDKVNRYDAGKYTIEAENQSGKKSATVLVKVYDTPGPCPSVKVKEVSRDSVTITWEIPTIDGGAPVNNYIVEKREAAMRAFKTVTTKCSKTLYRISGLVEGTMYYFRVLPENIYGIGEPCETSDAVLVSEVPLVPAKLEVVDVTKSTVTLAWEKPLYDGGSRLTGYVLEACKAGTERWMKVVTLKPTVLEHTVTSLNEGEQYLFRIRAQNEKGVSEPRETVTAVTVQDLRVLPTIDLSTMPQKTIHVPAGRPVELVIPIAGRPPPAASWFFAGSKLRESERVTVETHTKVAKLTIRETTIRDTGEYTLELKNVTGTTSETIKVIILDKPGPPTGPIKIDEIDATSITISWEPPELDGGAPLSGYVVEQRDAHRPGWLPVSESVTRSTFKFTRLTEGNEYVFRVAATNRFGIGSYLQSEVIECRSSIRIPGPPETLQIFDVSRDGMTLTWYPPEDDGGSQVTGYIVERKEVRADRWVRVNKVPVTMTRYRSTGLTEGLEYEHRVTAINARGSGKPSRPSKPIVAMDPIAPPGKPQNPRVTDTTRTSVSLAWSVPEDEGGSKVTGYLIEMQKVDQHEWTKCNTTPTKIREYTLTHLPQGAEYRFRVLACNAGGPGEPAEVPGTVKVTEMLEYPDYELDERYQEGIFVRQGGVIRLTIPIKGKPFPICKWTKEGQDISKRAMIATSETHTELVIKEADRGDSGTYDLVLENKCGKKAVYIKVRVIGSPNSPEGPLEYDDIQVRSVRVSWRPPADDGGADILGYILERREVPKAAWYTIDSRVRGTSLVVKGLKENVEYHFRVSAENQFGISKPLKSEEPVTPKTPLNPPEPPSNPPEVLDVTKSSVSLSWSRPKDDGGSRVTGYYIERKETSTDKWVRHNKTQITTTMYTVTGLVPDAEYQFRIIAQNDVGLSETSPASEPVVCKDPFDKPSQPGELEILSISKDSVTLQWEKPECDGGKEILGYWVEYRQSGDSAWKKSNKERIKDKQFTIGGLLEATEYEFRVFAENETGLSRPRRTAMSIKTKLTSGEAPGIRKEMKDVTTKLGEAAQLSCQIVGRPLPDIKWYRFGKELIQSRKYKMSSDGRTHTLTVMTEEQEDEGVYTCIATNEVGEVETSSKLLLQATPQFHPGYPLKEKYYGAVGSTLRLHVMYIGRPVPAMTWFHGQKLLQNSENITIENTEHYTHLVMKNVQRKTHAGKYKVQLSNVFGTVDAILDVEIQDKPDKPTGPIVIEALLKNSAVISWKPPADDGGSWITNYVVEKCEAKEGAEWQLVSSAISVTTCRIVNLTENAGYYFRVSAQNTFGISDPLEVSSVVIIKSPFEKPGAPGKPTITAVTKDSCVVAWKPPASDGGAKIRNYYLEKREKKQNKWISVTTEEIRETVFSVKNLIEGLEYEFRVKCENLGGESEWSEISEPITPKSDVPIQAPHFKEELRNLNVRYQSNATLVCKVTGHPKPIVKWYRQGKEIIADGLKYRIQEFKGGYHQLIIASVTDDDATVYQVRATNQGGSVSGTASLEVEVPAKIHLPKTLEGMGAVHALRGEVVSIKIPFSGKPDPVITWQKGQDLIDNNGHYQVIVTRSFTSLVFPNGVERKDAGFYVVCAKNRFGIDQKTVELDVADVPDPPRGVKVSDVSRDSVNLTWTEPASDGGSKITNYIVEKCATTAERWLRVGQARETRYTVINLFGKTSYQFRVIAENKFGLSKPSEPSEPTITKEDKTRAMNYDEEVDETREVSMTKASHSSTKELYEKYMIAEDLGRGEFGIVHRCVETSSKKTYMAKFVKVKGTDQVLVKKEISILNIARHRNILHLHESFESMEELVMIFEFISGLDIFERINTSAFELNEREIVSYVHQVCEALQFLHSHNIGHFDIRPENIIYQTRRSSTIKIIEFGQARQLKPGDNFRLLFTAPEYYAPEVHQHDVVSTATDMWSLGTLVYVLLSGINPFLAETNQQIIENIMNAEYTFDEEAFKEISIEAMDFVDRLLVKERKSRMTASEALQHPWLKQKIERVSTKVIRTLKHRRYYHTLIKKDLNMVVSAARISCGGAIRSQKGVSVAKVKVASIEIGPVSGQIMHAVGEEGGHVKYVCKIENYDQSTQVTWYFGVRQLENSEKYEITYEDGVAILYVKDITKLDDGTYRCKVVNDYGEDSSYAELFVKGVREVYDYYCRRTMKKIKRRTDTMRLLERPPEFTLPLYNKTAYVGENVRFGVTITVHPEPHVTWYKSGQKIKPGDNDKKYTFESDKGLYQLTINSVTTDDDAEYTVVARNKYGEDSCKAKLTVTLHPPPTDSTLRPMFKRLLANAECQEGQSVCFEIRVSGIPPPTLKWEKDGQPLSLGPNIEIIHEGLDYYALHIRDTLPEDTGYYRVTATNTAGSTSCQAHLQVERLRYKKQEFKSKEEHERHVQKQIDKTLRMAEILSGTESVPLTQVAKEALREAAVLYKPAVSTKTVKGEFRLEIEEKKEERKLRMPYDVPEPRKYKQTTIEEDQRIKQFVPMSDMKWYKKIRDQYEMPGKLDRVVQKRPKRIRLSRWEQFYVMPLPRITDQYRPKWRIPKLSQDDLEIVRPARRRTPSPDYDFYYRPRRRSLGDISDEELLLPIDDYLAMKRTEEERLRLEEELELGFSASPPSRSPPHFELSSLRYSSPQAHVKVEETRKDFRYSTYHIPTKAEASTSYAELRERHAQAAYRQPKQRQRIMAEREDEELLRPVTTTQHLSEYKSELDFMSKEEKSRKKSRRQREVTEITEIEEEYEISKHAQRESSSSASRLLRRRRSLSPTYIELMRPVSELIRSRPQPAEEYEDDTERRSPTPERTRPRSPSPVSSERSLSRFERSARFDIFSRYESMKAALKTQKTSERKYEVLSQQPFTLDHAPRITLRMRSHRVPCGQNTRFILNVQSKPTAEVKWYHNGVELQESSKIHYTNTSGVLTLEILDCHTDDSGTYRAVCTNYKGEASDYATLDVTGGDYTTYASQRRDEEVPRSVFPELTRTEAYAVSSFKKTSEMEASSSVREVKSQMTETRESLSSYEHSASAEMKSAALEEKSLEEKSTTRKIKTTLAARILTKPRSMTVYEGESARFSCDTDGEPVPTVTWLRKGQVLSTSARHQVTTTKYKSTFEISSVQASDEGNYSVVVENSEGKQEAEFTLTIQKARVTEKAVTSPPRVKSPEPRVKSPEAVKSPKRVKSPEPSHPKAVSPTETKPTPTEKVQHLPVSAPPKITQFLKAEASKEIAKLTCVVESSVLRAKEVTWYKDGKKLKENGHFQFHYSADGTYELKINNLTESDQGEYVCEISGEGGTSKTNLQFMGQAFKSIHEKVSKISETKKSDQKTTESTVTRKTEPKAPEPISSKPVIVTGLQDTTVSSDSVAKFAVKATGEPRPTAIWTKDGKAITQGGKYKLSEDKGGFFLEIHKTDTSDSGLYTCTVKNSAGSVSSSCKLTIKAIKDTEAQKVSTQKTSEITPQKKAVVQEEISQKALRSEEIKMSEAKSQEKLALKEEASKVLISEEVKKSAATSLEKSIVHEEITKTSQASEEVRTHAEIKAFSTQMSINEGQRLVLKANIAGATDVKWVLNGVELTNSEEYRYGVSGSDQTLTIKQASHRDEGILTCISKTKEGIVKCQYDLTLSKELSDAPAFISQPRSQNINEGQNVLFTCEISGEPSPEIEWFKNNLPISISSNVSISRSRNVYSLEIRNASVSDSGKYTIKAKNFRGQCSATASLMVLPLVEEPSREVVLRTSGDTSLQGSFSSQSVQMSASKQEASFSSFSSSSASSMTEMKFASMSAQSMSSMQESFVEMSSSSFMGISNMTQLESSTSKMLKAGIRGIPPKIEALPSDISIDEGKVLTVACAFTGEPTPEVTWSCGGRKIHSQEQGRFHIENTDDLTTLIIMDVQKQDGGLYTLSLGNEFGSDSATVNIHIRSI

SEQ ID NO: 7368 - protein, 34258 aa, Homo sapiens
MTTQAPTFTQPLQSVVVLEGSTATFEAHISGFPVPEVSWFRDGQVISTSTLPGVQISFSDGRAKLTIPAVTKANSGRYSLKATNGSGQATSTAELLVKAETAPPNFVQRLQSMTVRQGSQVRLQVRVTGIPTPVVKFYRDGAEIQSSLDFQISQEGDLYSLLIAEAYPEDSGTYSVNATNSVGRATSTAELLVQGEEEVPAKKTKTIVSTAQISESRQTRIEKKIEAHFDARSIATVEMVIDGAAGQQLPHKTPPRIPPKPKSRSPTPPSIAAKAQLARQQSPSPIRHSPSPVRHVRAPTPSPVRSVSPAARISTSPIRSVRSPLLMRKTQASTVATGPEVPPPWKQEGYVASSSEAEMRETTLTTSTQIRTEERWEGRYGVQEQVTISGAAGAAASVSASASYAAEAVATGAKEVKQDADKSAAVATVVAAVDMARVREPVISAVEQTAQRTTTTAVHIQPAQEQVRKEAEKTAVTKVVVAADKAKEQELKSRTKEVITTKQEQMHVTHEQIRKETEKTFVPKVVISAAKAKEQETRISEEITKKQKQVTQEAMRKEAEKTALSTIAVATAKAKEQETILRTRETMATRQEQIQVTHGKVDVGKKAEAVATVVAAVDQARVREPREPGHLEESYAQQTTLEYGYKERISAAKVAEPPQRPASEPHVVPKAVKPRVIQAPSETHIKTTDQKGMHISSQIKKTTDLTTERLVHVDKRPRTASPHFTVSKISVPKTEHGYEASIAGSAIATLQKELSATSSAQKITKSVKAPTVKPSETRVRAEPTPLPQFPFADTPDTYKSEAGVEVKKEVGVSITGTTVREERFEVLHGREAKVTETARVPAPVEIPVTPPTLVSGLKNVTVIEGESVTLECHISGYPSPTVTWYREDYQIESSIDFQITFQSGIARLMIREAFAEDSGRFTCSAVNEAGTVSTSCYLAVQVSEEFEKETTAVTEKFTTEEKRFVESRDVVMTDTSLTEEQAGPGEPAAPYFITKPVVQKLVEGGSVVFGCQVGGNPKPHVYWKKSGVPLTTGYRYKVSYNKQTGECKLVISMTFADDAGEYTIVVRNKHGETSASASLLEEADYELLMKSQQEMLYQTQVTAFVQEPKVGETAPGFVYSEYEKEYEKEQALIRKKMAKDTVVVRTYVEDQEFHISSFEERLIKEIEYRIIKTTLEELLEEDGEEKMAVDISESEAVESGFDSRIKNYRILEGMGVTFHCKMSGYPLPKIAWYKDGKRIKHGERYQMDFLQDGRASLRIPVVLPEDEGIYTAFASNIKGNAICSGKLYVEPAAPLGAPTYIPTLEPVSRIRSLSPRSVSRSPIRMSPARMSPARMSPARMSPARMSPGRRLEETDESQLERLYKPVFVLKPVSFKCLEGQTARFDLKVVGRPMPETFWFHDGQQIVNDYTHKVVIKEDGTQSLIIVPATPSDSGEWTVVAQNRAGRSSISVILTVEAVEHQVKPMFVEKLKNVNIKEGSRLEMKVRATGNPNPDIVWLKNSDIIVPHKYPKIRIEGTKGEAALKIDSTVSQDSAWYTATAINKAGRDTTRCKVNVEVEFAEPEPERKLIIPRGTYRAKEIAAPELEPLHLRYGQEQWEEGDLYDKEKQQKPFFKKKLTSLRLKRFGPAHFECRLTPIGDPTMVVEWLHDGKPLEAANRLRMINEFGYCSLDYGVAYSRDSGIITCRATNKYGTDHTSATLIVKDEKSLVEESQLPEGRKGLQRIEELERMAHEGALTGVTTDQKEKQKPDIVLYPEPVRVLEGETARFRCRVTGYPQPKVNWYLNGQLIRKSKRFRVRYDGIHYLDIVDCKSYDTGEVKVTAENPEGVIEHKVKLEIQQREDFRSVLRRAPEPRPEFHVHEPGKLQFEVQKVDRPVDTTETKEVVKLKRAERITHEKVPEESEELRSKFKRRTEEGYYEAITAVELKSRKKDESYEELLRKTKDELLHWTKELTEEEKKALAEEGKITIPTFKPDKIELSPSMEAPKIFERIQSQTVGQGSDAHFRVRVVGKPDPECEWYKNGVKIERSDRIYWYWPEDNVCELVIRDVTAEDSASIMVKAINIAGETSSHAFLLVQAKQLITFTQELQDVVAKEKDTMATFECETSEPFVKVKWYKDGMEVHEGDKYRMHSDRKVHFLSILTIDTSDAEDYSCVLVEDENVKTTAKLIVEGAVVEFVKELQDIEVPESYSGELECIVSPENIEGKWYHNDVELKSNGKYTITSRRGRQNLTVKDVTKEDQGEYSFVIDGKKTTCKLKMKPRPIAILQGLSDQKVCEGDIVQLEVKVSLESVEGVWMKDGQEVQPSDRVHIVIDKQSHMLLIEDMTKEDAGNYSFTIPALGLSTSGRVSVYSVDVITPLKDVNVIEGTKAVLECKVSVPDVTSVKWYLNDEQIKPDDRVQAIVKGTKQRLVINRTHASDEGPYKLIVGRVETNCNLSVEKIKIIRGLRDLTCTETQNVVFEVELSHSGIDVLWNFKDKEIKPSSKYKIEAHGKIYKLTVLNMMKDDEGKYTFYAGENMTSGKLTVAGGAISKPLTDQTVAESQEAVFECEVANPDSKGEWLRDGKHLPLTNNIRSESDGHKRRLIIAATKLDDIGEYTYKVATSKTSAKLKVEAVKIKKTLKNLTVTETQDAVFTVELTHPNVKGVQWIKNGVVLESNEKYAISVKGTIYSLRIKNCAIVDESVYGFRLGRLGASARLHVETVKIIKKPKDVTALENATVAFEVSVSHDTVPVKWFHKSVEIKPSDKHRLVSERKVHKLMLQNISPSDAGEYTAVVGQLECKAKLFVETLHITKTMKNIEVPETKTASFECEVSHFNVPSMWLKNGVEIEMSEKFKIVVQGKLHQLIIMNTSTEDSAEYTFVCGNDQVSATLTVTPIMITSMLKDINAEEKDTITFEVTVNYEGISYKWLKNGVEIKSTDKCQMRTKKLTHSLNIRNVHFGDAADYTFVAGKATSTATLYVEARHIEFRKHIKDIKVLEKKRAMFECEVSEPDITVQWMKDDQELQITDRIKIQKEKYVHRLLIPSTRMSDAGKYTVVAGGNVSTAKLFVEGRDVRIRSIKKEVQVIEKQRAVVEFEVNEDDVDAHWYKDGIEINFQVQERHKYVVERRIHRMFISETRQSDAGEYTFVAGRNRSSVTLYVNAPEPPQVLQELQPVTVQSGKPARFCAVISGRPQPKISWYKEEQLLSTGFKCKFLHDGQEYTLLLIEAFPEDAAVYTCEAKNDYGVATTSASLSVEVPEVVSPDQEMPVYPPAIITPLQDTVTSEGQPARFQCRVSGTDLKVSWYSKDKKIKPSRFFRMTQFEDTYQLEIAEAYPEDEGTYTFVASNAVGQVSSTANLSLEAPESILHERIEQEIEMEMKEFSSSFLSAEEEGLHSAELQLSKINETLELLSESPVYPTKFDSEKEGTGPIFIKEVSNADISMGDVATLSVTVIGIPKPKIQWFFNGVLLTPSADYKFVFDGDDHSLIILFTKLEDEGEYTCMASNDYGKTICSAYLKINSKGEGHKDTETESAVAKSLEKLGGPCPPHFLKELKPIRCAQGLPAIFEYTVVGEPAPTVTWFKENKQLCTSVYYTIIHNPNGSGTFIVNDPQREDSGLYICKAENMLGESTCAAELLVLLEDTDMTDTPCKAKSTPEAPEDFPQTPLKGPAVEALDSEQEIATFVKDTILKAALITEENQQLSYEHIAKANELSSQLPLGAQELQSILEQDKLTPESTREFLCINGSIHFQPLKEPSPNLQLQIVQSQKTFSKEGILMPEEPETQAVLSDTEKIFPSAMSIEQINSLTVEPLKTLLAEPEGNYPQSSIEPPMHSYLTSVAEEVLSPKEKTVSDTNREQRVTLQKQEAQSALILSQSLAEGHVESLQSPDVMISQVNYEPLVPSEHSCTEGGKILIESANPLENAGQDSAVRIEEGKSLRFPLALEEKQVLLKEEHSDNVVMPPDQIIESKREPVAIKKVQEVQGRDLLSKESLLSGIPEEQRLNLKIQICRALQAAVASEQPGLFSEWLRNIEKVEVEAVNITQEPRHIMCMYLVTSAKSVTEEVTIIIEDVDPQMANLKMELRDALCAIIYEEIDILTAEGPRIQQGAKTSLQEEMDSFSGSQKVEPITEPEVESKYLISTEEVSYFNVQSRVKYLDATPVTKGVASAVVSDEKQDESLKPSEEKEESSSESGTEEVATVKIQEAEGGLIKEDGPMIHTPLVDTVSEEGDIVHLTTSITNAKEVNWYFENKLVPSDEKFKCLQDQNTYTLVIDKVNTEDHQGEYVCEALNDSGKTATSAKLTVVKRAAPVIKRKIEPLEVALGHLAKFTCEIQSAPNVRFQWFKAGREIYESDKCSIRSSKYISSLEILRTQVVDCGEYTCKASNEYGSVSCTATLTVTEAYPPTFLSRPKSLTTFVGKAAKFICTVTGTPVIETIWQKDGAALSPSPNWRISDAENKHILELSNLTIQDRGVYSCKASNKFGADICQAELIIIDKPHFIKELEPVQSAINKKVHLECQVDEDRKVTVTWSKDGQKLPPGKDYKICFEDKIATLEIPLAKLKDSGTYVCTASNEAGSSSCSATVTVREPPSFVKKVDPSYLMLPGESARLHCKLKGSPVIQVTWFKNNKELSESNTVRMYFVNSEAILDITDVKVEDSGSYSCEAVNDVGSDSCSTEIVIKEPPSFIKTLEPADIVRGTNALLQCEVSGTGPFEISWFKDKKQIRSSKKYRLFSQKSLVCLEIFSFNSADVGEYECVVANEVGKCGCMATHLLKEPPTFVKKVDDLIALGGQTVTLQAAVRGSEPISVTWMKGQEVIREDGKIKMSFSNGVAVLIIPDVQISFGGKYTCLAENEAGSQTSVGELIVKEPAKIIERAELIQVTAGDPATLEYTVAGTPELKPKWYKDGRPLVASKKYRISFKNNVAQLKFYSAELHDSGQYTFEISNEVGSSSCETTFTVLDRDIAPFFTKPLRNVDSVVNGTCRLDCKIAGSLPMRVSWFKDGKEIAASDRYRIAFVEGTASLEIIRVDMNDAGNFTCRATNSVGSKDSSGALIVQEPPSFVTKPGSKDVLPGSAVCLKSTFQGSTPLTIRWFKGNKELVSGGSCYITKEALESSLELYLVKTSDSGTYTCKVSNVAGGVECSANLFVKEPATFVEKLEPSQLLKKGDATQLACKVTGTPPIKITWFANDREIKESSKHRMSFVESTAVLRLTDVGIEDSGEYMCEAQNEAGSDHCSSIVIVKESPYFTKEFKPIEVLKEYDVMLLAEVAGTPPFEITWFKDNTILRSGRKYKTFIQDHLVSLQILKFVAADAGEYQCRVTNEVGSSICSARVTLREPPSFIKKIESTSSLRGGTAAFQATLKGSLPITVTWLKDSDEITEDDNIRMTFENNVASLYLSGIEVKHDGKYVCQAKNDAGIQRCSALLSVKEPATITEEAVSIDVTQGDPATLQVKFSGTKEITAKWFKDGQELTLGSKYKISVTDTVSILKIISTEKKDSGEYTFEVQNDVGRSSCKARINVLDLIIPPSFTKKLKKMDSIKGSFIDLECIVAGSHPISIQWFKDDQEISASEKYKFSFHDNTAFLEISQLEGTDSGTYTCSATNKAGHNQCSGHLTVKEPPYFVEKPQSQDVNPNTRVQLKALVGGTAPMTIKWFKDNKELHSGAARSVWKDDTSTSLELFAAKATDSGTYICQLSNDVGTATSKATLFVKEPPQFIKKPSPVLVLRNGQSTTFECQITGTPKIRVSWYLDGNEITAIQKHGISFIDGLATFQISGARVENSGTYVCEARNDAGTASCSIELKVKEPPTFIRELKPVEVVKYSDVELECEVTGTPPFEVTWLKNNREIRSSKKYTLTDRVSVFNLHITKCDPSDTGEYQCIVSNEGGSCSCSTRVALKEPPSFIKKIENTTTVLKSSATFQSTVAGSPPISITWLKDDQILDEDDNVYISFVDSVATLQIRSVDNGHSGRYTCQAKNESGVERCYAFLLVQEPAQIVEKAKSVDVTEKDPMTLECVVAGTPELKVKWLKDGKQIVPSRYFSMSFENNVASFRIQSVMKQDSGQYTFKVENDFGSSSCDAYLRVLDQNIPPSFTKKLTKMDKVLGSSIHMECKVSGSLPISAQWFKDGKEISTSAKYRLVCHERSVSLEVNNLELEDTANYTCKVSNVAGDDACSGILTVKEPPSFLVKPGRQQAIPDSTVEFKAILKGTPPFKIKWFKDDVELVSGPKCFIGLEGSTSFLNLYSVDASKTGQYTCHVTNDVGSDSCTTMLLVTEPPKFVKKLEASKIVKAGDSSRLECKIAGSPEIRVVWFRNEHELPASDKYRMTFIDSVAVIQMNNLSTEDSGDFICEAQNPAGSTSCSTKVIVKEPPVFSSFPPIVETLKNAEVSLECELSGTPPFEVVWYKDKRQLRSSKKYKIASKNFHTSIHILNVDTSDIGEYHCKAQNEVGSDTCVCTVKLKEPPRFVSKLNSLTVVAGEPAELQASIEGAQPIFVQWLKEKEEVIRESENIRITFVENVATLQFAKAEPANAGKYICQIKNDGGMRENMATLMVLEPAVIVEKAGPMTVTVGETCTLECKVAGTPELSVEWYKDGKLLTSSQKHKFSFYNKISSLRILSVERQDAGTYTFQVQNNVGKSSCTAVVDVSDRAVPPSFTRRLKNTGGVLGASCILECKVAGSSPISVAWFHEKTKIVSGAKYQTTFSDNVCTLQLNSLDSSDMGNYTCVAANVAGSDECRAVLTVQEPPSFVKEPEPLEVLPGKNVTFTSVIRGTPPFKVNWFRGARELVKGDRCNIYFEDTVAELELFNIDISQSGEYTCVVSNNAGQASCTTRLFVKEPAAFLKRLSDHSVEPGKSIILESTYTGTLPISVTWKKDGFNITTSEKCNIVTTEKTCILEILNSTKRDAGQYSCEIENEAGRDVCGALVSTLEPPYFVTELEPLEAAVGDSVSLQCQVAGTPEITVSWYKGDTKLRPTPEYRTYFTNNVATLVFNKVNINDSGEYTCKAENSIGTASSKTVFRIQERQLPPSFARQLKDIEQTVGLPVTLTCRLNGSAPIQVCWYRDGVLLRDDENLQTSFVDNVATLKILQTDLSHSGQYSCSASNPLGTASSSARLTAREPKKSPFFDIKPVSIDVIAGESADFECHVTGAQPMRITWSKDNKEIRPGGNYTITCVGNTPHLRILKVGKGDSGQYTCQATNDVGKDMCSAQLSVKEPPKFVKKLEASKVAKQGESIQLECKISGSPEIKVSWFRNDSELHESWKYNMSFINSVALLTINEASAEDSGDYICEAHNGVGDASCSTALTVKAPPVFTQKPSPVGALKGSDVILQCEISGTPPFEVVWVKDRKQVRNSKKFKITSKHFDTSLHILNLEASDVGEYHCKATNEVGSDTCSCSVKFKEPPRFVKKLSDTSTLIGDAVELRAIVEGFQPISVVWLKDRGEVIRESENTRISFIDNIATLQLGSPEASNSGKYICQIKNDAGMRECSAVLTVLEPARIIEKPEPMTVTTGNPFALECVVTGTPELSAKWFKDGRELSADSKHHITFINKVASLKIPCAEMSDKGLYSFEVKNSVGKSNCTVSVHVSDRIVPPSFIRKLKDVNAILGASVVLECRVSGSAPISVGWFQDGNEIVSGPKCQSSFSENVCTLNLSLLEPSDTGIYTCVAANVAGSDECSAVLTVQEPPSFEQTPDSVEVLPGMSLTFTSVIRGTPPFKVKWFKGSRELVPGESCNISLEDFVTELELFEVQPLESGDYSCLVTNDAGSASCTTHLFVKEPATFVKRLADFSVETGSPIVLEATYTGTPPISVSWIKDEYLISQSERCSITMTEKSTILEILESTIEDYAQYSCLIENEAGQDICEALVSVLEPPYFIEPLEHVEAVIGEPATLQCKVDGTPEIRISWYKEHTKLRSAPAYKMQFKNNVASLVINKVDHSDVGEYSCKADNSVGAVASSAVLVIKARKLPPFFARKLKDVHETLGFPVAFECRINGSEPLQVSWYKDGVLLKDDANLQTSFVHNVATLQILQTDQSHIGQYNCSASNPLGTASSSAKLILSEHEVPPFFDLKPVSVDLALGESGTFKCHVTGTAPIKITWAKDNREIRPGGNYKMTLVENTATLTVLKVGKGDAGQYTCYASNIAGKDSCSAQLGVQEPPRFIKKLEPSRIVKQDEFTRYECKIGGSPEIKVLWYKDETEIQESSKFRMSFVDSVAVLEMHNLSVEDSGDYTCEAHNAAGSASSSTSLKVKEPPIFRKKPHPIETLKGADVHLECELQGTPPFHVSWYKDKRELRSGKKYKIMSENFLTSIHILNVDAADIGEYQCKATNDVGSDTCVGSIALKAPPRFVKKLSDISTVVGKEVQLQTTIEGAEPISVVWFKDKGEIVRESDNIWISYSENIATLQFSRVEPANAGKYTCQIKNDAGMQECFATLSVLEPATIVEKPESIKVTTGDTCTLECTVAGTPELSTKWFKDGKELTSDNKYKISFFNKVSGLKIINVAPSDSGVYSFEVQNPVGKDSCTASLQVSDRTVPPSFTRKLKETNGLSGSSVVMECKVYGSPPISVSWFHEGNEISSGRKYQTTLTDNTCALTVNMLEESDSGDYTCIATNMAGSDECSAPLTVREPPSFVQKPDPMDVLTGTNVTFTSIVKGTPPFSVSWFKGSSELVPGDRCNVSLEDSVAELELFDVDTSQSGEYTCIVSNEAGKASCTTHLYIKAPAKFVKRLNDYSIEKGKPLILEGTFTGTPPISVTWKKNGINVTPSQRCNITTTEKSAILEIPSSTVEDAGQYNCYIENASGKDSCSAQILILEPPYFVKQLEPVKVSVGDSASLQCQLAGTPEIGVSWYKGDTKLRPTTTYKMHFRNNVATLVFNQVDINDSGEYICKAENSVGEVSASTFLTVQEQKLPPSFSRQLRDVQETVGLPVVFDCAISGSEPISVSWYKDGKPLKDSPNVQTSFLDNTATLNIFKTDRSLAGQYSCTATNPIGSASSSARLILTEGKNPPFFDIRLAPVDAVVGESADFECHVTGTQPIKVSWAKDSREIRSGGKYQISYLENSAHLTVLKVDKGDSGQYTCYAVNEVGKDSCTAQLNIKERLIPPSFTKRLSETVEETEGNSFKLEGRVAGSQPITVAWYKNNIEIQPTSNCEITFKNNTLVLQVRKAGMNDAGLYTCKVSNDAGSALCTSSIVIKEPKKPPVFDQHLTPVTVSEGEYVQLSCHVQGSEPIRIQWLKAGREIKPSDRCSFSFASGTAVLELRDVAKADSGDYVCKASNVAGSDTTKSKVTIKDKPAVAPATKKAAVDGRLFFVSEPQSIRVVEKTTATFIAKVGGDPIPNVKWTKGKWRQLNQGGRVFIHQKGDEAKLEIRDTTKTDSGLYRCVAFNEHGEIESNVNLQVDERKKQEKIEGDLRAMLKKTPILKKGAGEEEEIDIMELLKNVDPKEYEKYARMYGITDFRGLLQAFELLKQSQEEETHRLEIEEIERSERDEKEFEELVSFIQQRLSQTEPVTLIKDIENQTVLKDNDAVFEIDIKINYPEIKLSWYKGTEKLEPSDKFEISIDGDRHTLRVKNCQLKDQGNYRLVCGPHIASAKLTVIEPAWERHLQDVTLKEGQTCTMTCQFSVPNVKSEWFRNGRILKPQGRHKTEVEHKVHKLTIADVRAEDQGQYTCKYEDLETSAELRIEAEPIQFTKRIQNIVVSEHQSATFECEVSFDDAIVTWYKGPTELTESQKYNFRNDGRCHYMTIHNVTPDDEGVYSVIARLEPRGEARSTAELYLTTKEIKLELKPPDIPDSRVPIPTMPIRAVPPEEIPPVVAPPIPLLLPTPEEKKPPPKRIEVTKKAVKKDAKKVVAKPKEMTPREEIVKKPPPPTTLIPAKAPEIIDVSSKAEEVKIMTITRKKEVQKEKEAVYEKKQAVHKEKRVFIESFEEPYDELEVEPYTEPFEQPYYEEPDEDYEEIKVEAKKEVHEEWEEDFEEGQEYYEREEGYDEGEEEWEEAYQEREVIQVQKEVYEESHERKVPAKVPEKKAPPPPKVIKKPVIEKIEKTSRRMEEEKVQVTKVPEVSKKIVPQKPSRTPVQEEVIEVKVPAVHTKKMVISEEKMFFASHTEEEVSVTVPEVQKEIVTEEKIHVAISKRVEPPPKVPELPEKPAPEEVAPVPIPKKVEPPAPKVPEVPKKPVPEEKKPVPVPKKEPAAPPKVPEVPKKPVPEEKIPVPVAKKKEAPPAKVPEVQKGVVTEEKITIVTQREESPPPAVPEIPKKKVPEERKPVPRKEEEVPPPPKVPALPKKPVPEEKVAVPVPVAKKAPPPRAEVSKKTVVEEKRFVAEEKLSFAVPQRVEVTRHEVSAEEEWSYSEEEEGVSISVYREEEREEEEEAEVTEYEVMEEPEEYVVEEKLHIISKRVEAEPAEVTERQEKKIVLKPKIPAKIEEPPPAKVPEAPKKIVPEKKVPAPVPKKEKVPPPKVPEEPKKPVPEKKVPPKVIKMEEPLPAKVTERHMQITQEEKVLVAVTKKEAPPKARVPEEPKRAVPEEKVLKLKPKREEEPPAKVTEFRKRVVKEEKVSIEAPKREPQPIKEVTIMEEKERAYTLEEEAVSVQREEEYEEYEEYDYKEFEEYEPTEEYDQYEEYEEREYERYEEHEEYITEPEKPIPVKPVPEEPVPTKPKAPPAKVLKKAVPEEKVPVPIPKKLKPPPPKVPEEPKKVFEEKIRISITKREKEQVTEPAAKVPMKPKRVVAEEKVPVPRKEVAPPVRVPEVPKELEPEEVAFEEEVVTHVEEYLVEEEEEYIHEEEEFITEEEVVPVIPVKVPEVPRKPVPEEKKPVPVPKKKEAPPAKVPEVPKKPEEKVPVLIPKKEKPPPAKVPEVPKKPVPEEKVPVPVPKKVEAPPAKVPEVPKKPVPEKKVPVPAPKKVEAPPAKVPEVPKKLIPEEKKPTPVPKKVEAPPPKVPKKREPVPVPVALPQEEEVLFEEEIVPEEEVLPEEEEVLPEEEEVLPEEEEVLPEEEEIPPEEEEVPPEEEYVPEEEEFVPEEEVLPEVKPKVPVPAPVPEIKKKVTEKKVVIPKKEEAPPAKVPEVPKKVEEKRIILPKEEEVLPVEVTEEPEEEPISEEEIPEEPPSIEEVEEVAPPRVPEVIKKAVPEAPTPVPKKVEAPPAKVSKKIPEEKVPVPVQKKEAPPAKVPEVPKKVPEKKVLVPKKEAVPPAKGRTVLEEKVSVAFRQEVVVKERLELEVVEAEVEEIPEEEEFHEVEEYFEEGEFHEVEEFIKLEQHRVEEEHRVEKVHRVIEVFEAEEVEVFEKPKAPPKGPEISEKIIPPKKPPTKVVPRKEPPAKVPEVPKKIVVEEKVRVPEEPRVPPTKVPEVLPPKEVVPEKKVPVPPAKKPEAPPPKVPEAPKEVVPEKKVPVPPPKKPEVPPTKVPEVPKAAVPEKKVPEAIPPKPESPPPEVPEAPKEVVPEKKVPAAPPKKPEVTPVKVPEAPKEVVPEKKVPVPPPKKPEVPPTKVPEVPKVAVPEKKVPEAIPPKPESPPPEVFEEPEEVALEEPPAEVVEEPEPAAPPQVTVPPKKPVPEKKAPAVVAKKPELPPVKVPEVPKEVVPEKKVPLVVPKKPEAPPAKVPEVPKEVVPEKKVAVPKKPEVPPAKVPEVPKKPVLEEKPAVPVPERAESPPPEVYEEPEEIAPEEEIAPEEEKPVPVAEEEEPEVPPPAVPEEPKKIIPEKKVPVIKKPEAPPPKEPEPEKVIEKPKLKPRPPPPPPAPPKEDVKEKIFQLKAIPKKKVPEKPQVPEKVELTPLKVPGGEKKVRKLLPERKPEPKEEVVLKSVLRKRPEEEEPKVEPKKLEKVKKPAVPEPPPPKPVEEVEVPTVTKRERKIPEPTKVPEIKPAIPLPAPEPKPKPEAEVKTIKPPPVEPEPTPIAAPVTVPVVGKKAEAKAPKEEAAKPKGPIKGVPKKTPSPIEAERRKLRPGSGGEKPPDEAPFTYQLKAVPLKFVKEIKDIILTESEFVGSSAIFECLVSPSTAITTWMKDGSNIRESPKHRFIADGKDRKLHIIDVQLSDAGEYTCVLRLGNKEKTSTAKLVVEELPVRFVKTLEEEVTVVKGQPLYLSCELNKERDVVWRKDGKIVVEKPGRIVPGVIGLMRALTINDADDTDAGTYTVTVENANNLECSSCVKVVEVIRDWLVKPIRDQHVKPKGTAIFACDIAKDTPNIKWFKGYDEIPAEPNDKTEILRDGNHLYLKIKNAMPEDIAEYAVEIEGKRYPAKLTLGEREVELLKPIEDVTIYEKESASFDAEISEADIPGQWKLKGELLRPSPTCEIKAEGGKRFLTLHKVKLDQAGEVLYQALNAITTAILTVKEIELDFAVPLKDVTVPERRQARFECVLTREANVIWSKGPDIIKSSDKFDIIADGKKHILVINDSQFDDEGVYTAEVEGKKTSARLFVTGIRLKFMSPLEDQTVKEGETATFVCELSHEKMHVVWFKNDAKLHTSRTVLISSEGKTHKLEMKEVTLDDISQIKAQVKELSSTAQLKVLEADPYFTVKLHDKTAVEKDEITLKCEVSKDVPVKWFKDGEEIVPSPKYSIKADGLRRILKIKKADLKDKGEYVCDCGTDKTKANVTVEARLIKVEKPLYGVEVFVGETAHFEIELSEPDVHGQWKLKGQPLTASPDCEIIEDGKKHILILHNCQLGMTGEVSFQAANAKSAANLKVKELPLIFITPLSDVKVFEKDEAKFECEVSREPKTFRWLKGTQEITGDDRFELIKDGTKHSMVIKSAAFEDEAKYMFEAEDKHTSGKLIIEGIRLKFLTPLKDVTAKEKESAVFTVELSHDNIRVKWFKNDQRLHTTRSVSMQDEGKTHSITFKDLSIDDTSQIRVEAMGMSSEAKLTVLEGDPYFTGKLQDYTGVEKDEVILQCEISKADAPVKWFKDGKEIKPSKNAVIKADGKKRMLILKKALKSDIGQYTCDCGTDKTSGKLDIEDREIKLVRPLHSVEVMETETARFETEISEDDIHANWKLKGEALLQTPDCEIKEEGKIHSLVLHNCRLDQTGGVDFQAANVKSSAHLRVKPRVIGLLRPLKDVTVTAGETATFDCELSYEDIPVEWYLKGKKLEPSDKVVPRSEGKVHTLTLRDVKLEDAGEVQLTAKDFKTHANLFVKEPPVEFTKPLEDQTVEEGATAVLECEVSRENAKVKWFKNGTEILKSKKYEIVADGRVRKLVIHDCTPEDIKTYTCDAKDFKTSCNLNVVPPHVEFLRPLTDLQVREKEMARFECELSRENAKVKWFKDGAEIKKGKKYDIISKGAVRILVINKCLLDDEAEYSCEVRTARTSGMLTVLEEEAVFTKNLANIEVSETDTIKLVCEVSKPGAEVIWYKGDEEIIETGRYEILTEGRKRILVIQNAHLEDAGNYNCRLPSSRTDGKVKVHELAAEFISKPQNLEILEGEKAEFVCSISKESFPVQWKRDDKTLESGDKYDVIADGKKRVLVVKDATLQDMGTYVVMVGAARAAAHLTVIEKLRIVVPLKDTRVKEQQEVVFNCEVNTEGAKAKWFRNEEAIFDSSKYIILQKDLVYTLRIRDAHLDDQANYNVSLTNHRGENVKSAANLIVEEEDLRIVEPLKDIETMEKKSVTFWCKVNRLNVTLKWTKNGEEVPFDNRVSYRVDKYKHMLTIKDCGFPDEGEYIVTAGQDKSVAELLIIEAPTEFVEHLEDQTVTEFDDAVFSCQLSREKANVKWYRNGREIKEGKKYKFEKDGSIHRLIIKDCRLDDECEYACGVEDRKSRARLFVEEIPVEIIRPPQDILEAPGADVVFLAELNKDKVEVQWLRNNMVVVQGDKHQMMSEGKIHRLQICDIKPRDQGEYRFIAKDKEARAKLELAAAPKIKTADQDLVVDVGKPLTMVVPYDAYPKAEAEWFKENEPLSTKTIDTTAEQTSFRILEAKKGDKGRYKIVLQNKHGKAEGFINLKVIDVPGPVRNLEVTETFDGEVSLAWEEPLTDGGSKIIGYVVERRDIKRKTWVLATDRAESCEFTVTGLQKGGVEYLFRVSARNRVGTGEPVETDNPVEARSKYDVPGPPLNVTITDVNRFGVSLTWEPPEYDGGAEITNYVIELRDKTSIRWDTAMTVRAEDLSATVTDVVEGQEYSFRVRAQNRIGVGKPSAATPFVKVADPIERPSPPVNLTSSDQTQSSVQLKWEPPLKDGGSPILGYIIERCEEGKDNWIRCNMKLVPELTYKVTGLEKGNKYLYRVSAENKAGVSDPSEILGPLTADDAFVEPTMDLSAFKDGLEVIVPNPITILVPSTGYPRPTATWCFGDKVLETGDRVKMKTLSAYAELVISPSERSDKGIYTLKLENRVKTISGEIDVNVIARPSAPKELKFGDITKDSVHLTWEPPDDDGGSPLTGYVVEKREVSRKTWTKVMDFVTDLEFTVPDLVQGKEYLFKVCARNKCGPGEPAYVDEPVNMSTPATVPDPPENVKWRDRTANSIFLTWDPPKNDGGSRIKGYIVERCPRGSDKWVACGEPVAETKMEVTGLEEGKWYAYRVKALNRQGASKPSRPTEEIQAVDTQEAPEIFLDVKLLAGLTVKAGTKIELPATVTGKPEPKITWTKADMILKQDKRITIENVPKKSTVTIVDSKRSDTGTYIIEAVNVCGRATAVVEVNVLDKPGPPAAFDITDVTNESCLLTWNPPRDDGGSKITNYVVERRATDSEVWHKLSSTVKDTNFKATKLIPNKEYIFRVAAENMYGVGEPVQASPITAKYQFDPPGPPTRLEPSDITKDAVTLTWCEPDDDGGSPITGYWVERLDPDTDKWVRCNKMPVKDTTYRVKGLTNKKKYRFRVLAENLAGPGKPSKSTEPILIKDPIDPPWPPGKPTVKDVGKTSVRLNWTKPEHDGGAKIESYVIEMLKTGTDEWVRVAEGVPTTQHLLPGLMEGQEYSFRVRAVNKAGESEPSEPSDPVLCREKLYPPSPPRWLEVINITKNTADLKWTVPEKDGGSPITNYIVEKRDVRRKGWQTVDTTVKDTKCTVTPLTEGSLYVFRVAAENAIGQSDYTEIEDSVLAKDTFTTPGPPYALAVVDVTKRHVDLKWEPPKNDGGRPIQRYVIEKKERLGTRWVKAGKTAGPDCNFRVTDVIEGTEVQFQVRAENEAGVGHPSEPTEILSIEDPTSPPSPPLDLHVTDAGRKHIAIAWKPPEKNGGSPIIGYHVEMCPVGTEKWMRVNSRPIKDLKFKVEEGVVPDKEYVLRVRAVNAIGVSEPSEISENVVAKDPDCKPTIDLETHDIIVIEGEKLSIPVPFRAVPVPTVSWHKDGKEVKASDRLTMKNDHISAHLEVPKSVRADAGIYTITLENKLGSATASINVKVIGLPGPCKDIKASDITKSSCKLTWEPPEFDGGTPILHYVLERREAGRRTYIPVMSGENKLSWTVKDLIPNGEYFFRVKAVNKVGGGEYIELKNPVIAQDPKQPPDPPVDVEVHNPTAEAMTITWKPPLYDGGSKIMGYIIEKIAKGEERWKRCNEHLVPILTYTAKGLEEGKEYQFRVRAENAAGISEPSRATPPTKAVDPIDAPKVILRTSLEVKRGDEIALDASISGSPYPTITWIKDENVIVPEEIKKRAAPLVRRRKGEVQEEEPFVLPLTQRLSIDNSKKGESQLRVRDSLRPDHGLYMIKVENDHGIAKAPCTVSVLDTPGPPINFVFEDIRKTSVLCKWEPPLDDGGSEIINYTLEKKDKTKPDSEWIVVTSTLRHCKYSVTKLIEGKEYLFRVRAENRFGPGPPCVSKPLVAKDPFGPPDAPDKPIVEDVTSNSMLVKWNEPKDNGSPILGYWLEKREVNSTHWSRVNKSLLNALKANVDGLLEGLTYVFRVCAENAAGPGKFSPPSDPKTAHDPISPPGPPIPRVTDTSSTTIELEWEPPAFNGGGEIVGYFVDKQLVGTNEWSRCTEKMIKVRQYTVKEIREGADYKLRVSAVNAAGEGPPGETQPVTVAEPQEPPAVELDVSVKGGIQIMAGKTLRIPAVVTGRPVPTKVWTKEEGELDKDRVVIDNVGTKSELIIKDALRKDHGRYVITATNSCGSKFAAARVEVFDVPGPVLDLKPVVTNRKMCLLNWSDPEDDGGSEITGFIIERKDAKMHTWRQPIETERSKCDITGLLEGQEYKFRVIAKNKFGCGPPVEIGPILAVDPLGPPTSPERLTYTERTKSTITLDWKEPRSNGGSPIQGYIIEKRRHDKPDFERVNKRLCPTTSFLVENLDEHQMYEFRVKAVNEIGESEPSLPLNVVIQDDEVPPTIKLRLSVRGDTIKVKAGEPVHIPADVTGLPMPKIEWSKNETVIEKPTDALQITKEEVSRSEAKTELSIPKAVREDKGTYTVTASNRLGSVFRNVHVEVYDRPSPPRNLAVTDIKAESCYLTWDAPLDNGGSEITHYVIDKRDASRKKAEWEEVTNTAVEKRYGIWKLIPNGQYEFRVRAVNKYGISDECKSDKVVIQDPYRLPGPPGKPKVLARTKGSMLVSWTPPLDNGGSPITGYWLEKREEGSPYWSRVSRAPITKVGLKGVEFNVPRLLEGVKYQFRAMAINAAGIGPPSEPSDPEVAGDPIFPPGPPSCPEVKDKTKSSISLGWKPPAKDGGSPIKGYIVEMQEEGTTDWKRVNEPDKLITTCECVVPNLKELRKYRFRVKAVNEAGESEPSDTTGEIPATDIQEEPEVFIDIGAQDCLVCKAGSQIRIPAVIKGRPTPKSSWEFDGKAKKAMKDGVHDIPEDAQLETAENSSVIIIPECKRSHTGKYSITAKNKAGQKTANCRVKVMDVPGPPKDLKVSDITRGSCRLSWKMPDDDGGDRIKGYVIEKRTIDGKAWTKVNPDCGSTTFVVPDLLSEQQYFFRVRAENRFGIGPPVETIQRTTARDPIYPPDPPIKLKIGLITKNTVHLSWKPPKNDGGSPVTHYIVECLAWDPTGTKKEAWRQCNKRDVEELQFTVEDLVEGGEYEFRVKAVNAAGVSKPSATVGPVTVKDQTCPPSIDLKEFMEVEEGTNVNIVAKIKGVPFPTLTWFKAPPKKPDNKEPVLYDTHVNKLVVDDTCTLVIPQSRRSDTGLYTITAVNNLGTASKEMRLNVLGRPGPPVGPIKFESVSADQMTLSWFPPKDDGGSKITNYVIEKREANRKTWVHVSSEPKECTYTIPKLLEGHEYVFRIMAQNKYGIGEPLDSEPETARNLFSVPGAPDKPTVSSVTRNSMTVNWEEPEYDGGSPVTGYWLEMKDTTSKRWKRVNRDPIKAMTLGVSYKVTGLIEGSDYQFRVYAINAAGVGPASLPSDPATARDPIAPPGPPFPKVTDWTKSSADLEWSPPLKDGGSKVTGYIVEYKEEGKEEWEKGKDKEVRGTKLVVTGLKEGAFYKFRVRAVNIAGIGEPGEVTDVIEMKDRLVSPDLQLDASVRDRIVVHAGGVIRIIAYVSGKPPPTVTWNMNERTLPQEATIETTAISSSMVIKNCQRSHQGVYSLLAKNEAGERKKTIIVDVLDVPGPVGTPFLAHNLTNESCKLTWFSPEDDGGSPITNYVIEKRESDRRAWTPVTYTVTRQNATVQGLIQGKAYFFRIAAENSIGMGPFVETSEALVIREPITVPERPEDLEVKEVTKNTVTLTWNPPKYDGGSEIINYVLESRLIGTEKFHKVTNDNLLSRKYTVKGLKEGDTYEYRVSAVNIVGQGKPSFCTKPITCKDELAPPTLHLDFRDKLTIRVGEAFALTGRYSGKPKPKVSWFKDEADVLEDDRTHIKTTPATLALEKIKAKRSDSGKYCVVVENSTGSRKGFCQVNVVDRPGPPVGPVSFDEVTKDYMVISWKPPLDDGGSKITNYIIEKKEVGKDVWMPVTSASAKTTCKVSKLLEGKDYIFRIHAENLYGISDPLVSDSMKAKDRFRVPDAPDQPIVTEVTKDSALVTWNKPHDGGKPITNYILEKRETMSKRWARVTKDPIHPYTKFRVPDLLEGCQYEFRVSAENEIGIGDPSPPSKPVFAKDPIAKPSPPVNPEAIDTTCNSVDLTWQPPRHDGGSKILGYIVEYQKVGDEEWRRANHTPESCPETKYKVTGLRDGQTYKFRVLAVNAAGESDPAHVPEPVLVKDRLEPPELILDANMAREQHIKVGDTLRLSAIIKGVPFPKVTWKKEDRDAPTKARIDVTPVGSKLEIRNAAHEDGGIYSLTVENPAGSKTVSVKVLVLDKPGPPRDLEVSEIRKDSCYLTWKEPLDDGGSVITNYVVERRDVASAQWSPLSATSKKKSHFAKHLNEGNQYLFRVAAENQYGRGPFVETPKPIKALDPLHPPGPPKDLHHVDVDKTEVSLVWNKPDRDGGSPITGYLVEYQEEGTQDWIKFKTVTNLECVVTGLQQGKTYRFRVKAENIVGLGLPDTTIPIECQEKLVPPSVELDVKLIEGLVVKAGTTVRFPAIIRGVPVPTAKWTTDGSEIKTDEHYTVETDNFSSVLTIKNCLRRDTGEYQITVSNAAGSKTVAVHLTVLDVPGPPTGPINILDVTPEHMTISWQPPKDDGGSPVINYIVEKQDTRKDTWGVVSSGSSKTKLKIPHLQKGCEYVFRVRAENKIGVGPPLDSTPTVAKHKFSPPSPPGKPVVTDITENAATVSWTLPKSDGGSPITGYYMERREVTGKWVRVNKTPIADLKFRVTGLYEGNTYEFRVFAENLAGLSKPSPSSDPIKACRPIKPPGPPINPKLKDKSRETADLVWTKPLSDGGSPILGYVVECQKPGTAQWNRINKDELIRQCAFRVPGLIEGNEYRFRIKAANIVGEGEPRELAESVIAKDILHPPEVELDVTCRDVITVRVGQTIRILARVKGRPEPDITWTKEGKVLVREKRVDLIQDLPRVELQIKEAVRADHGKYIISAKNSSGHAQGSAIVNVLDRPGPCQNLKVTNVTKENCTISWENPLDNGGSEITNFIVEYRKPNQKGWSIVASDVTKRLIKANLLANNEYYFRVCAENKVGVGPTIETKTPILAINPIDRPGEPENLHIADKGKTFVYLKWRRPDYDGGSPNLSYHVERRLKGSDDWERVHKGSIKETHYMVDRCVENQIYEFRVQTKNEGGESDWVKTEEVVVKEDLQKPVLDLKLSGVLTVKAGDTIRLEAGVRGKPFPEVAWTKDKDATDLTRSPRVKIDTRADSSKFSLTKAKRSDGGKYVVTATNTAGSFVAYATVNVLDKPGPVRNLKIVDVSSDRCTVCWDPPEDDGGCEIQNYILEKCETKRMVWSTYSATVLTPGTTVTRLIEGNEYIFRVRAENKIGTGPPTESKPVIAKTKYDKPGRPDPPEVTKVSKEEMTVVWNPPEYDGGKSITGYFLEKKEKHSTRWVPVNKSAIPERRMKVQNLLPDHEYQFRVKAENEIGIGEPSLPSRPVVAKDPIEPPGPPTNFRVVDTTKHSITLGWGKPVYDGGAPIIGYVVEMRPKIADASPDEGWKRCNAAAQLVRKEFTVTSLDENQEYEFRVCAQNQVGIGRPAELKEAIKPKEILEPPEIDLDASMRKLVIVRAGCPIRLFAIVRGRPAPKVTWRKVGIDNVVRKGQVDLVDTMAFLVIPNSTRDDSGKYSLTLVNPAGEKAVFVNVRVLDTPGPVSDLKVSDVTKTSCHVSWAPPENDGGSQVTHYIVEKREADRKTWSTVTPEVKKTSFHVTNLVPGNEYYFRVTAVNEYGPGVPTDVPKPVLASDPLSEPDPPRKLEVTEMTKNSATLAWLPPLRDGGAKIDGYITSYREEEQPADRWTEYSVVKDLSLVVTGLKEGKKYKFRVAARNAVGVSLPREAEGVYEAKEQLLPPKILMPEQITIKAGKKLRIEAHVYGKPHPTCKWKKGEDEVVTSSHLAVHKADSSSILIIKDVTRKDSGYYSLTAENSSGTDTQKIKVVVMDAPGPPQPPFDISDIDADACSLSWHIPLEDGGSNITNYIVEKCDVSRGDWVTALASVTKTSCRVGKLIPGQEYIFRVRAENRFGISEPLTSPKMVAQFPFGVPSEPKNARVTKVNKDCIFVAWDRPDSDGGSPIIGYLIERKERNSLLWVKANDTLVRSTEYPCAGLVEGLEYSFRIYALNKAGSSPPSKPTEYVTARMPVDPPGKPEVIDVTKSTVSLIWARPKHDGGSKIIGYFVEACKLPGDKWVRCNTAPHQIPQEEYTATGLEEKAQYQFRAIARTAVNISPPSEPSDPVTILAENVPPRIDLSVAMKSLLTVKAGTNVCLDATVFGKPMPTVSWKKDGTLLKPAEGIKMAMQRNLCTLELFSVNRKDSGDYTITAENSSGSKSATIKLKVLDKPGPPASVKINKMYSDRAMLSWEPPLEDGGSEITNYIVDKRETSRPNWAQVSATVPITSCSVEKLIEGHEYQFRICAENKYGVGDPVFTEPAIAKNPYDPPGRCDPPVISNITKDHMTVSWKPPADDGGSPITGYLLEKRETQAVNWTKVNRKPIIERTLKATGLQEGTEYEFRVTAINKAGPGKPSDASKAAYARDPQYPPGPPAFPKVYDTTRSSVSLSWGKPAYDGGSPIIGYLVEVKRADSDNWVRCNLPQNLQKTRFEVTGLMEDTQYQFRVYAVNKIGYSDPSDVPDKHYPKDILIPPEGELDADLRKTLILRAGVTMRLYVPVKGRPPPKITWSKPNVNLRDRIGLDIKSTDFDTFLRCENVNKYDAGKYILTLENSCGKKEYTIVVKVLDTPGPPVNVTVKEISKDSAYVTWEPPIIDGGSPIINYVVQKRDAERKSWSTVTTECSKTSFRVANLEEGKSYFFRVFAENEYGIGDPGETRDAVKASQTPGPVVDLKVRSVSKSSCSIGWKKPHSDGGSRIIGYVVDFLTEENKWQRVMKSLSLQYSAKDLTEGKEYTFRVSAENENGEGTPSEITVVARDDVVAPDLDLKGLPDLCYLAKENSNFRLKIPIKGKPAPSVSWKKGEDPLATDTRVSVESSAVNTTLIVYDCQKSDAGKYTITLKNVAGTKEGTISIKVVGKPGIPTGPIKFDEVTAEAMTLKWAPPKDDGGSEITNYILEKRDSVNNKWVTCASAVQKTTFRVTRLHEGMEYTFRVSAENKYGVGEGLKSEPIVARHPFDVPDAPPPPNIVDVRHDSVSLTWTDPKKTGGSPITGYHLEFKERNSLLWKRANKTPIRMRDFKVTGLTEGLEYEFRVMAINLAGVGKPSLPSEPVVALDPIDPPGKPEVINITRNSVTLIWTEPKYDGGHKLTGYIVEKRDLPSKSWMKANHVNVPECAFTVTDLVEGGKYEFRIRAKNTAGAISAPSESTETIICKDEYEAPTIVLDPTIKDGLTIKAGDTIVLNAISILGKPLPKSSWSKAGKDIRPSDITQITSTPTSSMLTIKYATRKDAGEYTITATNPFGTKVEHVKVTVLDVPGPPGPVEISNVSAEKATLTWTPPLEDGGSPIKSYILEKRETSRLLWTVVSEDIQSCRHVATKLIQGNEYIFRVSAVNHYGKGEPVQSEPVKMVDRFGPPGPPEKPEVSNVTKNTATVSWKRPVDDGGSEITGYHVERREKKSLRWVRAIKTPVSDLRCKVTGLQEGSTYEFRVSAENRAGIGPPSEASDSVLMKDAAYPPGPPSNPHVTDTTKKSASLAWGKPHYDGGLEITGYVVEHQKVGDEAWIKDTTGTALRITQFVVPDLQTKEKYNFRISAINDAGVGEPAVIPDVEIVEREMAPDFELDAELRRTLVVRAGLSIRIFVPIKGRPAPEVTWTKDNINLKNRANIENTESFTLLIIPECNRYDTGKFVMTIENPAGKKSGFVNVRVLDTPGPVLNLRPTDITKDSVTLHWDLPLIDGGSRITNYIVEKREATRKSYSTATTKCHKCTYKVTGLSEGCEYFFRVMAENEYGIGEPTETTEPVKASEAPSPPDSLNIMDITKSTVSLAWPKPKHDGGSKITGYVIEAQRKGSDQWTHITTVKGLECVVRNLTEGEEYTFQVMAVNSAGRSAPRESRPVIVKEQTMLPELDLRGIYQKLVIAKAGDNIKVEIPVLGRPKPTVTWKKGDQILKQTQRVNFETTATSTILNINECVRSDSGPYPLTARNIVGEVGDVITIQVHDIPGPPTGPIKFDEVSSDFVTFSWDPPENDGGVPISNYVVEMRQTDSTTWVELATTVIRTTYKATRLTTGLEYQFRVKAQNRYGVGPGITSACIVANYPFKVPGPPGTPQVTAVTKDSMTISWHEPLSDGGSPILGYHVERKERNGILWQTVSKALVPGNIFKSSGLTDGIAYEFRVIAENMAGKSKPSKPSEPMLALDPIDPPGKPVPLNITRHTVTLKWAKPEYTGGFKITSYIVEKRDLPNGRWLKANFSNILENEFTVSGLTEDAAYEFRVIAKNAAGAISPPSEPSDAITCRDDVEAPKIKVDVKFKDTVILKAGEAFRLEADVSGRPPPTMEWSKDGKELEGTAKLEIKIADFSTNLVNKDSTRRDSGAYTLTATNPGGFAKHIFNVKVLDRPGPPEGPLAVTEVTSEKCVLSWFPPLDDGGAKIDHYIVQKRETSRLAWTNVASEVQVTKLKVTKLLKGNEYIFRVMAVNKYGVGEPLESEPVLAVNPYGPPDPPKNPEVTTITKDSMVVCWGHPDSDGGSEIINYIVERRDKAGQRWIKCNKKTLTDLRYKVSGLTEGHEYEFRIMAENAAGISAPSPTSPFYKACDTVFKPGPPGNPRVLDTSRSSISIAWNKPIYDGGSEITGYMVEIALPEEDEWQIVTPPAGLKATSYTITGLTENQEYKIRIYAMNSEGLGEPALVPGTPKAEDRMLPPEIELDADLRKVVTIRACCTLRLFVPIKGRPAPEVKWARDHGESLDKASIESTSSYTLLIVGNVNRFDSGKYILTVENSSGSKSAFVNVRVLDTPGPPQDLKVKEVTKTSVTLTWDPPLLDGGSKIKNYIVEKRESTRKAYSTVATNCHKTSWKVDQLQEGCSYYFRVLAENEYGIGLPAETAESVKASERPLPPGKITLMDVTRNSVSLSWEKPEHDGGSRILGYIVEMQTKGSDKWATCATVKVTEATITGLIQGEEYSFRVSAQNEKGISDPRQLSVPVIAKDLVIPPAFKLLFNTFTVLAGEDLKVDVPFIGRPTPAVTWHKDNVPLKQTTRVNAESTENNSLLTIKDACREDVGHYVVKLTNSAGEAIETLNVIVLDKPGPPTGPVKMDEVTADSITLSWGPPKYDGGSSINNYIVEKRDTSTTTWQIVSATVARTTIKACRLKTGCEYQFRIAAENRYGKSTYLNSEPTVAQYPFKVPGPPGTPVVTLSSRDSMEVQWNEPISDGGSRVIGYHLERKERNSILWVKLNKTPIPQTKFKTTGLEEGVEYEFRVSAENIVGIGKPSKVSECYVARDPCDPPGRPEAIIVTRNSVTLQWKKPTYDGGSKITGYIVEKKELPEGRWMKASFTNIIDTHFEVTGLVEDHRYEFRVIARNAAGVFSEPSESTGAITARDEVDPPRISMDPKYKDTIVVHAGESFKVDADIYGKPIPTIQWIKGDQELSNTARLEIKSTDFATSLSVKDAVRVDSGNYILKAKNVAGERSVTVNVKVLDRPGPPEGPVVISGVTAEKCTLAWKPPLQDGGSDIINYIVERRETSRLVWTVVDANVQTLSCKVTKLLEGNEYTFRIMAVNKYGVGEPLESEPVVAKNPFVVPDAPKAPEVTTVTKDSMIVVWERPASDGGSEILGYVLEKRDKEGIRWTRCHKRLIGELRLRVTGLIENHDYEFRVSAENAAGLSEPSPPSAYQKACDPIYKPGPPNNPKVIDITRSSVFLSWSKPIYDGGCEIQGYIVEKCDVSVGEWTMCTPPTGINKTNIEVEKLLEKHEYNFRICAINKAGVGEHADVPGPIIVEEKLEAPDIDLDLELRKIINIRAGGSLRLFVPIKGRPTPEVKWGKVDGEIRDAAIIDVTSSFTSLVLDNVNRYDSGKYTLTLENSSGTKSAFVTVRVLDTPSPPVNLKVTEITKDSVSITWEPPLLDGGSKIKNYIVEKREATRKSYAAVVTNCHKNSWKIDQLQEGCSYYFRVTAENEYGIGLPAQTADPIKVAEVPQPPGKITVDDVTRNSVSLSWTKPEHDGGSKIIQYIVEMQAKHSEKWSECARVKSLQAVITNLTQGEEYLFRVVAVNEKGRSDPRSLAVPIVAKDLVIEPDVKPAFSSYSVQVGQDLKIEVPISGRPKPTITWTKDGLPLKQTTRINVTDSLDLTTLSIKETHKDDGGQYGITVANVVGQKTASIEIVTLDKPDPPKGPVKFDDVSAESITLSWNPPLYTGGCQITNYIVQKRDTTTTVWDVVSATVARTTLKVTKLKTGTEYQFRIFAENRYGQSFALESDPIVAQYPYKEPGPPGTPFATAISKDSMVIQWHEPVNNGGSPVIGYHLERKERNSILWTKVNKTIIHDTQFKAQNLEEGIEYEFRVYAENIVGVGKASKNSECYVARDPCDPPGTPEPIMVKRNEITLQWTKPVYDGGSMITGYIVEKRDLPDGRWMKASFTNVIETQFTVSGLTEDQRYEFRVIAKNAAGAISKPSDSTGPITAKDEVELPRISMDPKFRDTIVVNAGETFRLEADVHGKPLPTIEWLRGDKEIEESARCEIKNTDFKALLIVKDAIRIDGGQYILRASNVAGSKSFPVNVKVLDRPGPPEGPVQVTGVTSEKCSLTWSPPLQDGGSDISHYVVEKRETSRLAWTVVASEVVTNSLKVTKLLEGNEYVFRIMAVNKYGVGEPLESAPVLMKNPFVLPGPPKSLEVTNIAKDSMTVCWNRPDSDGGSEIIGYIVEKRDRSGIRWIKCNKRRITDLRLRVTGLTEDHEYEFRVSAENAAGVGEPSPATVYYKACDPVFKPGPPTNAHIVDTTKNSITLAWGKPIYDGGSEILGYVVEICKADEEEWQIVTPQTGLRVTRFEISKLTEHQEYKIRVCALNKVGLGEATSVPGTVKPEDKLEAPELDLDSELRKGIVVRAGGSARIHIPFKGRPTPEITWSREEGEFTDKVQIEKGVNYTQLSIDNCDRNDAGKYILKLENSSGSKSAFVTVKVLDTPGPPQNLAVKEVRKDSAFLVWEPPIIDGGAKVKNYVIDKRESTRKAYANVSSKCSKTSFKVENLTEGAIYYFRVMAENEFGVGVPVETVDAVKAAEPPSPPGKVTLTDVSQTSASLMWEKPEHDGGSRVLGYVVEMQPKGTEKWSIVAESKVCNAVVTGLSSGQEYQFRVKAYNEKGKSDPRVLGVPVIAKDLTIQPSLKLPFNTYSIQAGEDLKIEIPVIGRPRPNISWVKDGEPLKQTTRVNVEETATSTVLHIKEGNKDDFGKYTVTATNSAGTATENLSVIVLEKPGPPVGPVRFDEVSADFVVISWEPPAYTGGCQISNYIVEKRDTTTTTWHMVSATVARTTIKITKLKTGTEYQFRIFAENRYGKSAPLDSKAVIVQYPFKEPGPPGTPFVTSISKDQMLVQWHEPVNDGGTKIIGYHLEQKEKNSILWVKLNKTPIQDTKFKTTGLDEGLEYEFKVSAENIVGIGKPSKVSECFVARDPCDPPGRPEAIVITRNNVTLKWKKPAYDGGSKITGYIVEKKDLPDGRWMKASFTNVLETEFTVSGLVEDQRYEFRVIARNAAGNFSEPSDSSGAITARDEIDAPNASLDPKYKDVIVVHAGETFVLEADIRGKPIPDVVWSKDGKELEETAARMEIKSTIQKTTLVVKDCIRTDGGQYILKLSNVGGTKSIPITVKVLDRPGPPEGPLKVTGVTAEKCYLAWNPPLQDGGANISHYIIEKRETSRLSWTQVSTEVQALNYKVTKLLPGNEYIFRVMAVNKYGIGEPLESGPVTACNPYKPPGPPSTPEVSAITKDSMVVTWARPVDDGGTEIEGYILEKRDKEGVRWTKCNKKTLTDLRLRVTGLTEGHSYEFRVAAENAAGVGEPSEPSVFYRACDALYPPGPPSNPKVTDTSRSSVSLAWSKPIYDGGAPVKGYVVEVKEAAADEWTTCTPPTGLQGKQFTVTKLKENTEYNFRICAINSEGVGEPATLPGSVVAQERIEPPEIELDADLRKVVVLRASATLRLFVTIKGRPEPEVKWEKAEGILTDRAQIEVTSSFTMLVIDNVTRFDSGRYNLTLENNSGSKTAFVNVRVLDSPSAPVNLTIREVKKDSVTLSWEPPLIDGGAKITNYIVEKRETTRKAYATITNNCTKTTFRIENLQEGCSYYFRVLASNEYGIGLPAETTEPVKVSEPPLPPGRVTLVDVTRNTATIKWEKPESDGGSKITGYVVEMQTKGSEKWSTCTQVKTLEATISGLTAGEEYVFRVAAVNEKGRSDPRQLGVPVIARDIEIKPSVELPFHTFNVKAREQLKIDVPFKGRPQATVNWRKDGQTLKETTRVNVSSSKTVTSLSIKEASKEDVGTYELCVSNSAGSITVPITIIVLDRPGPPGPIRIDEVSCDSITISWNPPEYDGGCQISNYIVEKKETTSTTWHIVSQAVARTSIKIVRLTTGSEYQFRVCAENRYGKSSYSESSAVVAEYPFSPPGPPGTPKVVHATKSTMLVTWQVPVNDGGSRVIGYHLEYKERSSILWSKANKILIADTQMKVSGLDEGLMYEYRVYAENIAGIGKCSKSCEPVPARDPCDPPGQPEVTNITRKSVSLKWSKPHYDGGAKITGYIVERRELPDGRWLKCNYTNIQETYFEVTELTEDQRYEFRVFARNAADSVSEPSESTGPIIVKDDVEPPRVMMDVKFRDVIVVKAGEVLKINADIAGRPLPVISWAKDGIEIEERARTEIISTDNHTLLTVKDCIRRDTGQYVLTLKNVAGTRSVAVNCKVLDKPGPPAGPLEINGLTAEKCSLSWGRPQEDGGADIDYYIVEKRETSHLAWTICEGELQMTSCKVTKLLKGNEYIFRVTGVNKYGVGEPLESVAIKALDPFTVPSPPTSLEITSVTKESMTLCWSRPESDGGSEISGYIIERREKNSLRWVRVNKKPVYDLRVKSTGLREGCEYEYRVYAENAAGLSLPSETSPLIRAEDPVFLPSPPSKPKIVDSGKTTITIAWVKPLFDGGAPITGYTVEYKKSDDTDWKTSIQSLRGTEYTISGLTTGAEYVFRVKSVNKVGASDPSDSSDPQIAKEREEEPLFDIDSEMRKTLIVKAGASFTMTVPFRGRPVPNVLWSKPDTDLRTRAYVDTTDSRTSLTIENANRNDSGKYTLTIQNVLSAASLTLVVKVLDTPGPPTNITVQDVTKESAVLSWDVPENDGGAPVKNYHIEKREASKKAWVSVTNNCNRLSYKVTNLQEGAIYYFRVSGENEFGVGIPAETKEGVKITEKPSPPEKLGVTSISKDSVSLTWLKPEHDGGSRIVHYVVEALEKGQKNWVKCAVAKSTHHVVSGLRENSEYFFRVFAENQAGLSDPRELLLPVLIKEQLEPPEIDMKNFPSHTVYVRAGSNLKVDIPISGKPLPKVTLSRDGVPLKATMRFNTEITAENLTINLKESVTADAGRYEITAANSSGTTKAFINIVVLDRPGPPTGPVVISDITEESVTLKWEPPKYDGGSQVTNYILLKRETSTAVWTEVSATVARTMMKVMKLTTGEEYQFRIKAENRFGISDHIDSACVTVKLPYTTPGPPSTPWVTNVTRESITVGWHEPVSNGGSAVVGYHLEMKDRNSILWQKANKLVIRTTHFKVTTISAGLIYEFRVYAENAAGVGKPSHPSEPVLAIDACEPPRNVRITDISKNSVSLSWQQPAFDGGSKITGYIVERRDLPDGRWTKASFTNVTETQFIISGLTQNSQYEFRVFARNAVGSISNPSEVVGPITCIDSYGGPVIDLPLEYTEVVKYRAGTSVKLRAGISGKPAPTIEWYKDDKELQTNALVCVENTTDLASILIKDADRLNSGCYELKLRNAMGSASATIRVQILDKPGPPGGPIEFKTVTAEKITLLWRPPADDGGAKITHYIVEKRETSRVVWSMVSEHLEECIITTTKIIKGNEYIFRVRAVNKYGIGEPLESDSVVAKNAFVTPGPPGIPEVTKITKNSMTVVWSRPIADGGSDISGYFLEKRDKKSLGWFKVLKETIRDTRQKVTGLTENSDYQYRVCAVNAAGQGPFSEPSEFYKAADPIDPPGPPAKIRIADSTKSSITLGWSKPVYDGGSAVTGYVVEIRQGEEEEWTTVSTKGEVRTTEYVVSNLKPGVNYYFRVSAVNCAGQGEPIEMNEPVQAKDILEAPEIDLDVALRTSVIAKAGEDVQVLIPFKGRPPPTVTWRKDEKNLGSDARYSIENTDSSSLLTIPQVTRNDTGKYILTIENGVGEPKSSTVSVKVLDTPAACQKLQVKHVSRGTVTLLWDPPLIDGGSPIINYVIEKRDATKRTWSVVSHKCSSTSFKLIDLSEKTPFFFRVLAENEIGIGEPCETTEPVKAAEVPAPIRDLSMKDSTKTSVILSWTKPDFDGGSVITEYVVERKGKGEQTWSHAGISKTCEIEVSQLKEQSVLEFRVFAKNEKGLSDPVTIGPITVKELIITPEVDLSDIPGAQVTVRIGHNVHLELPYKGKPKPSISWLKDGLPLKESEFVRFSKTENKITLSIKNAKKEHGGKYTVILDNAVCRIAVPITVITLGPPSKPKGPIRFDEIKADSVILSWDVPEDNGGGEITCYSIEKRETSQTNWKMVCSSVARTTFKVPNLVKDAEYQFRVRAENRYGVSQPLVSSIIVAKHQFRIPGPPGKPVIYNVTSDGMSLTWDAPVYDGGSEVTGFHVEKKERNSILWQKVNTSPISGREYRATGLVEGLDYQFRVYAENSAGLSSPSDPSKFTLAVSPVDPPGTPDYIDVTRETITLKWNPPLRDGGSKIVGYSIEKRQGNERWVRCNFTDVSECQYTVTGLSPGDRYEFRIIARNAVGTISPPSQSSGIIMTRDENVPPIVEFGPEYFDGLIIKSGESLRIKALVQGRPVPRVTWFKDGVEIEKRMNMEITDVLGSTSLFVRDATRDHRGVYTVEAKNASGSAKAEIKVKVQDTPGKVVGPIRFTNITGEKMTLWWDAPLNDGCAPITHYIIEKRETSRLAWALIEDKCEAQSYTAIKLINGNEYQFRVSAVNKFGVGRPLDSDPVVAQIQYTVPDAPGIPEPSNITGNSITLTWARPESDGGSEIQQYILERREKKSTRWVKVISKRPISETRFKVTGLTEGNEYEFHVMAENAAGVGPASGISRLIKCREPVNPPGPPTVVKVTDTSKTTVSLEWSKPVFDGGMEIIGYIIEMCKADLGDWHKVNAEACVKTRYTVTDLQAGEEYKFRVSAINGAGKGDSCEVTGTIKAVDRLTAPELDIDANFKQTHVVRAGASIRLFIAYQGRPTPTAVWSKPDSNLSLRADIHTTDSFSTLTVENCNRNDAGKYTLTVENNSGSKSITFTVKVLDTPGPPGPITFKDVTRGSATLMWDAPLLDGGARIHHYVVEKREASRRSWQVISEKCTRQIFKVNDLAEGVPYYFRVSAVNEYGVGEPYEMPEPIVATEQPAPPRRLDVVDTSKSSAVLAWLKPDHDGGSRITGYLLEMRQKGSDFWVEAGHTKQLTFTVERLVEKTEYEFRVKAKNDAGYSEPREAFSSVIIKEPQIEPTADLTGITNQLITCKAGSPFTIDVPISGRPAPKVTWKLEEMRLKETDRVSITTTKDRTTLTVKDSMRGDSGRYFLTLENTAGVKTFSVTVVVIGRPGPVTGPIEVSSVSAESCVLSWGEPKDGGGTEITNYIVEKRESGTTAWQLVNSSVKRTQIKVTHLTKYMEYSFRVSSENRFGVSKPLESAPIIAEHPFVPPSAPTRPEVYHVSANAMSIRWEEPYHDGGSKIIGYWVEKKERNTILWVKENKVPCLECNYKVTGLVEGLEYQFRTYALNAAGVSKASEASRPIMAQNPVDAPGRPEVTDVTRSTVSLIWSAPAYDGGSKVVGYIIERKPVSEVGDGRWLKCNYTIVSDNFFTVTALSEGDTYEFRVLAKNAAGVISKGSESTGPVTCRDEYAPPKAELDARLHGDLVTIRAGSDLVLDAAVGGKPEPKIIWTKGDKELDLCEKVSLQYTGKRATAVIKFCDRSDSGKYTLTVKNASGTKAVSVMVKVLDSPGPCGKLTVSRVTQEKCTLAWSLPQEDGGAEITHYIVERRETSRLNWVIVEGECPTLSYVVTRLIKNNEYIFRVRAVNKYGPGVPVESEPIVARNSFTIPSPPGIPEEVGTGKEHIIIQWTKPESDGGNEISNYLVDKREKKSLRWTRVNKDYVVYDTRLKVTSLMEGCDYQFRVTAVNAAGNSEPSEASNFISCREPSYTPGPPSAPRVVDTTKHSISLAWTKPMYDGGTDIVGYVLEMQEKDTDQWYRVHTNATIRNTEFTVPDLKMGQKYSFRVAAVNVKGMSEYSESIAEIEPVERIEIPDLELADDLKKTVTIRAGASLRLMVSVSGRPPPVITWSKQGIDLASRAIIDTTESYSLLIVDKVNRYDAGKYTIEAENQSGKKSATVLVKVYDTPGPCPSVKVKEVSRDSVTITWEIPTIDGGAPVNNYIVEKREAAMRAFKTVTTKCSKTLYRISGLVEGTMYYFRVLPENIYGIGEPCETSDAVLVSEVPLVPAKLEVVDVTKSTVTLAWEKPLYDGGSRLTGYVLEACKAGTERWMKVVTLKPTVLEHTVTSLNEGEQYLFRIRAQNEKGVSEPRETVTAVTVQDLRVLPTIDLSTMPQKTIHVPAGRPVELVIPIAGRPPPAASWFFAGSKLRESERVTVETHTKVAKLTIRETTIRDTGEYTLELKNVTGTTSETIKVIILDKPGPPTGPIKIDEIDATSITISWEPPELDGGAPLSGYVVEQRDAHRPGWLPVSESVTRSTFKFTRLTEGNEYVFRVAATNRFGIGSYLQSEVIECRSSIRIPGPPETLQIFDVSRDGMTLTWYPPEDDGGSQVTGYIVERKEVRADRWVRVNKVPVTMTRYRSTGLTEGLEYEHRVTAINARGSGKPSRPSKPIVAMDPIAPPGKPQNPRVTDTTRTSVSLAWSVPEDEGGSKVTGYLIEMQKVDQHEWTKCNTTPTKIREYTLTHLPQGAEYRFRVLACNAGGPGEPAEVPGTVKVTEMLEYPDYELDERYQEGIFVRQGGVIRLTIPIKGKPFPICKWTKEGQDISKRAMIATSETHTELVIKEADRGDSGTYDLVLENKCGKKAVYIKVRVIGSPNSPEGPLEYDDIQVRSVRVSWRPPADDGGADILGYILERREVPKAAWYTIDSRVRGTSLVVKGLKENVEYHFRVSAENQFGISKPLKSEEPVTPKTPLNPPEPPSNPPEVLDVTKSSVSLSWSRPKDDGGSRVTGYYIERKETSTDKWVRHNKTQITTTMYTVTGLVPDAEYQFRIIAQNDVGLSETSPASEPVVCKDPFDKPSQPGELEILSISKDSVTLQWEKPECDGGKEILGYWVEYRQSGDSAWKKSNKERIKDKQFTIGGLLEATEYEFRVFAENETGLSRPRRTAMSIKTKLTSGEAPGIRKEMKDVTTKLGEAAQLSCQIVGRPLPDIKWYRFGKELIQSRKYKMSSDGRTHTLTVMTEEQEDEGVYTCIATNEVGEVETSSKLLLQATPQFHPGYPLKEKYYGAVGSTLRLHVMYIGRPVPAMTWFHGQKLLQNSENITIENTEHYTHLVMKNVQRKTHAGKYKVQLSNVFGTVDAILDVEIQDKPDKPTGPIVIEALLKNSAVISWKPPADDGGSWITNYVVEKCEAKEGAEWQLVSSAISVTTCRIVNLTENAGYYFRVSAQNTFGISDPLEVSSVVIIKSPFEKPGAPGKPTITAVTKDSCVVAWKPPASDGGAKIRNYYLEKREKKQNKWISVTTEEIRETVFSVKNLIEGLEYEFRVKCENLGGESEWSEISEPITPKSDVPIQAPHFKEELRNLNVRYQSNATLVCKVTGHPKPIVKWYRQGKEIIADGLKYRIQEFKGGYHQLIIASVTDDDATVYQVRATNQGGSVSGTASLEVEVPAKIHLPKTLEGMGAVHALRGEVVSIKIPFSGKPDPVITWQKGQDLIDNNGHYQVIVTRSFTSLVFPNGVERKDAGFYVVCAKNRFGIDQKTVELDVADVPDPPRGVKVSDVSRDSVNLTWTEPASDGGSKITNYIVEKCATTAERWLRVGQARETRYTVINLFGKTSYQFRVIAENKFGLSKPSEPSEPTITKEDKTRAMNYDEEVDETREVSMTKASHSSTKELYEKYMIAEDLGRGEFGIVHRCVETSSKKTYMAKFVKVKGTDQVLVKKEISILNIARHRNILHLHESFESMEELVMIFEFISGLDIFERINTSAFELNEREIVSYVHQVCEALQFLHSHNIGHFDIRPENIIYQTRRSSTIKIIEFGQARQLKPGDNFRLLFTAPEYYAPEVHQHDVVSTATDMWSLGTLVYVLLSGINPFLAETNQQIIENIMNAEYTFDEEAFKEISIEAMDFVDRLLVKERKSRMTASEALQHPWLKQKIERVSTKVIRTLKHRRYYHTLIKKDLNMVVSAARISCGGAIRSQKGVSVAKVKVASIEIGPVSGQIMHAVGEEGGHVKYVCKIENYDQSTQVTWYFGVRQLENSEKYEITYEDGVAILYVKDITKLDDGTYRCKVVNDYGEDSSYAELFVKGVREVYDYYCRRTMKKIKRRTDTMRLLERPPEFTLPLYNKTAYVGENVRFGVTITVHPEPHVTWYKSGQKIKPGDNDKKYTFESDKGLYQLTINSVTTDDDAEYTVVARNKYGEDSCKAKLTVTLHPPPTDSTLRPMFKRLLANAECQEGQSVCFEIRVSGIPPPTLKWEKDGQPLSLGPNIEIIHEGLDYYALHIRDTLPEDTGYYRVTATNTAGSTSCQAHLQVERLRYKKQEFKSKEEHERHVQKQIDKTLRMAEILSGTESVPLTQVAKEALREAAVLYKPAVSTKTVKGEFRLEIEEKKEERKLRMPYDVPEPRKYKQTTIEEDQRIKQFVPMSDMKWYKKIRDQYEMPGKLDRVVQKRPKRIRLSRWEQFYVMPLPRITDQYRPKWRIPKLSQDDLEIVRPARRRTPSPDYDFYYRPRRRSLGDISDEELLLPIDDYLAMKRTEEERLRLEEELELGFSASPPSRSPPHFELSSLRYSSPQAHVKVEETRKDFRYSTYHIPTKAEASTSYAELRERHAQAAYRQPKQRQRIMAEREDEELLRPVTTTQHLSEYKSELDFMSKEEKSRKKSRRQREVTEITEIEEEYEISKHAQRESSSSASRLLRRRRSLSPTYIELMRPVSELIRSRPQPAEEYEDDTERRSPTPERTRPRSPSPVSSERSLSRFERSARFDIFSRYESMKAALKTQKTSERKYEVLSQQPFTLDHAPRITLRMRSHRVPCGQNTRFILNVQSKPTAEVKWYHNGVELQESSKIHYTNTSGVLTLEILDCHTDDSGTYRAVCTNYKGEASDYATLDVTGGDYTTYASQRRDEEVPRSVFPELTRTEAYAVSSFKKTSEMEASSSVREVKSQMTETRESLSSYEHSASAEMKSAALEEKSLEEKSTTRKIKTTLAARILTKPRSMTVYEGESARFSCDTDGEPVPTVTWLRKGQVLSTSARHQVTTTKYKSTFEISSVQASDEGNYSVVVENSEGKQEAEFTLTIQKARVTEKAVTSPPRVKSPEPRVKSPEAVKSPKRVKSPEPSHPKAVSPTETKPTPTEKVQHLPVSAPPKITQFLKAEASKEIAKLTCVVESSVLRAKEVTWYKDGKKLKENGHFQFHYSADGTYELKINNLTESDQGEYVCEISGEGGTSKTNLQFMGQAFKSIHEKVSKISETKKSDQKTTESTVTRKTEPKAPEPISSKPVIVTGLQDTTVSSDSVAKFAVKATGEPRPTAIWTKDGKAITQGGKYKLSEDKGGFFLEIHKTDTSDSGLYTCTVKNSAGSVSSSCKLTIKAIKDTEAQKVSTQKTSEITPQKKAVVQEEISQKALRSEEIKMSEAKSQEKLALKEEASKVLISEEVKKSAATSLEKSIVHEEITKTSQASEEVRTHAEIKAFSTQMSINEGQRLVLKANIAGATDVKWVLNGVELTNSEEYRYGVSGSDQTLTIKQASHRDEGILTCISKTKEGIVKCQYDLTLSKELSDAPAFISQPRSQNINEGQNVLFTCEISGEPSPEIEWFKNNLPISISSNVSISRSRNVYSLEIRNASVSDSGKYTIKAKNFRGQCSATASLMVLPLVEEPSREVVLRTSGDTSLQGSFSSQSVQMSASKQEASFSSFSSSSASSMTEMKFASMSAQSMSSMQESFVEMSSSSFMGISNMTQLESSTSKMLKAGIRGIPPKIEALPSDISIDEGKVLTVACAFTGEPTPEVTWSCGGRKIHSQEQGRFHIENTDDLTTLIIMDVQKQDGGLYTLSLGNEFGSDSATVNIHIRSI

SEQ ID NO: 7369 - protein, 26926 aa, Homo sapiens
MTTQAPTFTQPLQSVVVLEGSTATFEAHISGFPVPEVSWFRDGQVISTSTLPGVQISFSDGRAKLTIPAVTKANSGRYSLKATNGSGQATSTAELLVKAETAPPNFVQRLQSMTVRQGSQVRLQVRVTGIPTPVVKFYRDGAEIQSSLDFQISQEGDLYSLLIAEAYPEDSGTYSVNATNSVGRATSTAELLVQGEEEVPAKKTKTIVSTAQISESRQTRIEKKIEAHFDARSIATVEMVIDGAAGQQLPHKTPPRIPPKPKSRSPTPPSIAAKAQLARQQSPSPIRHSPSPVRHVRAPTPSPVRSVSPAARISTSPIRSVRSPLLMRKTQASTVATGPEVPPPWKQEGYVASSSEAEMRETTLTTSTQIRTEERWEGRYGVQEQVTISGAAGAAASVSASASYAAEAVATGAKEVKQDADKSAAVATVVAAVDMARVREPVISAVEQTAQRTTTTAVHIQPAQEQVRKEAEKTAVTKVVVAADKAKEQELKSRTKEVITTKQEQMHVTHEQIRKETEKTFVPKVVISAAKAKEQETRISEEITKKQKQVTQEAIMKETRKTVVPKVIVATPKVKEQDLVSRGREGITTKREQVQITQEKMRKEAEKTALSTIAVATAKAKEQETILRTRETMATRQEQIQVTHGKVDVGKKAEAVATVVAAVDQARVREPREPGHLEESYAQQTTLEYGYKERISAAKVAEPPQRPASEPHVVPKAVKPRVIQAPSETHIKTTDQKGMHISSQIKKTTDLTTERLVHVDKRPRTASPHFTVSKISVPKTEHGYEASIAGSAIATLQKELSATSSAQKITKSVKAPTVKPSETRVRAEPTPLPQFPFADTPDTYKSEAGVEVKKEVGVSITGTTVREERFEVLHGREAKVTETARVPAPVEIPVTPPTLVSGLKNVTVIEGESVTLECHISGYPSPTVTWYREDYQIESSIDFQITFQSGIARLMIREAFAEDSGRFTCSAVNEAGTVSTSCYLAVQVSEEFEKETTAVTEKFTTEEKRFVESRDVVMTDTSLTEEQAGPGEPAAPYFITKPVVQKLVEGGSVVFGCQVGGNPKPHVYWKKSGVPLTTGYRYKVSYNKQTGECKLVISMTFADDAGEYTIVVRNKHGETSASASLLEEADYELLMKSQQEMLYQTQVTAFVQEPKVGETAPGFVYSEYEKEYEKEQALIRKKMAKDTVVVRTYVEDQEFHISSFEERLIKEIEYRIIKTTLEELLEEDGEEKMAVDISESEAVESGFDSRIKNYRILEGMGVTFHCKMSGYPLPKIAWYKDGKRIKHGERYQMDFLQDGRASLRIPVVLPEDEGIYTAFASNIKGNAICSGKLYVEPAAPLGAPTYIPTLEPVSRIRSLSPRSVSRSPIRMSPARMSPARMSPARMSPARMSPGRRLEETDESQLERLYKPVFVLKPVSFKCLEGQTARFDLKVVGRPMPETFWFHDGQQIVNDYTHKVVIKEDGTQSLIIVPATPSDSGEWTVVAQNRAGRSSISVILTVEAVEHQVKPMFVEKLKNVNIKEGSRLEMKVRATGNPNPDIVWLKNSDIIVPHKYPKIRIEGTKGEAALKIDSTVSQDSAWYTATAINKAGRDTTRCKVNVEVEFAEPEPERKLIIPRGTYRAKEIAAPELEPLHLRYGQEQWEEGDLYDKEKQQKPFFKKKLTSLRLKRFGPAHFECRLTPIGDPTMVVEWLHDGKPLEAANRLRMINEFGYCSLDYGVAYSRDSGIITCRATNKYGTDHTSATLIVKDEKSLVEESQLPEGRKGLQRIEELERMAHEGALTGVTTDQKEKQKPDIVLYPEPVRVLEGETARFRCRVTGYPQPKVNWYLNGQLIRKSKRFRVRYDGIHYLDIVDCKSYDTGEVKVTAENPEGVIEHKVKLEIQQREDFRSVLRRAPEPRPEFHVHEPGKLQFEVQKVDRPVDTTETKEVVKLKRAERITHEKVPEESEELRSKFKRRTEEGYYEAITAVELKSRKKDESYEELLRKTKDELLHWTKELTEEEKKALAEEGKITIPTFKPDKIELSPSMEAPKIFERIQSQTVGQGSDAHFRVRVVGKPDPECEWYKNGVKIERSDRIYWYWPEDNVCELVIRDVTAEDSASIMVKAINIAGETSSHAFLLVQAKQLITFTQELQDVVAKEKDTMATFECETSEPFVKVKWYKDGMEVHEGDKYRMHSDRKVHFLSILTIDTSDAEDYSCVLVEDENVKTTAKLIVEGAVVEFVKELQDIEVPESYSGELECIVSPENIEGKWYHNDVELKSNGKYTITSRRGRQNLTVKDVTKEDQGEYSFVIDGKKTTCKLKMKPRPIAILQGLSDQKVCEGDIVQLEVKVSLESVEGVWMKDGQEVQPSDRVHIVIDKQSHMLLIEDMTKEDAGNYSFTIPALGLSTSGRVSVYSVDVITPLKDVNVIEGTKAVLECKVSVPDVTSVKWYLNDEQIKPDDRVQAIVKGTKQRLVINRTHASDEGPYKLIVGRVETNCNLSVEKIKIIRGLRDLTCTETQNVVFEVELSHSGIDVLWNFKDKEIKPSSKYKIEAHGKIYKLTVLNMMKDDEGKYTFYAGENMTSGKLTVAGGAISKPLTDQTVAESQEAVFECEVANPDSKGEWLRDGKHLPLTNNIRSESDGHKRRLIIAATKLDDIGEYTYKVATSKTSAKLKVEAVKIKKTLKNLTVTETQDAVFTVELTHPNVKGVQWIKNGVVLESNEKYAISVKGTIYSLRIKNCAIVDESVYGFRLGRLGASARLHVETVKIIKKPKDVTALENATVAFEVSVSHDTVPVKWFHKSVEIKPSDKHRLVSERKVHKLMLQNISPSDAGEYTAVVGQLECKAKLFVETLHITKTMKNIEVPETKTASFECEVSHFNVPSMWLKNGVEIEMSEKFKIVVQGKLHQLIIMNTSTEDSAEYTFVCGNDQVSATLTVTPIMITSMLKDINAEEKDTITFEVTVNYEGISYKWLKNGVEIKSTDKCQMRTKKLTHSLNIRNVHFGDAADYTFVAGKATSTATLYVEARHIEFRKHIKDIKVLEKKRAMFECEVSEPDITVQWMKDDQELQITDRIKIQKEKYVHRLLIPSTRMSDAGKYTVVAGGNVSTAKLFVEGRDVRIRSIKKEVQVIEKQRAVVEFEVNEDDVDAHWYKDGIEINFQVQERHKYVVERRIHRMFISETRQSDAGEYTFVAGRNRSSVTLYVNAPEPPQVLQELQPVTVQSGKPARFCAVISGRPQPKISWYKEEQLLSTGFKCKFLHDGQEYTLLLIEAFPEDAAVYTCEAKNDYGVATTSASLSVEVPEVVSPDQEMPVYPPAIITPLQDTVTSEGQPARFQCRVSGTDLKVSWYSKDKKIKPSRFFRMTQFEDTYQLEIAEAYPEDEGTYTFVASNAVGQVSSTANLSLEAPESILHERIEQEIEMEMKEFSSSFLSAEEEGLHSAELQLSKINETLELLSESPVYPTKFDSEKEGTGPIFIKEVSNADISMGDVATLSVTVIGIPKPKIQWFFNGVLLTPSADYKFVFDGDDHSLIILFTKLEDEGEYTCMASNDYGKTICSAYLKINSKGEGHKDTETESAVAKSLEKLGGPCPPHFLKELKPIRCAQGLPAIFEYTVVGEPAPTVTWFKENKQLCTSVYYTIIHNPNGSGTFIVNDPQREDSGLYICKAENMLGESTCAAELLVLLEDTDMTDTPCKAKSTPEAPEDFPQTPLKGPAVEALDSEQEIATFVKDTILKAALITEENQQLSYEHIAKANELSSQLPLGAQELQSILEQDKLTPESTREFLCINGSIHFQPLKEPSPNLQLQIVQSQKTFSKEGILMPEEPETQAVLSDTEKIFPSAMSIEQINSLTVEPLKTLLAEPEGNYPQSSIEPPMHSYLTSVAEEVLSPKEKTVSDTNREQRVTLQKQEAQSALILSQSLAEGHVESLQSPDVMISQVNYEPLVPSEHSCTEGGKILIESANPLENAGQDSAVRIEEGKSLRFPLALEEKQVLLKEEHSDNVVMPPDQIIESKREPVAIKKVQEVQGRDLLSKESLLSGIPEEQRLNLKIQICRALQAAVASEQPGLFSEWLRNIEKVEVEAVNITQEPRHIMCMYLVTSAKSVTEEVTIIIEDVDPQMANLKMELRDALCAIIYEEIDILTAEGPRIQQGAKTSLQEEMDSFSGSQKVEPITEPEVESKYLISTEEVSYFNVQSRVKYLDATPVTKGVASAVVSDEKQDESLKPSEEKEESSSESGTEEVATVKIQEAEGGLIKEDGPMIHTPLVDTVSEEGDIVHLTTSITNAKEVNWYFENKLVPSDEKFKCLQDQNTYTLVIDKVNTEDHQGEYVCEALNDSGKTATSAKLTVVKRAAPVIKRKIEPLEVALGHLAKFTCEIQSAPNVRFQWFKAGREIYESDKCSIRSSKYISSLEILRTQVVDCGEYTCKASNEYGSVSCTATLTVTVPGGEKKVRKLLPERKPEPKEEVVLKSVLRKRPEEEEPKVEPKKLEKVKKPAVPEPPPPKPVEEVEVPTVTKRERKIPEPTKVPEIKPAIPLPAPEPKPKPEAEVKTIKPPPVEPEPTPIAAPVTVPVVGKKAEAKAPKEEAAKPKGPIKGVPKKTPSPIEAERRKLRPGSGGEKPPDEAPFTYQLKAVPLKFVKEIKDIILTESEFVGSSAIFECLVSPSTAITTWMKDGSNIRESPKHRFIADGKDRKLHIIDVQLSDAGEYTCVLRLGNKEKTSTAKLVVEELPVRFVKTLEEEVTVVKGQPLYLSCELNKERDVVWRKDGKIVVEKPGRIVPGVIGLMRALTINDADDTDAGTYTVTVENANNLECSSCVKVVEVIRDWLVKPIRDQHVKPKGTAIFACDIAKDTPNIKWFKGYDEIPAEPNDKTEILRDGNHLYLKIKNAMPEDIAEYAVEIEGKRYPAKLTLGEREVELLKPIEDVTIYEKESASFDAEISEADIPGQWKLKGELLRPSPTCEIKAEGGKRFLTLHKVKLDQAGEVLYQALNAITTAILTVKEIELDFAVPLKDVTVPERRQARFECVLTREANVIWSKGPDIIKSSDKFDIIADGKKHILVINDSQFDDEGVYTAEVEGKKTSARLFVTGIRLKFMSPLEDQTVKEGETATFVCELSHEKMHVVWFKNDAKLHTSRTVLISSEGKTHKLEMKEVTLDDISQIKAQVKELSSTAQLKVLEADPYFTVKLHDKTAVEKDEITLKCEVSKDVPVKWFKDGEEIVPSPKYSIKADGLRRILKIKKADLKDKGEYVCDCGTDKTKANVTVEARLIKVEKPLYGVEVFVGETAHFEIELSEPDVHGQWKLKGQPLTASPDCEIIEDGKKHILILHNCQLGMTGEVSFQAANAKSAANLKVKELPLIFITPLSDVKVFEKDEAKFECEVSREPKTFRWLKGTQEITGDDRFELIKDGTKHSMVIKSAAFEDEAKYMFEAEDKHTSGKLIIEGIRLKFLTPLKDVTAKEKESAVFTVELSHDNIRVKWFKNDQRLHTTRSVSMQDEGKTHSITFKDLSIDDTSQIRVEAMGMSSEAKLTVLEGDPYFTGKLQDYTGVEKDEVILQCEISKADAPVKWFKDGKEIKPSKNAVIKADGKKRMLILKKALKSDIGQYTCDCGTDKTSGKLDIEDREIKLVRPLHSVEVMETETARFETEISEDDIHANWKLKGEALLQTPDCEIKEEGKIHSLVLHNCRLDQTGGVDFQAANVKSSAHLRVKPRVIGLLRPLKDVTVTAGETATFDCELSYEDIPVEWYLKGKKLEPSDKVVPRSEGKVHTLTLRDVKLEDAGEVQLTAKDFKTHANLFVKEPPVEFTKPLEDQTVEEGATAVLECEVSRENAKVKWFKNGTEILKSKKYEIVADGRVRKLVIHDCTPEDIKTYTCDAKDFKTSCNLNVVPPHVEFLRPLTDLQVREKEMARFECELSRENAKVKWFKDGAEIKKGKKYDIISKGAVRILVINKCLLDDEAEYSCEVRTARTSGMLTVLEEEAVFTKNLANIEVSETDTIKLVCEVSKPGAEVIWYKGDEEIIETGRYEILTEGRKRILVIQNAHLEDAGNYNCRLPSSRTDGKVKVHELAAEFISKPQNLEILEGEKAEFVCSISKESFPVQWKRDDKTLESGDKYDVIADGKKRVLVVKDATLQDMGTYVVMVGAARAAAHLTVIEKLRIVVPLKDTRVKEQQEVVFNCEVNTEGAKAKWFRNEEAIFDSSKYIILQKDLVYTLRIRDAHLDDQANYNVSLTNHRGENVKSAANLIVEEEDLRIVEPLKDIETMEKKSVTFWCKVNRLNVTLKWTKNGEEVPFDNRVSYRVDKYKHMLTIKDCGFPDEGEYIVTAGQDKSVAELLIIEAPTEFVEHLEDQTVTEFDDAVFSCQLSREKANVKWYRNGREIKEGKKYKFEKDGSIHRLIIKDCRLDDECEYACGVEDRKSRARLFVEEIPVEIIRPPQDILEAPGADVVFLAELNKDKVEVQWLRNNMVVVQGDKHQMMSEGKIHRLQICDIKPRDQGEYRFIAKDKEARAKLELAAAPKIKTADQDLVVDVGKPLTMVVPYDAYPKAEAEWFKENEPLSTKTIDTTAEQTSFRILEAKKGDKGRYKIVLQNKHGKAEGFINLKVIDVPGPVRNLEVTETFDGEVSLAWEEPLTDGGSKIIGYVVERRDIKRKTWVLATDRAESCEFTVTGLQKGGVEYLFRVSARNRVGTGEPVETDNPVEARSKYDVPGPPLNVTITDVNRFGVSLTWEPPEYDGGAEITNYVIELRDKTSIRWDTAMTVRAEDLSATVTDVVEGQEYSFRVRAQNRIGVGKPSAATPFVKVADPIERPSPPVNLTSSDQTQSSVQLKWEPPLKDGGSPILGYIIERCEEGKDNWIRCNMKLVPELTYKVTGLEKGNKYLYRVSAENKAGVSDPSEILGPLTADDAFVEPTMDLSAFKDGLEVIVPNPITILVPSTGYPRPTATWCFGDKVLETGDRVKMKTLSAYAELVISPSERSDKGIYTLKLENRVKTISGEIDVNVIARPSAPKELKFGDITKDSVHLTWEPPDDDGGSPLTGYVVEKREVSRKTWTKVMDFVTDLEFTVPDLVQGKEYLFKVCARNKCGPGEPAYVDEPVNMSTPATVPDPPENVKWRDRTANSIFLTWDPPKNDGGSRIKGYIVERCPRGSDKWVACGEPVAETKMEVTGLEEGKWYAYRVKALNRQGASKPSRPTEEIQAVDTQEAPEIFLDVKLLAGLTVKAGTKIELPATVTGKPEPKITWTKADMILKQDKRITIENVPKKSTVTIVDSKRSDTGTYIIEAVNVCGRATAVVEVNVLDKPGPPAAFDITDVTNESCLLTWNPPRDDGGSKITNYVVERRATDSEVWHKLSSTVKDTNFKATKLIPNKEYIFRVAAENMYGVGEPVQASPITAKYQFDPPGPPTRLEPSDITKDAVTLTWCEPDDDGGSPITGYWVERLDPDTDKWVRCNKMPVKDTTYRVKGLTNKKKYRFRVLAENLAGPGKPSKSTEPILIKDPIDPPWPPGKPTVKDVGKTSVRLNWTKPEHDGGAKIESYVIEMLKTGTDEWVRVAEGVPTTQHLLPGLMEGQEYSFRVRAVNKAGESEPSEPSDPVLCREKLYPPSPPRWLEVINITKNTADLKWTVPEKDGGSPITNYIVEKRDVRRKGWQTVDTTVKDTKCTVTPLTEGSLYVFRVAAENAIGQSDYTEIEDSVLAKDTFTTPGPPYALAVVDVTKRHVDLKWEPPKNDGGRPIQRYVIEKKERLGTRWVKAGKTAGPDCNFRVTDVIEGTEVQFQVRAENEAGVGHPSEPTEILSIEDPTSPPSPPLDLHVTDAGRKHIAIAWKPPEKNGGSPIIGYHVEMCPVGTEKWMRVNSRPIKDLKFKVEEGVVPDKEYVLRVRAVNAIGVSEPSEISENVVAKDPDCKPTIDLETHDIIVIEGEKLSIPVPFRAVPVPTVSWHKDGKEVKASDRLTMKNDHISAHLEVPKSVRADAGIYTITLENKLGSATASINVKVIGLPGPCKDIKASDITKSSCKLTWEPPEFDGGTPILHYVLERREAGRRTYIPVMSGENKLSWTVKDLIPNGEYFFRVKAVNKVGGGEYIELKNPVIAQDPKQPPDPPVDVEVHNPTAEAMTITWKPPLYDGGSKIMGYIIEKIAKGEERWKRCNEHLVPILTYTAKGLEEGKEYQFRVRAENAAGISEPSRATPPTKAVDPIDAPKVILRTSLEVKRGDEIALDASISGSPYPTITWIKDENVIVPEEIKKRAAPLVRRRKGEVQEEEPFVLPLTQRLSIDNSKKGESQLRVRDSLRPDHGLYMIKVENDHGIAKAPCTVSVLDTPGPPINFVFEDIRKTSVLCKWEPPLDDGGSEIINYTLEKKDKTKPDSEWIVVTSTLRHCKYSVTKLIEGKEYLFRVRAENRFGPGPPCVSKPLVAKDPFGPPDAPDKPIVEDVTSNSMLVKWNEPKDNGSPILGYWLEKREVNSTHWSRVNKSLLNALKANVDGLLEGLTYVFRVCAENAAGPGKFSPPSDPKTAHDPISPPGPPIPRVTDTSSTTIELEWEPPAFNGGGEIVGYFVDKQLVGTNEWSRCTEKMIKVRQYTVKEIREGADYKLRVSAVNAAGEGPPGETQPVTVAEPQEPPAVELDVSVKGGIQIMAGKTLRIPAVVTGRPVPTKVWTKEEGELDKDRVVIDNVGTKSELIIKDALRKDHGRYVITATNSCGSKFAAARVEVFDVPGPVLDLKPVVTNRKMCLLNWSDPEDDGGSEITGFIIERKDAKMHTWRQPIETERSKCDITGLLEGQEYKFRVIAKNKFGCGPPVEIGPILAVDPLGPPTSPERLTYTERTKSTITLDWKEPRSNGGSPIQGYIIEKRRHDKPDFERVNKRLCPTTSFLVENLDEHQMYEFRVKAVNEIGESEPSLPLNVVIQDDEVPPTIKLRLSVRGDTIKVKAGEPVHIPADVTGLPMPKIEWSKNETVIEKPTDALQITKEEVSRSEAKTELSIPKAVREDKGTYTVTASNRLGSVFRNVHVEVYDRPSPPRNLAVTDIKAESCYLTWDAPLDNGGSEITHYVIDKRDASRKKAEWEEVTNTAVEKRYGIWKLIPNGQYEFRVRAVNKYGISDECKSDKVVIQDPYRLPGPPGKPKVLARTKGSMLVSWTPPLDNGGSPITGYWLEKREEGSPYWSRVSRAPITKVGLKGVEFNVPRLLEGVKYQFRAMAINAAGIGPPSEPSDPEVAGDPIFPPGPPSCPEVKDKTKSSISLGWKPPAKDGGSPIKGYIVEMQEEGTTDWKRVNEPDKLITTCECVVPNLKELRKYRFRVKAVNEAGESEPSDTTGEIPATDIQEEPEVFIDIGAQDCLVCKAGSQIRIPAVIKGRPTPKSSWEFDGKAKKAMKDGVHDIPEDAQLETAENSSVIIIPECKRSHTGKYSITAKNKAGQKTANCRVKVMDVPGPPKDLKVSDITRGSCRLSWKMPDDDGGDRIKGYVIEKRTIDGKAWTKVNPDCGSTTFVVPDLLSEQQYFFRVRAENRFGIGPPVETIQRTTARDPIYPPDPPIKLKIGLITKNTVHLSWKPPKNDGGSPVTHYIVECLAWDPTGTKKEAWRQCNKRDVEELQFTVEDLVEGGEYEFRVKAVNAAGVSKPSATVGPVTVKDQTCPPSIDLKEFMEVEEGTNVNIVAKIKGVPFPTLTWFKAPPKKPDNKEPVLYDTHVNKLVVDDTCTLVIPQSRRSDTGLYTITAVNNLGTASKEMRLNVLGRPGPPVGPIKFESVSADQMTLSWFPPKDDGGSKITNYVIEKREANRKTWVHVSSEPKECTYTIPKLLEGHEYVFRIMAQNKYGIGEPLDSEPETARNLFSVPGAPDKPTVSSVTRNSMTVNWEEPEYDGGSPVTGYWLEMKDTTSKRWKRVNRDPIKAMTLGVSYKVTGLIEGSDYQFRVYAINAAGVGPASLPSDPATARDPIAPPGPPFPKVTDWTKSSADLEWSPPLKDGGSKVTGYIVEYKEEGKEEWEKGKDKEVRGTKLVVTGLKEGAFYKFRVRAVNIAGIGEPGEVTDVIEMKDRLVSPDLQLDASVRDRIVVHAGGVIRIIAYVSGKPPPTVTWNMNERTLPQEATIETTAISSSMVIKNCQRSHQGVYSLLAKNEAGERKKTIIVDVLDVPGPVGTPFLAHNLTNESCKLTWFSPEDDGGSPITNYVIEKRESDRRAWTPVTYTVTRQNATVQGLIQGKAYFFRIAAENSIGMGPFVETSEALVIREPITVPERPEDLEVKEVTKNTVTLTWNPPKYDGGSEIINYVLESRLIGTEKFHKVTNDNLLSRKYTVKGLKEGDTYEYRVSAVNIVGQGKPSFCTKPITCKDELAPPTLHLDFRDKLTIRVGEAFALTGRYSGKPKPKVSWFKDEADVLEDDRTHIKTTPATLALEKIKAKRSDSGKYCVVVENSTGSRKGFCQVNVVDRPGPPVGPVSFDEVTKDYMVISWKPPLDDGGSKITNYIIEKKEVGKDVWMPVTSASAKTTCKVSKLLEGKDYIFRIHAENLYGISDPLVSDSMKAKDRFRVPDAPDQPIVTEVTKDSALVTWNKPHDGGKPITNYILEKRETMSKRWARVTKDPIHPYTKFRVPDLLEGCQYEFRVSAENEIGIGDPSPPSKPVFAKDPIAKPSPPVNPEAIDTTCNSVDLTWQPPRHDGGSKILGYIVEYQKVGDEEWRRANHTPESCPETKYKVTGLRDGQTYKFRVLAVNAAGESDPAHVPEPVLVKDRLEPPELILDANMAREQHIKVGDTLRLSAIIKGVPFPKVTWKKEDRDAPTKARIDVTPVGSKLEIRNAAHEDGGIYSLTVENPAGSKTVSVKVLVLDKPGPPRDLEVSEIRKDSCYLTWKEPLDDGGSVITNYVVERRDVASAQWSPLSATSKKKSHFAKHLNEGNQYLFRVAAENQYGRGPFVETPKPIKALDPLHPPGPPKDLHHVDVDKTEVSLVWNKPDRDGGSPITGYLVEYQEEGTQDWIKFKTVTNLECVVTGLQQGKTYRFRVKAENIVGLGLPDTTIPIECQEKLVPPSVELDVKLIEGLVVKAGTTVRFPAIIRGVPVPTAKWTTDGSEIKTDEHYTVETDNFSSVLTIKNCLRRDTGEYQITVSNAAGSKTVAVHLTVLDVPGPPTGPINILDVTPEHMTISWQPPKDDGGSPVINYIVEKQDTRKDTWGVVSSGSSKTKLKIPHLQKGCEYVFRVRAENKIGVGPPLDSTPTVAKHKFSPPSPPGKPVVTDITENAATVSWTLPKSDGGSPITGYYMERREVTGKWVRVNKTPIADLKFRVTGLYEGNTYEFRVFAENLAGLSKPSPSSDPIKACRPIKPPGPPINPKLKDKSRETADLVWTKPLSDGGSPILGYVVECQKPGTAQWNRINKDELIRQCAFRVPGLIEGNEYRFRIKAANIVGEGEPRELAESVIAKDILHPPEVELDVTCRDVITVRVGQTIRILARVKGRPEPDITWTKEGKVLVREKRVDLIQDLPRVELQIKEAVRADHGKYIISAKNSSGHAQGSAIVNVLDRPGPCQNLKVTNVTKENCTISWENPLDNGGSEITNFIVEYRKPNQKGWSIVASDVTKRLIKANLLANNEYYFRVCAENKVGVGPTIETKTPILAINPIDRPGEPENLHIADKGKTFVYLKWRRPDYDGGSPNLSYHVERRLKGSDDWERVHKGSIKETHYMVDRCVENQIYEFRVQTKNEGGESDWVKTEEVVVKEDLQKPVLDLKLSGVLTVKAGDTIRLEAGVRGKPFPEVAWTKDKDATDLTRSPRVKIDTRADSSKFSLTKAKRSDGGKYVVTATNTAGSFVAYATVNVLDKPGPVRNLKIVDVSSDRCTVCWDPPEDDGGCEIQNYILEKCETKRMVWSTYSATVLTPGTTVTRLIEGNEYIFRVRAENKIGTGPPTESKPVIAKTKYDKPGRPDPPEVTKVSKEEMTVVWNPPEYDGGKSITGYFLEKKEKHSTRWVPVNKSAIPERRMKVQNLLPDHEYQFRVKAENEIGIGEPSLPSRPVVAKDPIEPPGPPTNFRVVDTTKHSITLGWGKPVYDGGAPIIGYVVEMRPKIADASPDEGWKRCNAAAQLVRKEFTVTSLDENQEYEFRVCAQNQVGIGRPAELKEAIKPKEILEPPEIDLDASMRKLVIVRAGCPIRLFAIVRGRPAPKVTWRKVGIDNVVRKGQVDLVDTMAFLVIPNSTRDDSGKYSLTLVNPAGEKAVFVNVRVLDTPGPVSDLKVSDVTKTSCHVSWAPPENDGGSQVTHYIVEKREADRKTWSTVTPEVKKTSFHVTNLVPGNEYYFRVTAVNEYGPGVPTDVPKPVLASDPLSEPDPPRKLEVTEMTKNSATLAWLPPLRDGGAKIDGYITSYREEEQPADRWTEYSVVKDLSLVVTGLKEGKKYKFRVAARNAVGVSLPREAEGVYEAKEQLLPPKILMPEQITIKAGKKLRIEAHVYGKPHPTCKWKKGEDEVVTSSHLAVHKADSSSILIIKDVTRKDSGYYSLTAENSSGTDTQKIKVVVMDAPGPPQPPFDISDIDADACSLSWHIPLEDGGSNITNYIVEKCDVSRGDWVTALASVTKTSCRVGKLIPGQEYIFRVRAENRFGISEPLTSPKMVAQFPFGVPSEPKNARVTKVNKDCIFVAWDRPDSDGGSPIIGYLIERKERNSLLWVKANDTLVRSTEYPCAGLVEGLEYSFRIYALNKAGSSPPSKPTEYVTARMPVDPPGKPEVIDVTKSTVSLIWARPKHDGGSKIIGYFVEACKLPGDKWVRCNTAPHQIPQEEYTATGLEEKAQYQFRAIARTAVNISPPSEPSDPVTILAENVPPRIDLSVAMKSLLTVKAGTNVCLDATVFGKPMPTVSWKKDGTLLKPAEGIKMAMQRNLCTLELFSVNRKDSGDYTITAENSSGSKSATIKLKVLDKPGPPASVKINKMYSDRAMLSWEPPLEDGGSEITNYIVDKRETSRPNWAQVSATVPITSCSVEKLIEGHEYQFRICAENKYGVGDPVFTEPAIAKNPYDPPGRCDPPVISNITKDHMTVSWKPPADDGGSPITGYLLEKRETQAVNWTKVNRKPIIERTLKATGLQEGTEYEFRVTAINKAGPGKPSDASKAAYARDPQYPPGPPAFPKVYDTTRSSVSLSWGKPAYDGGSPIIGYLVEVKRADSDNWVRCNLPQNLQKTRFEVTGLMEDTQYQFRVYAVNKIGYSDPSDVPDKHYPKDILIPPEGELDADLRKTLILRAGVTMRLYVPVKGRPPPKITWSKPNVNLRDRIGLDIKSTDFDTFLRCENVNKYDAGKYILTLENSCGKKEYTIVVKVLDTPGPPVNVTVKEISKDSAYVTWEPPIIDGGSPIINYVVQKRDAERKSWSTVTTECSKTSFRVANLEEGKSYFFRVFAENEYGIGDPGETRDAVKASQTPGPVVDLKVRSVSKSSCSIGWKKPHSDGGSRIIGYVVDFLTEENKWQRVMKSLSLQYSAKDLTEGKEYTFRVSAENENGEGTPSEITVVARDDVVAPDLDLKGLPDLCYLAKENSNFRLKIPIKGKPAPSVSWKKGEDPLATDTRVSVESSAVNTTLIVYDCQKSDAGKYTITLKNVAGTKEGTISIKVVGKPGIPTGPIKFDEVTAEAMTLKWAPPKDDGGSEITNYILEKRDSVNNKWVTCASAVQKTTFRVTRLHEGMEYTFRVSAENKYGVGEGLKSEPIVARHPFDVPDAPPPPNIVDVRHDSVSLTWTDPKKTGGSPITGYHLEFKERNSLLWKRANKTPIRMRDFKVTGLTEGLEYEFRVMAINLAGVGKPSLPSEPVVALDPIDPPGKPEVINITRNSVTLIWTEPKYDGGHKLTGYIVEKRDLPSKSWMKANHVNVPECAFTVTDLVEGGKYEFRIRAKNTAGAISAPSESTETIICKDEYEAPTIVLDPTIKDGLTIKAGDTIVLNAISILGKPLPKSSWSKAGKDIRPSDITQITSTPTSSMLTIKYATRKDAGEYTITATNPFGTKVEHVKVTVLDVPGPPGPVEISNVSAEKATLTWTPPLEDGGSPIKSYILEKRETSRLLWTVVSEDIQSCRHVATKLIQGNEYIFRVSAVNHYGKGEPVQSEPVKMVDRFGPPGPPEKPEVSNVTKNTATVSWKRPVDDGGSEITGYHVERREKKSLRWVRAIKTPVSDLRCKVTGLQEGSTYEFRVSAENRAGIGPPSEASDSVLMKDAAYPPGPPSNPHVTDTTKKSASLAWGKPHYDGGLEITGYVVEHQKVGDEAWIKDTTGTALRITQFVVPDLQTKEKYNFRISAINDAGVGEPAVIPDVEIVEREMAPDFELDAELRRTLVVRAGLSIRIFVPIKGRPAPEVTWTKDNINLKNRANIENTESFTLLIIPECNRYDTGKFVMTIENPAGKKSGFVNVRVLDTPGPVLNLRPTDITKDSVTLHWDLPLIDGGSRITNYIVEKREATRKSYSTATTKCHKCTYKVTGLSEGCEYFFRVMAENEYGIGEPTETTEPVKASEAPSPPDSLNIMDITKSTVSLAWPKPKHDGGSKITGYVIEAQRKGSDQWTHITTVKGLECVVRNLTEGEEYTFQVMAVNSAGRSAPRESRPVIVKEQTMLPELDLRGIYQKLVIAKAGDNIKVEIPVLGRPKPTVTWKKGDQILKQTQRVNFETTATSTILNINECVRSDSGPYPLTARNIVGEVGDVITIQVHDIPGPPTGPIKFDEVSSDFVTFSWDPPENDGGVPISNYVVEMRQTDSTTWVELATTVIRTTYKATRLTTGLEYQFRVKAQNRYGVGPGITSACIVANYPFKVPGPPGTPQVTAVTKDSMTISWHEPLSDGGSPILGYHVERKERNGILWQTVSKALVPGNIFKSSGLTDGIAYEFRVIAENMAGKSKPSKPSEPMLALDPIDPPGKPVPLNITRHTVTLKWAKPEYTGGFKITSYIVEKRDLPNGRWLKANFSNILENEFTVSGLTEDAAYEFRVIAKNAAGAISPPSEPSDAITCRDDVEAPKIKVDVKFKDTVILKAGEAFRLEADVSGRPPPTMEWSKDGKELEGTAKLEIKIADFSTNLVNKDSTRRDSGAYTLTATNPGGFAKHIFNVKVLDRPGPPEGPLAVTEVTSEKCVLSWFPPLDDGGAKIDHYIVQKRETSRLAWTNVASEVQVTKLKVTKLLKGNEYIFRVMAVNKYGVGEPLESEPVLAVNPYGPPDPPKNPEVTTITKDSMVVCWGHPDSDGGSEIINYIVERRDKAGQRWIKCNKKTLTDLRYKVSGLTEGHEYEFRIMAENAAGISAPSPTSPFYKACDTVFKPGPPGNPRVLDTSRSSISIAWNKPIYDGGSEITGYMVEIALPEEDEWQIVTPPAGLKATSYTITGLTENQEYKIRIYAMNSEGLGEPALVPGTPKAEDRMLPPEIELDADLRKVVTIRACCTLRLFVPIKGRPAPEVKWARDHGESLDKASIESTSSYTLLIVGNVNRFDSGKYILTVENSSGSKSAFVNVRVLDTPGPPQDLKVKEVTKTSVTLTWDPPLLDGGSKIKNYIVEKRESTRKAYSTVATNCHKTSWKVDQLQEGCSYYFRVLAENEYGIGLPAETAESVKASERPLPPGKITLMDVTRNSVSLSWEKPEHDGGSRILGYIVEMQTKGSDKWATCATVKVTEATITGLIQGEEYSFRVSAQNEKGISDPRQLSVPVIAKDLVIPPAFKLLFNTFTVLAGEDLKVDVPFIGRPTPAVTWHKDNVPLKQTTRVNAESTENNSLLTIKDACREDVGHYVVKLTNSAGEAIETLNVIVLDKPGPPTGPVKMDEVTADSITLSWGPPKYDGGSSINNYIVEKRDTSTTTWQIVSATVARTTIKACRLKTGCEYQFRIAAENRYGKSTYLNSEPTVAQYPFKVPGPPGTPVVTLSSRDSMEVQWNEPISDGGSRVIGYHLERKERNSILWVKLNKTPIPQTKFKTTGLEEGVEYEFRVSAENIVGIGKPSKVSECYVARDPCDPPGRPEAIIVTRNSVTLQWKKPTYDGGSKITGYIVEKKELPEGRWMKASFTNIIDTHFEVTGLVEDHRYEFRVIARNAAGVFSEPSESTGAITARDEVDPPRISMDPKYKDTIVVHAGESFKVDADIYGKPIPTIQWIKGDQELSNTARLEIKSTDFATSLSVKDAVRVDSGNYILKAKNVAGERSVTVNVKVLDRPGPPEGPVVISGVTAEKCTLAWKPPLQDGGSDIINYIVERRETSRLVWTVVDANVQTLSCKVTKLLEGNEYTFRIMAVNKYGVGEPLESEPVVAKNPFVVPDAPKAPEVTTVTKDSMIVVWERPASDGGSEILGYVLEKRDKEGIRWTRCHKRLIGELRLRVTGLIENHDYEFRVSAENAAGLSEPSPPSAYQKACDPIYKPGPPNNPKVIDITRSSVFLSWSKPIYDGGCEIQGYIVEKCDVSVGEWTMCTPPTGINKTNIEVEKLLEKHEYNFRICAINKAGVGEHADVPGPIIVEEKLEAPDIDLDLELRKIINIRAGGSLRLFVPIKGRPTPEVKWGKVDGEIRDAAIIDVTSSFTSLVLDNVNRYDSGKYTLTLENSSGTKSAFVTVRVLDTPSPPVNLKVTEITKDSVSITWEPPLLDGGSKIKNYIVEKREATRKSYAAVVTNCHKNSWKIDQLQEGCSYYFRVTAENEYGIGLPAQTADPIKVAEVPQPPGKITVDDVTRNSVSLSWTKPEHDGGSKIIQYIVEMQAKHSEKWSECARVKSLQAVITNLTQGEEYLFRVVAVNEKGRSDPRSLAVPIVAKDLVIEPDVKPAFSSYSVQVGQDLKIEVPISGRPKPTITWTKDGLPLKQTTRINVTDSLDLTTLSIKETHKDDGGQYGITVANVVGQKTASIEIVTLDKPDPPKGPVKFDDVSAESITLSWNPPLYTGGCQITNYIVQKRDTTTTVWDVVSATVARTTLKVTKLKTGTEYQFRIFAENRYGQSFALESDPIVAQYPYKEPGPPGTPFATAISKDSMVIQWHEPVNNGGSPVIGYHLERKERNSILWTKVNKTIIHDTQFKAQNLEEGIEYEFRVYAENIVGVGKASKNSECYVARDPCDPPGTPEPIMVKRNEITLQWTKPVYDGGSMITGYIVEKRDLPDGRWMKASFTNVIETQFTVSGLTEDQRYEFRVIAKNAAGAISKPSDSTGPITAKDEVELPRISMDPKFRDTIVVNAGETFRLEADVHGKPLPTIEWLRGDKEIEESARCEIKNTDFKALLIVKDAIRIDGGQYILRASNVAGSKSFPVNVKVLDRPGPPEGPVQVTGVTSEKCSLTWSPPLQDGGSDISHYVVEKRETSRLAWTVVASEVVTNSLKVTKLLEGNEYVFRIMAVNKYGVGEPLESAPVLMKNPFVLPGPPKSLEVTNIAKDSMTVCWNRPDSDGGSEIIGYIVEKRDRSGIRWIKCNKRRITDLRLRVTGLTEDHEYEFRVSAENAAGVGEPSPATVYYKACDPVFKPGPPTNAHIVDTTKNSITLAWGKPIYDGGSEILGYVVEICKADEEEWQIVTPQTGLRVTRFEISKLTEHQEYKIRVCALNKVGLGEATSVPGTVKPEDKLEAPELDLDSELRKGIVVRAGGSARIHIPFKGRPTPEITWSREEGEFTDKVQIEKGVNYTQLSIDNCDRNDAGKYILKLENSSGSKSAFVTVKVLDTPGPPQNLAVKEVRKDSAFLVWEPPIIDGGAKVKNYVIDKRESTRKAYANVSSKCSKTSFKVENLTEGAIYYFRVMAENEFGVGVPVETVDAVKAAEPPSPPGKVTLTDVSQTSASLMWEKPEHDGGSRVLGYVVEMQPKGTEKWSIVAESKVCNAVVTGLSSGQEYQFRVKAYNEKGKSDPRVLGVPVIAKDLTIQPSLKLPFNTYSIQAGEDLKIEIPVIGRPRPNISWVKDGEPLKQTTRVNVEETATSTVLHIKEGNKDDFGKYTVTATNSAGTATENLSVIVLEKPGPPVGPVRFDEVSADFVVISWEPPAYTGGCQISNYIVEKRDTTTTTWHMVSATVARTTIKITKLKTGTEYQFRIFAENRYGKSAPLDSKAVIVQYPFKEPGPPGTPFVTSISKDQMLVQWHEPVNDGGTKIIGYHLEQKEKNSILWVKLNKTPIQDTKFKTTGLDEGLEYEFKVSAENIVGIGKPSKVSECFVARDPCDPPGRPEAIVITRNNVTLKWKKPAYDGGSKITGYIVEKKDLPDGRWMKASFTNVLETEFTVSGLVEDQRYEFRVIARNAAGNFSEPSDSSGAITARDEIDAPNASLDPKYKDVIVVHAGETFVLEADIRGKPIPDVVWSKDGKELEETAARMEIKSTIQKTTLVVKDCIRTDGGQYILKLSNVGGTKSIPITVKVLDRPGPPEGPLKVTGVTAEKCYLAWNPPLQDGGANISHYIIEKRETSRLSWTQVSTEVQALNYKVTKLLPGNEYIFRVMAVNKYGIGEPLESGPVTACNPYKPPGPPSTPEVSAITKDSMVVTWARPVDDGGTEIEGYILEKRDKEGVRWTKCNKKTLTDLRLRVTGLTEGHSYEFRVAAENAAGVGEPSEPSVFYRACDALYPPGPPSNPKVTDTSRSSVSLAWSKPIYDGGAPVKGYVVEVKEAAADEWTTCTPPTGLQGKQFTVTKLKENTEYNFRICAINSEGVGEPATLPGSVVAQERIEPPEIELDADLRKVVVLRASATLRLFVTIKGRPEPEVKWEKAEGILTDRAQIEVTSSFTMLVIDNVTRFDSGRYNLTLENNSGSKTAFVNVRVLDSPSAPVNLTIREVKKDSVTLSWEPPLIDGGAKITNYIVEKRETTRKAYATITNNCTKTTFRIENLQEGCSYYFRVLASNEYGIGLPAETTEPVKVSEPPLPPGRVTLVDVTRNTATIKWEKPESDGGSKITGYVVEMQTKGSEKWSTCTQVKTLEATISGLTAGEEYVFRVAAVNEKGRSDPRQLGVPVIARDIEIKPSVELPFHTFNVKAREQLKIDVPFKGRPQATVNWRKDGQTLKETTRVNVSSSKTVTSLSIKEASKEDVGTYELCVSNSAGSITVPITIIVLDRPGPPGPIRIDEVSCDSITISWNPPEYDGGCQISNYIVEKKETTSTTWHIVSQAVARTSIKIVRLTTGSEYQFRVCAENRYGKSSYSESSAVVAEYPFSPPGPPGTPKVVHATKSTMLVTWQVPVNDGGSRVIGYHLEYKERSSILWSKANKILIADTQMKVSGLDEGLMYEYRVYAENIAGIGKCSKSCEPVPARDPCDPPGQPEVTNITRKSVSLKWSKPHYDGGAKITGYIVERRELPDGRWLKCNYTNIQETYFEVTELTEDQRYEFRVFARNAADSVSEPSESTGPIIVKDDVEPPRVMMDVKFRDVIVVKAGEVLKINADIAGRPLPVISWAKDGIEIEERARTEIISTDNHTLLTVKDCIRRDTGQYVLTLKNVAGTRSVAVNCKVLDKPGPPAGPLEINGLTAEKCSLSWGRPQEDGGADIDYYIVEKRETSHLAWTICEGELQMTSCKVTKLLKGNEYIFRVTGVNKYGVGEPLESVAIKALDPFTVPSPPTSLEITSVTKESMTLCWSRPESDGGSEISGYIIERREKNSLRWVRVNKKPVYDLRVKSTGLREGCEYEYRVYAENAAGLSLPSETSPLIRAEDPVFLPSPPSKPKIVDSGKTTITIAWVKPLFDGGAPITGYTVEYKKSDDTDWKTSIQSLRGTEYTISGLTTGAEYVFRVKSVNKVGASDPSDSSDPQIAKEREEEPLFDIDSEMRKTLIVKAGASFTMTVPFRGRPVPNVLWSKPDTDLRTRAYVDTTDSRTSLTIENANRNDSGKYTLTIQNVLSAASLTLVVKVLDTPGPPTNITVQDVTKESAVLSWDVPENDGGAPVKNYHIEKREASKKAWVSVTNNCNRLSYKVTNLQEGAIYYFRVSGENEFGVGIPAETKEGVKITEKPSPPEKLGVTSISKDSVSLTWLKPEHDGGSRIVHYVVEALEKGQKNWVKCAVAKSTHHVVSGLRENSEYFFRVFAENQAGLSDPRELLLPVLIKEQLEPPEIDMKNFPSHTVYVRAGSNLKVDIPISGKPLPKVTLSRDGVPLKATMRFNTEITAENLTINLKESVTADAGRYEITAANSSGTTKAFINIVVLDRPGPPTGPVVISDITEESVTLKWEPPKYDGGSQVTNYILLKRETSTAVWTEVSATVARTMMKVMKLTTGEEYQFRIKAENRFGISDHIDSACVTVKLPYTTPGPPSTPWVTNVTRESITVGWHEPVSNGGSAVVGYHLEMKDRNSILWQKANKLVIRTTHFKVTTISAGLIYEFRVYAENAAGVGKPSHPSEPVLAIDACEPPRNVRITDISKNSVSLSWQQPAFDGGSKITGYIVERRDLPDGRWTKASFTNVTETQFIISGLTQNSQYEFRVFARNAVGSISNPSEVVGPITCIDSYGGPVIDLPLEYTEVVKYRAGTSVKLRAGISGKPAPTIEWYKDDKELQTNALVCVENTTDLASILIKDADRLNSGCYELKLRNAMGSASATIRVQILDKPGPPGGPIEFKTVTAEKITLLWRPPADDGGAKITHYIVEKRETSRVVWSMVSEHLEECIITTTKIIKGNEYIFRVRAVNKYGIGEPLESDSVVAKNAFVTPGPPGIPEVTKITKNSMTVVWSRPIADGGSDISGYFLEKRDKKSLGWFKVLKETIRDTRQKVTGLTENSDYQYRVCAVNAAGQGPFSEPSEFYKAADPIDPPGPPAKIRIADSTKSSITLGWSKPVYDGGSAVTGYVVEIRQGEEEEWTTVSTKGEVRTTEYVVSNLKPGVNYYFRVSAVNCAGQGEPIEMNEPVQAKDILEAPEIDLDVALRTSVIAKAGEDVQVLIPFKGRPPPTVTWRKDEKNLGSDARYSIENTDSSSLLTIPQVTRNDTGKYILTIENGVGEPKSSTVSVKVLDTPAACQKLQVKHVSRGTVTLLWDPPLIDGGSPIINYVIEKRDATKRTWSVVSHKCSSTSFKLIDLSEKTPFFFRVLAENEIGIGEPCETTEPVKAAEVPAPIRDLSMKDSTKTSVILSWTKPDFDGGSVITEYVVERKGKGEQTWSHAGISKTCEIEVSQLKEQSVLEFRVFAKNEKGLSDPVTIGPITVKELIITPEVDLSDIPGAQVTVRIGHNVHLELPYKGKPKPSISWLKDGLPLKESEFVRFSKTENKITLSIKNAKKEHGGKYTVILDNAVCRIAVPITVITLGPPSKPKGPIRFDEIKADSVILSWDVPEDNGGGEITCYSIEKRETSQTNWKMVCSSVARTTFKVPNLVKDAEYQFRVRAENRYGVSQPLVSSIIVAKHQFRIPGPPGKPVIYNVTSDGMSLTWDAPVYDGGSEVTGFHVEKKERNSILWQKVNTSPISGREYRATGLVEGLDYQFRVYAENSAGLSSPSDPSKFTLAVSPVDPPGTPDYIDVTRETITLKWNPPLRDGGSKIVGYSIEKRQGNERWVRCNFTDVSECQYTVTGLSPGDRYEFRIIARNAVGTISPPSQSSGIIMTRDENVPPIVEFGPEYFDGLIIKSGESLRIKALVQGRPVPRVTWFKDGVEIEKRMNMEITDVLGSTSLFVRDATRDHRGVYTVEAKNASGSAKAEIKVKVQDTPGKVVGPIRFTNITGEKMTLWWDAPLNDGCAPITHYIIEKRETSRLAWALIEDKCEAQSYTAIKLINGNEYQFRVSAVNKFGVGRPLDSDPVVAQIQYTVPDAPGIPEPSNITGNSITLTWARPESDGGSEIQQYILERREKKSTRWVKVISKRPISETRFKVTGLTEGNEYEFHVMAENAAGVGPASGISRLIKCREPVNPPGPPTVVKVTDTSKTTVSLEWSKPVFDGGMEIIGYIIEMCKADLGDWHKVNAEACVKTRYTVTDLQAGEEYKFRVSAINGAGKGDSCEVTGTIKAVDRLTAPELDIDANFKQTHVVRAGASIRLFIAYQGRPTPTAVWSKPDSNLSLRADIHTTDSFSTLTVENCNRNDAGKYTLTVENNSGSKSITFTVKVLDTPGPPGPITFKDVTRGSATLMWDAPLLDGGARIHHYVVEKREASRRSWQVISEKCTRQIFKVNDLAEGVPYYFRVSAVNEYGVGEPYEMPEPIVATEQPAPPRRLDVVDTSKSSAVLAWLKPDHDGGSRITGYLLEMRQKGSDFWVEAGHTKQLTFTVERLVEKTEYEFRVKAKNDAGYSEPREAFSSVIIKEPQIEPTADLTGITNQLITCKAGSPFTIDVPISGRPAPKVTWKLEEMRLKETDRVSITTTKDRTTLTVKDSMRGDSGRYFLTLENTAGVKTFSVTVVVIGRPGPVTGPIEVSSVSAESCVLSWGEPKDGGGTEITNYIVEKRESGTTAWQLVNSSVKRTQIKVTHLTKYMEYSFRVSSENRFGVSKPLESAPIIAEHPFVPPSAPTRPEVYHVSANAMSIRWEEPYHDGGSKIIGYWVEKKERNTILWVKENKVPCLECNYKVTGLVEGLEYQFRTYALNAAGVSKASEASRPIMAQNPVDAPGRPEVTDVTRSTVSLIWSAPAYDGGSKVVGYIIERKPVSEVGDGRWLKCNYTIVSDNFFTVTALSEGDTYEFRVLAKNAAGVISKGSESTGPVTCRDEYAPPKAELDARLHGDLVTIRAGSDLVLDAAVGGKPEPKIIWTKGDKELDLCEKVSLQYTGKRATAVIKFCDRSDSGKYTLTVKNASGTKAVSVMVKVLDSPGPCGKLTVSRVTQEKCTLAWSLPQEDGGAEITHYIVERRETSRLNWVIVEGECPTLSYVVTRLIKNNEYIFRVRAVNKYGPGVPVESEPIVARNSFTIPSPPGIPEEVGTGKEHIIIQWTKPESDGGNEISNYLVDKREKKSLRWTRVNKDYVVYDTRLKVTSLMEGCDYQFRVTAVNAAGNSEPSEASNFISCREPSYTPGPPSAPRVVDTTKHSISLAWTKPMYDGGTDIVGYVLEMQEKDTDQWYRVHTNATIRNTEFTVPDLKMGQKYSFRVAAVNVKGMSEYSESIAEIEPVERIEIPDLELADDLKKTVTIRAGASLRLMVSVSGRPPPVITWSKQGIDLASRAIIDTTESYSLLIVDKVNRYDAGKYTIEAENQSGKKSATVLVKVYDTPGPCPSVKVKEVSRDSVTITWEIPTIDGGAPVNNYIVEKREAAMRAFKTVTTKCSKTLYRISGLVEGTMYYFRVLPENIYGIGEPCETSDAVLVSEVPLVPAKLEVVDVTKSTVTLAWEKPLYDGGSRLTGYVLEACKAGTERWMKVVTLKPTVLEHTVTSLNEGEQYLFRIRAQNEKGVSEPRETVTAVTVQDLRVLPTIDLSTMPQKTIHVPAGRPVELVIPIAGRPPPAASWFFAGSKLRESERVTVETHTKVAKLTIRETTIRDTGEYTLELKNVTGTTSETIKVIILDKPGPPTGPIKIDEIDATSITISWEPPELDGGAPLSGYVVEQRDAHRPGWLPVSESVTRSTFKFTRLTEGNEYVFRVAATNRFGIGSYLQSEVIECRSSIRIPGPPETLQIFDVSRDGMTLTWYPPEDDGGSQVTGYIVERKEVRADRWVRVNKVPVTMTRYRSTGLTEGLEYEHRVTAINARGSGKPSRPSKPIVAMDPIAPPGKPQNPRVTDTTRTSVSLAWSVPEDEGGSKVTGYLIEMQKVDQHEWTKCNTTPTKIREYTLTHLPQGAEYRFRVLACNAGGPGEPAEVPGTVKVTEMLEYPDYELDERYQEGIFVRQGGVIRLTIPIKGKPFPICKWTKEGQDISKRAMIATSETHTELVIKEADRGDSGTYDLVLENKCGKKAVYIKVRVIGSPNSPEGPLEYDDIQVRSVRVSWRPPADDGGADILGYILERREVPKAAWYTIDSRVRGTSLVVKGLKENVEYHFRVSAENQFGISKPLKSEEPVTPKTPLNPPEPPSNPPEVLDVTKSSVSLSWSRPKDDGGSRVTGYYIERKETSTDKWVRHNKTQITTTMYTVTGLVPDAEYQFRIIAQNDVGLSETSPASEPVVCKDPFDKPSQPGELEILSISKDSVTLQWEKPECDGGKEILGYWVEYRQSGDSAWKKSNKERIKDKQFTIGGLLEATEYEFRVFAENETGLSRPRRTAMSIKTKLTSGEAPGIRKEMKDVTTKLGEAAQLSCQIVGRPLPDIKWYRFGKELIQSRKYKMSSDGRTHTLTVMTEEQEDEGVYTCIATNEVGEVETSSKLLLQATPQFHPGYPLKEKYYGAVGSTLRLHVMYIGRPVPAMTWFHGQKLLQNSENITIENTEHYTHLVMKNVQRKTHAGKYKVQLSNVFGTVDAILDVEIQDKPDKPTGPIVIEALLKNSAVISWKPPADDGGSWITNYVVEKCEAKEGAEWQLVSSAISVTTCRIVNLTENAGYYFRVSAQNTFGISDPLEVSSVVIIKSPFEKPGAPGKPTITAVTKDSCVVAWKPPASDGGAKIRNYYLEKREKKQNKWISVTTEEIRETVFSVKNLIEGLEYEFRVKCENLGGESEWSEISEPITPKSDVPIQAPHFKEELRNLNVRYQSNATLVCKVTGHPKPIVKWYRQGKEIIADGLKYRIQEFKGGYHQLIIASVTDDDATVYQVRATNQGGSVSGTASLEVEVPAKIHLPKTLEGMGAVHALRGEVVSIKIPFSGKPDPVITWQKGQDLIDNNGHYQVIVTRSFTSLVFPNGVERKDAGFYVVCAKNRFGIDQKTVELDVADVPDPPRGVKVSDVSRDSVNLTWTEPASDGGSKITNYIVEKCATTAERWLRVGQARETRYTVINLFGKTSYQFRVIAENKFGLSKPSEPSEPTITKEDKTRAMNYDEEVDETREVSMTKASHSSTKELYEKYMIAEDLGRGEFGIVHRCVETSSKKTYMAKFVKVKGTDQVLVKKEISILNIARHRNILHLHESFESMEELVMIFEFISGLDIFERINTSAFELNEREIVSYVHQVCEALQFLHSHNIGHFDIRPENIIYQTRRSSTIKIIEFGQARQLKPGDNFRLLFTAPEYYAPEVHQHDVVSTATDMWSLGTLVYVLLSGINPFLAETNQQIIENIMNAEYTFDEEAFKEISIEAMDFVDRLLVKERKSRMTASEALQHPWLKQKIERVSTKVIRTLKHRRYYHTLIKKDLNMVVSAARISCGGAIRSQKGVSVAKVKVASIEIGPVSGQIMHAVGEEGGHVKYVCKIENYDQSTQVTWYFGVRQLENSEKYEITYEDGVAILYVKDITKLDDGTYRCKVVNDYGEDSSYAELFVKGVREVYDYYCRRTMKKIKRRTDTMRLLERPPEFTLPLYNKTAYVGENVRFGVTITVHPEPHVTWYKSGQKIKPGDNDKKYTFESDKGLYQLTINSVTTDDDAEYTVVARNKYGEDSCKAKLTVTLHPPPTDSTLRPMFKRLLANAECQEGQSVCFEIRVSGIPPPTLKWEKDGQPLSLGPNIEIIHEGLDYYALHIRDTLPEDTGYYRVTATNTAGSTSCQAHLQVERLRYKKQEFKSKEEHERHVQKQIDKTLRMAEILSGTESVPLTQVAKEALREAAVLYKPAVSTKTVKGEFRLEIEEKKEERKLRMPYDVPEPRKYKQTTIEEDQRIKQFVPMSDMKWYKKIRDQYEMPGKLDRVVQKRPKRIRLSRWEQFYVMPLPRITDQYRPKWRIPKLSQDDLEIVRPARRRTPSPDYDFYYRPRRRSLGDISDEELLLPIDDYLAMKRTEEERLRLEEELELGFSASPPSRSPPHFELSSLRYSSPQAHVKVEETRKDFRYSTYHIPTKAEASTSYAELRERHAQAAYRQPKQRQRIMAEREDEELLRPVTTTQHLSEYKSELDFMSKEEKSRKKSRRQREVTEITEIEEEYEISKHAQRESSSSASRLLRRRRSLSPTYIELMRPVSELIRSRPQPAEEYEDDTERRSPTPERTRPRSPSPVSSERSLSRFERSARFDIFSRYESMKAALKTQKTSERKYEVLSQQPFTLDHAPRITLRMRSHRVPCGQNTRFILNVQSKPTAEVKWYHNGVELQESSKIHYTNTSGVLTLEILDCHTDDSGTYRAVCTNYKGEASDYATLDVTGGDYTTYASQRRDEEVPRSVFPELTRTEAYAVSSFKKTSEMEASSSVREVKSQMTETRESLSSYEHSASAEMKSAALEEKSLEEKSTTRKIKTTLAARILTKPRSMTVYEGESARFSCDTDGEPVPTVTWLRKGQVLSTSARHQVTTTKYKSTFEISSVQASDEGNYSVVVENSEGKQEAEFTLTIQKARVTEKAVTSPPRVKSPEPRVKSPEAVKSPKRVKSPEPSHPKAVSPTETKPTPTEKVQHLPVSAPPKITQFLKAEASKEIAKLTCVVESSVLRAKEVTWYKDGKKLKENGHFQFHYSADGTYELKINNLTESDQGEYVCEISGEGGTSKTNLQFMGQAFKSIHEKVSKISETKKSDQKTTESTVTRKTEPKAPEPISSKPVIVTGLQDTTVSSDSVAKFAVKATGEPRPTAIWTKDGKAITQGGKYKLSEDKGGFFLEIHKTDTSDSGLYTCTVKNSAGSVSSSCKLTIKAIKDTEAQKVSTQKTSEITPQKKAVVQEEISQKALRSEEIKMSEAKSQEKLALKEEASKVLISEEVKKSAATSLEKSIVHEEITKTSQASEEVRTHAEIKAFSTQMSINEGQRLVLKANIAGATDVKWVLNGVELTNSEEYRYGVSGSDQTLTIKQASHRDEGILTCISKTKEGIVKCQYDLTLSKELSDAPAFISQPRSQNINEGQNVLFTCEISGEPSPEIEWFKNNLPISISSNVSISRSRNVYSLEIRNASVSDSGKYTIKAKNFRGQCSATASLMVLPLVEEPSREVVLRTSGDTSLQGSFSSQSVQMSASKQEASFSSFSSSSASSMTEMKFASMSAQSMSSMQESFVEMSSSSFMGISNMTQLESSTSKMLKAGIRGIPPKIEALPSDISIDEGKVLTVACAFTGEPTPEVTWSCGGRKIHSQEQGRFHIENTDDLTTLIIMDVQKQDGGLYTLSLGNEFGSDSATVNIHIRSI

SEQ ID NO: 7370 - protein, 33445 aa, Homo sapiens
MTTQAPTFTQPLQSVVVLEGSTATFEAHISGFPVPEVSWFRDGQVISTSTLPGVQISFSDGRAKLTIPAVTKANSGRYSLKATNGSGQATSTAELLVKAETAPPNFVQRLQSMTVRQGSQVRLQVRVTGIPTPVVKFYRDGAEIQSSLDFQISQEGDLYSLLIAEAYPEDSGTYSVNATNSVGRATSTAELLVQGEEEVPAKKTKTIVSTAQISESRQTRIEKKIEAHFDARSIATVEMVIDGAAGQQLPHKTPPRIPPKPKSRSPTPPSIAAKAQLARQQSPSPIRHSPSPVRHVRAPTPSPVRSVSPAARISTSPIRSVRSPLLMRKTQASTVATGPEVPPPWKQEGYVASSSEAEMRETTLTTSTQIRTEERWEGRYGVQEQVTISGAAGAAASVSASASYAAEAVATGAKEVKQDADKSAAVATVVAAVDMARVREPVISAVEQTAQRTTTTAVHIQPAQEQVRKEAEKTAVTKVVVAADKAKEQELKSRTKEVITTKQEQMHVTHEQIRKETEKTFVPKVVISAAKAKEQETRISEEITKKQKQVTQEAIRQETEITAASMVVVATAKSTKLETVPGAQEETTTQQDQMHLSYEKIMKETRKTVVPKVIVATPKVKEQDLVSRGREGITTKREQVQITQEKMRKEAEKTALSTIAVATAKAKEQETILRTRETMATRQEQIQVTHGKVDVGKKAEAVATVVAAVDQARVREPREPGHLEESYAQQTTLEYGYKERISAAKVAEPPQRPASEPHVVPKAVKPRVIQAPSETHIKTTDQKGMHISSQIKKTTDLTTERLVHVDKRPRTASPHFTVSKISVPKTEHGYEASIAGSAIATLQKELSATSSAQKITKSVKAPTVKPSETRVRAEPTPLPQFPFADTPDTYKSEAGVEVKKEVGVSITGTTVREERFEVLHGREAKVTETARVPAPVEIPVTPPTLVSGLKNVTVIEGESVTLECHISGYPSPTVTWYREDYQIESSIDFQITFQSGIARLMIREAFAEDSGRFTCSAVNEAGTVSTSCYLAVQVSEEFEKETTAVTEKFTTEEKRFVESRDVVMTDTSLTEEQAGPGEPAAPYFITKPVVQKLVEGGSVVFGCQVGGNPKPHVYWKKSGVPLTTGYRYKVSYNKQTGECKLVISMTFADDAGEYTIVVRNKHGETSASASLLEEADYELLMKSQQEMLYQTQVTAFVQEPKVGETAPGFVYSEYEKEYEKEQALIRKKMAKDTVVVRTYVEDQEFHISSFEERLIKEIEYRIIKTTLEELLEEDGEEKMAVDISESEAVESGFDSRIKNYRILEGMGVTFHCKMSGYPLPKIAWYKDGKRIKHGERYQMDFLQDGRASLRIPVVLPEDEGIYTAFASNIKGNAICSGKLYVEPAAPLGAPTYIPTLEPVSRIRSLSPRSVSRSPIRMSPARMSPARMSPARMSPARMSPGRRLEETDESQLERLYKPVFVLKPVSFKCLEGQTARFDLKVVGRPMPETFWFHDGQQIVNDYTHKVVIKEDGTQSLIIVPATPSDSGEWTVVAQNRAGRSSISVILTVEAVEHQVKPMFVEKLKNVNIKEGSRLEMKVRATGNPNPDIVWLKNSDIIVPHKYPKIRIEGTKGEAALKIDSTVSQDSAWYTATAINKAGRDTTRCKVNVEVEFAEPEPERKLIIPRGTYRAKEIAAPELEPLHLRYGQEQWEEGDLYDKEKQQKPFFKKKLTSLRLKRFGPAHFECRLTPIGDPTMVVEWLHDGKPLEAANRLRMINEFGYCSLDYGVAYSRDSGIITCRATNKYGTDHTSATLIVKDEKSLVEESQLPEGRKGLQRIEELERMAHEGALTGVTTDQKEKQKPDIVLYPEPVRVLEGETARFRCRVTGYPQPKVNWYLNGQLIRKSKRFRVRYDGIHYLDIVDCKSYDTGEVKVTAENPEGVIEHKVKLEIQQREDFRSVLRRAPEPRPEFHVHEPGKLQFEVQKVDRPVDTTETKEVVKLKRAERITHEKVPEESEELRSKFKRRTEEGYYEAITAVELKSRKKDESYEELLRKTKDELLHWTKELTEEEKKALAEEGKITIPTFKPDKIELSPSMEAPKIFERIQSQTVGQGSDAHFRVRVVGKPDPECEWYKNGVKIERSDRIYWYWPEDNVCELVIRDVTAEDSASIMVKAINIAGETSSHAFLLVQAKQLITFTQELQDVVAKEKDTMATFECETSEPFVKVKWYKDGMEVHEGDKYRMHSDRKVHFLSILTIDTSDAEDYSCVLVEDENVKTTAKLIVEGAVVEFVKELQDIEVPESYSGELECIVSPENIEGKWYHNDVELKSNGKYTITSRRGRQNLTVKDVTKEDQGEYSFVIDGKKTTCKLKMKPRPIAILQGLSDQKVCEGDIVQLEVKVSLESVEGVWMKDGQEVQPSDRVHIVIDKQSHMLLIEDMTKEDAGNYSFTIPALGLSTSGRVSVYSVDVITPLKDVNVIEGTKAVLECKVSVPDVTSVKWYLNDEQIKPDDRVQAIVKGTKQRLVINRTHASDEGPYKLIVGRVETNCNLSVEKIKIIRGLRDLTCTETQNVVFEVELSHSGIDVLWNFKDKEIKPSSKYKIEAHGKIYKLTVLNMMKDDEGKYTFYAGENMTSGKLTVAGGAISKPLTDQTVAESQEAVFECEVANPDSKGEWLRDGKHLPLTNNIRSESDGHKRRLIIAATKLDDIGEYTYKVATSKTSAKLKVEAVKIKKTLKNLTVTETQDAVFTVELTHPNVKGVQWIKNGVVLESNEKYAISVKGTIYSLRIKNCAIVDESVYGFRLGRLGASARLHVETVKIIKKPKDVTALENATVAFEVSVSHDTVPVKWFHKSVEIKPSDKHRLVSERKVHKLMLQNISPSDAGEYTAVVGQLECKAKLFVETLHITKTMKNIEVPETKTASFECEVSHFNVPSMWLKNGVEIEMSEKFKIVVQGKLHQLIIMNTSTEDSAEYTFVCGNDQVSATLTVTPIMITSMLKDINAEEKDTITFEVTVNYEGISYKWLKNGVEIKSTDKCQMRTKKLTHSLNIRNVHFGDAADYTFVAGKATSTATLYVEARHIEFRKHIKDIKVLEKKRAMFECEVSEPDITVQWMKDDQELQITDRIKIQKEKYVHRLLIPSTRMSDAGKYTVVAGGNVSTAKLFVEGRDVRIRSIKKEVQVIEKQRAVVEFEVNEDDVDAHWYKDGIEINFQVQERHKYVVERRIHRMFISETRQSDAGEYTFVAGRNRSSVTLYVNAPEPPQVLQELQPVTVQSGKPARFCAVISGRPQPKISWYKEEQLLSTGFKCKFLHDGQEYTLLLIEAFPEDAAVYTCEAKNDYGVATTSASLSVEVPEVVSPDQEMPVYPPAIITPLQDTVTSEGQPARFQCRVSGTDLKVSWYSKDKKIKPSRFFRMTQFEDTYQLEIAEAYPEDEGTYTFVASNAVGQVSSTANLSLEAPESILHERIEQEIEMEMKAAPVIKRKIEPLEVALGHLAKFTCEIQSAPNVRFQWFKAGREIYESDKCSIRSSKYISSLEILRTQVVDCGEYTCKASNEYGSVSCTATLTVTEAYPPTFLSRPKSLTTFVGKAAKFICTVTGTPVIETIWQKDGAALSPSPNWRISDAENKHILELSNLTIQDRGVYSCKASNKFGADICQAELIIIDKPHFIKELEPVQSAINKKVHLECQVDEDRKVTVTWSKDGQKLPPGKDYKICFEDKIATLEIPLAKLKDSGTYVCTASNEAGSSSCSATVTVREPPSFVKKVDPSYLMLPGESARLHCKLKGSPVIQVTWFKNNKELSESNTVRMYFVNSEAILDITDVKVEDSGSYSCEAVNDVGSDSCSTEIVIKEPPSFIKTLEPADIVRGTNALLQCEVSGTGPFEISWFKDKKQIRSSKKYRLFSQKSLVCLEIFSFNSADVGEYECVVANEVGKCGCMATHLLKEPPTFVKKVDDLIALGGQTVTLQAAVRGSEPISVTWMKGQEVIREDGKIKMSFSNGVAVLIIPDVQISFGGKYTCLAENEAGSQTSVGELIVKEPAKIIERAELIQVTAGDPATLEYTVAGTPELKPKWYKDGRPLVASKKYRISFKNNVAQLKFYSAELHDSGQYTFEISNEVGSSSCETTFTVLDRDIAPFFTKPLRNVDSVVNGTCRLDCKIAGSLPMRVSWFKDGKEIAASDRYRIAFVEGTASLEIIRVDMNDAGNFTCRATNSVGSKDSSGALIVQEPPSFVTKPGSKDVLPGSAVCLKSTFQGSTPLTIRWFKGNKELVSGGSCYITKEALESSLELYLVKTSDSGTYTCKVSNVAGGVECSANLFVKEPATFVEKLEPSQLLKKGDATQLACKVTGTPPIKITWFANDREIKESSKHRMSFVESTAVLRLTDVGIEDSGEYMCEAQNEAGSDHCSSIVIVKESPYFTKEFKPIEVLKEYDVMLLAEVAGTPPFEITWFKDNTILRSGRKYKTFIQDHLVSLQILKFVAADAGEYQCRVTNEVGSSICSARVTLREPPSFIKKIESTSSLRGGTAAFQATLKGSLPITVTWLKDSDEITEDDNIRMTFENNVASLYLSGIEVKHDGKYVCQAKNDAGIQRCSALLSVKEPATITEEAVSIDVTQGDPATLQVKFSGTKEITAKWFKDGQELTLGSKYKISVTDTVSILKIISTEKKDSGEYTFEVQNDVGRSSCKARINVLDLIIPPSFTKKLKKMDSIKGSFIDLECIVAGSHPISIQWFKDDQEISASEKYKFSFHDNTAFLEISQLEGTDSGTYTCSATNKAGHNQCSGHLTVKEPPYFVEKPQSQDVNPNTRVQLKALVGGTAPMTIKWFKDNKELHSGAARSVWKDDTSTSLELFAAKATDSGTYICQLSNDVGTATSKATLFVKEPPQFIKKPSPVLVLRNGQSTTFECQITGTPKIRVSWYLDGNEITAIQKHGISFIDGLATFQISGARVENSGTYVCEARNDAGTASCSIELKVKEPPTFIRELKPVEVVKYSDVELECEVTGTPPFEVTWLKNNREIRSSKKYTLTDRVSVFNLHITKCDPSDTGEYQCIVSNEGGSCSCSTRVALKEPPSFIKKIENTTTVLKSSATFQSTVAGSPPISITWLKDDQILDEDDNVYISFVDSVATLQIRSVDNGHSGRYTCQAKNESGVERCYAFLLVQEPAQIVEKAKSVDVTEKDPMTLECVVAGTPELKVKWLKDGKQIVPSRYFSMSFENNVASFRIQSVMKQDSGQYTFKVENDFGSSSCDAYLRVLDQNIPPSFTKKLTKMDKVLGSSIHMECKVSGSLPISAQWFKDGKEISTSAKYRLVCHERSVSLEVNNLELEDTANYTCKVSNVAGDDACSGILTVKEPPSFLVKPGRQQAIPDSTVEFKAILKGTPPFKIKWFKDDVELVSGPKCFIGLEGSTSFLNLYSVDASKTGQYTCHVTNDVGSDSCTTMLLVTEPPKFVKKLEASKIVKAGDSSRLECKIAGSPEIRVVWFRNEHELPASDKYRMTFIDSVAVIQMNNLSTEDSGDFICEAQNPAGSTSCSTKVIVKEPPVFSSFPPIVETLKNAEVSLECELSGTPPFEVVWYKDKRQLRSSKKYKIASKNFHTSIHILNVDTSDIGEYHCKAQNEVGSDTCVCTVKLKEPPRFVSKLNSLTVVAGEPAELQASIEGAQPIFVQWLKEKEEVIRESENIRITFVENVATLQFAKAEPANAGKYICQIKNDGGMRENMATLMVLEPAVIVEKAGPMTVTVGETCTLECKVAGTPELSVEWYKDGKLLTSSQKHKFSFYNKISSLRILSVERQDAGTYTFQVQNNVGKSSCTAVVDVSDRAVPPSFTRRLKNTGGVLGASCILECKVAGSSPISVAWFHEKTKIVSGAKYQTTFSDNVCTLQLNSLDSSDMGNYTCVAANVAGSDECRAVLTVQEPPSFVKEPEPLEVLPGKNVTFTSVIRGTPPFKVNWFRGARELVKGDRCNIYFEDTVAELELFNIDISQSGEYTCVVSNNAGQASCTTRLFVKEPAAFLKRLSDHSVEPGKSIILESTYTGTLPISVTWKKDGFNITTSEKCNIVTTEKTCILEILNSTKRDAGQYSCEIENEAGRDVCGALVSTLEPPYFVTELEPLEAAVGDSVSLQCQVAGTPEITVSWYKGDTKLRPTPEYRTYFTNNVATLVFNKVNINDSGEYTCKAENSIGTASSKTVFRIQERQLPPSFARQLKDIEQTVGLPVTLTCRLNGSAPIQVCWYRDGVLLRDDENLQTSFVDNVATLKILQTDLSHSGQYSCSASNPLGTASSSARLTAREPKKSPFFDIKPVSIDVIAGESADFECHVTGAQPMRITWSKDNKEIRPGGNYTITCVGNTPHLRILKVGKGDSGQYTCQATNDVGKDMCSAQLSVKEPPKFVKKLEASKVAKQGESIQLECKISGSPEIKVSWFRNDSELHESWKYNMSFINSVALLTINEASAEDSGDYICEAHNGVGDASCSTALTVKAPPVFTQKPSPVGALKGSDVILQCEISGTPPFEVVWVKDRKQVRNSKKFKITSKHFDTSLHILNLEASDVGEYHCKATNEVGSDTCSCSVKFKEPPRFVKKLSDTSTLIGDAVELRAIVEGFQPISVVWLKDRGEVIRESENTRISFIDNIATLQLGSPEASNSGKYICQIKNDAGMRECSAVLTVLEPARIIEKPEPMTVTTGNPFALECVVTGTPELSAKWFKDGRELSADSKHHITFINKVASLKIPCAEMSDKGLYSFEVKNSVGKSNCTVSVHVSDRIVPPSFIRKLKDVNAILGASVVLECRVSGSAPISVGWFQDGNEIVSGPKCQSSFSENVCTLNLSLLEPSDTGIYTCVAANVAGSDECSAVLTVQEPPSFEQTPDSVEVLPGMSLTFTSVIRGTPPFKVKWFKGSRELVPGESCNISLEDFVTELELFEVQPLESGDYSCLVTNDAGSASCTTHLFVKEPATFVKRLADFSVETGSPIVLEATYTGTPPISVSWIKDEYLISQSERCSITMTEKSTILEILESTIEDYAQYSCLIENEAGQDICEALVSVLEPPYFIEPLEHVEAVIGEPATLQCKVDGTPEIRISWYKEHTKLRSAPAYKMQFKNNVASLVINKVDHSDVGEYSCKADNSVGAVASSAVLVIKARKLPPFFARKLKDVHETLGFPVAFECRINGSEPLQVSWYKDGVLLKDDANLQTSFVHNVATLQILQTDQSHIGQYNCSASNPLGTASSSAKLILSEHEVPPFFDLKPVSVDLALGESGTFKCHVTGTAPIKITWAKDNREIRPGGNYKMTLVENTATLTVLKVGKGDAGQYTCYASNIAGKDSCSAQLGVQEPPRFIKKLEPSRIVKQDEFTRYECKIGGSPEIKVLWYKDETEIQESSKFRMSFVDSVAVLEMHNLSVEDSGDYTCEAHNAAGSASSSTSLKVKEPPIFRKKPHPIETLKGADVHLECELQGTPPFHVSWYKDKRELRSGKKYKIMSENFLTSIHILNVDAADIGEYQCKATNDVGSDTCVGSIALKAPPRFVKKLSDISTVVGKEVQLQTTIEGAEPISVVWFKDKGEIVRESDNIWISYSENIATLQFSRVEPANAGKYTCQIKNDAGMQECFATLSVLEPATIVEKPESIKVTTGDTCTLECTVAGTPELSTKWFKDGKELTSDNKYKISFFNKVSGLKIINVAPSDSGVYSFEVQNPVGKDSCTASLQVSDRTVPPSFTRKLKETNGLSGSSVVMECKVYGSPPISVSWFHEGNEISSGRKYQTTLTDNTCALTVNMLEESDSGDYTCIATNMAGSDECSAPLTVREPPSFVQKPDPMDVLTGTNVTFTSIVKGTPPFSVSWFKGSSELVPGDRCNVSLEDSVAELELFDVDTSQSGEYTCIVSNEAGKASCTTHLYIKAPAKFVKRLNDYSIEKGKPLILEGTFTGTPPISVTWKKNGINVTPSQRCNITTTEKSAILEIPSSTVEDAGQYNCYIENASGKDSCSAQILILEPPYFVKQLEPVKVSVGDSASLQCQLAGTPEIGVSWYKGDTKLRPTTTYKMHFRNNVATLVFNQVDINDSGEYICKAENSVGEVSASTFLTVQEQKLPPSFSRQLRDVQETVGLPVVFDCAISGSEPISVSWYKDGKPLKDSPNVQTSFLDNTATLNIFKTDRSLAGQYSCTATNPIGSASSSARLILTEGKNPPFFDIRLAPVDAVVGESADFECHVTGTQPIKVSWAKDSREIRSGGKYQISYLENSAHLTVLKVDKGDSGQYTCYAVNEVGKDSCTAQLNIKERLIPPSFTKRLSETVEETEGNSFKLEGRVAGSQPITVAWYKNNIEIQPTSNCEITFKNNTLVLQVRKAGMNDAGLYTCKVSNDAGSALCTSSIVIKEPKKPPVFDQHLTPVTVSEGEYVQLSCHVQGSEPIRIQWLKAGREIKPSDRCSFSFASGTAVLELRDVAKADSGDYVCKASNVAGSDTTKSKVTIKDKPAVAPATKKAAVDGRLFFVSEPQSIRVVEKTTATFIAKVGGDPIPNVKWTKGKWRQLNQGGRVFIHQKGDEAKLEIRDTTKTDSGLYRCVAFNEHGEIESNVNLQVDERKKQEKIEGDLRAMLKKTPILKKGAGEEEEIDIMELLKNVDPKEYEKYARMYGITDFRGLLQAFELLKQSQEEETHRLEIEEIERSERDEKEFEELVSFIQQRLSQTEPVTLIKDIENQTVLKDNDAVFEIDIKINYPEIKLSWYKGTEKLEPSDKFEISIDGDRHTLRVKNCQLKDQGNYRLVCGPHIASAKLTVIEPAWERHLQDVTLKEGQTCTMTCQFSVPNVKSEWFRNGRILKPQGRHKTEVEHKVHKLTIADVRAEDQGQYTCKYEDLETSAELRIEAEPIQFTKRIQNIVVSEHQSATFECEVSFDDAIVTWYKGPTELTESQKYNFRNDGRCHYMTIHNVTPDDEGVYSVIARLEPRGEARSTAELYLTTKEIKLELKPPDIPDSRVPIPTMPIRAVPPEEIPPVVAPPIPLLLPTPEEKKPPPKRIEVTKKAVKKDAKKVVAKPKEMTPREEIVKKPPPPTTLIPAKAPEIIDVSSKAEEVKIMTITRKKEVQKEKEAVYEKKQAVHKEKRVFIESFEEPYDELEVEPYTEPFEQPYYEEPDEDYEEIKVEAKKEVHEEWEEDFEEGQEYYEREEGYDEGEEEWEEAYQEREVIQVQKEVYEESHERKVPAKVPEKKAPPPPKVIKKPVIEKIEKTSRRMEEEKVQVTKVPEVSKKIVPQKPSRTPVQEEVIEVKVPAVHTKKMVISEEKMFFASHTEEEVSVTVPEVQKEIVTEEKIHVAISKRVEPPPKVPELPEKPAPEEVAPVPIPKKVEPPAPKVPEVPKKPVPEEKKPVPVPKKEPAAPPKVPEVPKKPVPEEKIPVPVAKKKEAPPAKVPEVQKGVVTEEKITIVTQREESPPPAVPEIPKKKVPEERKPVPRKEEEVPPPPKVPALPKKPVPEEKVAVPVPVAKKAPPPRAEVSKKTVVEEKRFVAEEKLSFAVPQRVEVTRHEVSAEEEWSYSEEEEGVSISVYREEEREEEEEAEVTEYEVMEEPEEYVVEEKLHIISKRVEAEPAEVTERQEKKIVLKPKIPAKIEEPPPAKVPEAPKKIVPEKKVPAPVPKKEKVPPPKVPEEPKKPVPEKKVPPKVIKMEEPLPAKVTERHMQITQEEKVLVAVTKKEAPPKARVPEEPKRAVPEEKVLKLKPKREEEPPAKVTEFRKRVVKEEKVSIEAPKREPQPIKEVTIMEEKERAYTLEEEAVSVQREEEYEEYEEYDYKEFEEYEPTEEYDQYEEYEEREYERYEEHEEYITEPEKPIPVKPVPEEPVPTKPKAPPAKVLKKAVPEEKVPVPIPKKLKPPPPKVPEEPKKVFEEKIRISITKREKEQVTEPAAKVPMKPKRVVAEEKVPVPRKEVAPPVRVPEVPKELEPEEVAFEEEVVTHVEEYLVEEEEEYIHEEEEFITEEEVVPVIPVKVPEVPRKPVPEEKKPVPVPKKKEAPPAKVPEVPKKPEEKVPVLIPKKEKPPPAKVPEVPKKPVPEEKVPVPVPKKVEAPPAKVPEVPKKPVPEKKVPVPAPKKVEAPPAKVPEVPKKLIPEEKKPTPVPKKVEAPPPKVPKKREPVPVPVALPQEEEVLFEEEIVPEEEVLPEEEEVLPEEEEVLPEEEEVLPEEEEIPPEEEEVPPEEEYVPEEEEFVPEEEVLPEVKPKVPVPAPVPEIKKKVTEKKVVIPKKEEAPPAKVPEVPKKVEEKRIILPKEEEVLPVEVTEEPEEEPISEEEIPEEPPSIEEVEEVAPPRVPEVIKKAVPEAPTPVPKKVEAPPAKVSKKIPEEKVPVPVQKKEAPPAKVPEVPKKVPEKKVLVPKKEAVPPAKGRTVLEEKVSVAFRQEVVVKERLELEVVEAEVEEIPEEEEFHEVEEYFEEGEFHEVEEFIKLEQHRVEEEHRVEKVHRVIEVFEAEEVEVFEKPKAPPKGPEISEKIIPPKKPPTKVVPRKEPPAKVPEVPKKIVVEEKVRVPEEPRVPPTKVPEVLPPKEVVPEKKVPVPPAKKPEAPPPKVPEAPKEVVPEKKVPVPPPKKPEVPPTKVPEVPKAAVPEKKVPEAIPPKPESPPPEVFEEPEESPSAPPKKPEVPPVRVPEAPKEVVPEKKVPAAPPKKPEVTPVKVPEAPKEVVPEKKVPVPPPKKPEVPPTKVPEVPKVAVPEKKVPEAIPPKPESPPPEVFEEPEEVALEEPPAEVVEEPEPAAPPQVTVPPKKPVPEKKAPAVVAKKPELPPVKVPEVPKEVVPEKKVPLVVPKKPEAPPAKVPEVPKEVVPEKKVAVPKKPEVPPAKVPEVPKKPVLEEKPAVPVPERAESPPPEVYEEPEEIAPEEEIAPEEEKPVPVAEEEEPEVPPPAVPEEPKKIIPEKKVPVIKKPEAPPPKEPEPEKVIEKPKLKPRPPPPPPAPPKEDVKEKIFQLKAIPKKKVPEKPQVPEKVELTPLKVPGGEKKVRKLLPERKPEPKEEVVLKSVLRKRPEEEEPKVEPKKLEKVKKPAVPEPPPPKPVEEVEVPTVTKRERKIPEPTKVPEIKPAIPLPAPEPKPKPEAEVKTIKPPPVEPEPTPIAAPVTVPVVGKKAEAKAPKEEAAKPKGPIKGVPKKTPSPIEAERRKLRPGSGGEKPPDEAPFTYQLKAVPLKFVKEIKDIILTESEFVGSSAIFECLVSPSTAITTWMKDGSNIRESPKHRFIADGKDRKLHIIDVQLSDAGEYTCVLRLGNKEKTSTAKLVVEELPVRFVKTLEEEVTVVKGQPLYLSCELNKERDVVWRKDGKIVVEKPGRIVPGVIGLMRALTINDADDTDAGTYTVTVENANNLECSSCVKVVEVIRDWLVKPIRDQHVKPKGTAIFACDIAKDTPNIKWFKGYDEIPAEPNDKTEILRDGNHLYLKIKNAMPEDIAEYAVEIEGKRYPAKLTLGEREVELLKPIEDVTIYEKESASFDAEISEADIPGQWKLKGELLRPSPTCEIKAEGGKRFLTLHKVKLDQAGEVLYQALNAITTAILTVKEIELDFAVPLKDVTVPERRQARFECVLTREANVIWSKGPDIIKSSDKFDIIADGKKHILVINDSQFDDEGVYTAEVEGKKTSARLFVTGIRLKFMSPLEDQTVKEGETATFVCELSHEKMHVVWFKNDAKLHTSRTVLISSEGKTHKLEMKEVTLDDISQIKAQVKELSSTAQLKVLEADPYFTVKLHDKTAVEKDEITLKCEVSKDVPVKWFKDGEEIVPSPKYSIKADGLRRILKIKKADLKDKGEYVCDCGTDKTKANVTVEARLIKVEKPLYGVEVFVGETAHFEIELSEPDVHGQWKLKGQPLTASPDCEIIEDGKKHILILHNCQLGMTGEVSFQAANAKSAANLKVKELPLIFITPLSDVKVFEKDEAKFECEVSREPKTFRWLKGTQEITGDDRFELIKDGTKHSMVIKSAAFEDEAKYMFEAEDKHTSGKLIIEGIRLKFLTPLKDVTAKEKESAVFTVELSHDNIRVKWFKNDQRLHTTRSVSMQDEGKTHSITFKDLSIDDTSQIRVEAMGMSSEAKLTVLEGDPYFTGKLQDYTGVEKDEVILQCEISKADAPVKWFKDGKEIKPSKNAVIKADGKKRMLILKKALKSDIGQYTCDCGTDKTSGKLDIEDREIKLVRPLHSVEVMETETARFETEISEDDIHANWKLKGEALLQTPDCEIKEEGKIHSLVLHNCRLDQTGGVDFQAANVKSSAHLRVKPRVIGLLRPLKDVTVTAGETATFDCELSYEDIPVEWYLKGKKLEPSDKVVPRSEGKVHTLTLRDVKLEDAGEVQLTAKDFKTHANLFVKEPPVEFTKPLEDQTVEEGATAVLECEVSRENAKVKWFKNGTEILKSKKYEIVADGRVRKLVIHDCTPEDIKTYTCDAKDFKTSCNLNVVPPHVEFLRPLTDLQVREKEMARFECELSRENAKVKWFKDGAEIKKGKKYDIISKGAVRILVINKCLLDDEAEYSCEVRTARTSGMLTVLEEEAVFTKNLANIEVSETDTIKLVCEVSKPGAEVIWYKGDEEIIETGRYEILTEGRKRILVIQNAHLEDAGNYNCRLPSSRTDGKVKVHELAAEFISKPQNLEILEGEKAEFVCSISKESFPVQWKRDDKTLESGDKYDVIADGKKRVLVVKDATLQDMGTYVVMVGAARAAAHLTVIEKLRIVVPLKDTRVKEQQEVVFNCEVNTEGAKAKWFRNEEAIFDSSKYIILQKDLVYTLRIRDAHLDDQANYNVSLTNHRGENVKSAANLIVEEEDLRIVEPLKDIETMEKKSVTFWCKVNRLNVTLKWTKNGEEVPFDNRVSYRVDKYKHMLTIKDCGFPDEGEYIVTAGQDKSVAELLIIEAPTEFVEHLEDQTVTEFDDAVFSCQLSREKANVKWYRNGREIKEGKKYKFEKDGSIHRLIIKDCRLDDECEYACGVEDRKSRARLFVEEIPVEIIRPPQDILEAPGADVVFLAELNKDKVEVQWLRNNMVVVQGDKHQMMSEGKIHRLQICDIKPRDQGEYRFIAKDKEARAKLELAAAPKIKTADQDLVVDVGKPLTMVVPYDAYPKAEAEWFKENEPLSTKTIDTTAEQTSFRILEAKKGDKGRYKIVLQNKHGKAEGFINLKVIDVPGPVRNLEVTETFDGEVSLAWEEPLTDGGSKIIGYVVERRDIKRKTWVLATDRAESCEFTVTGLQKGGVEYLFRVSARNRVGTGEPVETDNPVEARSKYDVPGPPLNVTITDVNRFGVSLTWEPPEYDGGAEITNYVIELRDKTSIRWDTAMTVRAEDLSATVTDVVEGQEYSFRVRAQNRIGVGKPSAATPFVKVADPIERPSPPVNLTSSDQTQSSVQLKWEPPLKDGGSPILGYIIERCEEGKDNWIRCNMKLVPELTYKVTGLEKGNKYLYRVSAENKAGVSDPSEILGPLTADDAFVEPTMDLSAFKDGLEVIVPNPITILVPSTGYPRPTATWCFGDKVLETGDRVKMKTLSAYAELVISPSERSDKGIYTLKLENRVKTISGEIDVNVIARPSAPKELKFGDITKDSVHLTWEPPDDDGGSPLTGYVVEKREVSRKTWTKVMDFVTDLEFTVPDLVQGKEYLFKVCARNKCGPGEPAYVDEPVNMSTPATVPDPPENVKWRDRTANSIFLTWDPPKNDGGSRIKGYIVERCPRGSDKWVACGEPVAETKMEVTGLEEGKWYAYRVKALNRQGASKPSRPTEEIQAVDTQEAPEIFLDVKLLAGLTVKAGTKIELPATVTGKPEPKITWTKADMILKQDKRITIENVPKKSTVTIVDSKRSDTGTYIIEAVNVCGRATAVVEVNVLDKPGPPAAFDITDVTNESCLLTWNPPRDDGGSKITNYVVERRATDSEVWHKLSSTVKDTNFKATKLIPNKEYIFRVAAENMYGVGEPVQASPITAKYQFDPPGPPTRLEPSDITKDAVTLTWCEPDDDGGSPITGYWVERLDPDTDKWVRCNKMPVKDTTYRVKGLTNKKKYRFRVLAENLAGPGKPSKSTEPILIKDPIDPPWPPGKPTVKDVGKTSVRLNWTKPEHDGGAKIESYVIEMLKTGTDEWVRVAEGVPTTQHLLPGLMEGQEYSFRVRAVNKAGESEPSEPSDPVLCREKLYPPSPPRWLEVINITKNTADLKWTVPEKDGGSPITNYIVEKRDVRRKGWQTVDTTVKDTKCTVTPLTEGSLYVFRVAAENAIGQSDYTEIEDSVLAKDTFTTPGPPYALAVVDVTKRHVDLKWEPPKNDGGRPIQRYVIEKKERLGTRWVKAGKTAGPDCNFRVTDVIEGTEVQFQVRAENEAGVGHPSEPTEILSIEDPTSPPSPPLDLHVTDAGRKHIAIAWKPPEKNGGSPIIGYHVEMCPVGTEKWMRVNSRPIKDLKFKVEEGVVPDKEYVLRVRAVNAIGVSEPSEISENVVAKDPDCKPTIDLETHDIIVIEGEKLSIPVPFRAVPVPTVSWHKDGKEVKASDRLTMKNDHISAHLEVPKSVRADAGIYTITLENKLGSATASINVKVIGLPGPCKDIKASDITKSSCKLTWEPPEFDGGTPILHYVLERREAGRRTYIPVMSGENKLSWTVKDLIPNGEYFFRVKAVNKVGGGEYIELKNPVIAQDPKQPPDPPVDVEVHNPTAEAMTITWKPPLYDGGSKIMGYIIEKIAKGEERWKRCNEHLVPILTYTAKGLEEGKEYQFRVRAENAAGISEPSRATPPTKAVDPIDAPKVILRTSLEVKRGDEIALDASISGSPYPTITWIKDENVIVPEEIKKRAAPLVRRRKGEVQEEEPFVLPLTQRLSIDNSKKGESQLRVRDSLRPDHGLYMIKVENDHGIAKAPCTVSVLDTPGPPINFVFEDIRKTSVLCKWEPPLDDGGSEIINYTLEKKDKTKPDSEWIVVTSTLRHCKYSVTKLIEGKEYLFRVRAENRFGPGPPCVSKPLVAKDPFGPPDAPDKPIVEDVTSNSMLVKWNEPKDNGSPILGYWLEKREVNSTHWSRVNKSLLNALKANVDGLLEGLTYVFRVCAENAAGPGKFSPPSDPKTAHDPISPPGPPIPRVTDTSSTTIELEWEPPAFNGGGEIVGYFVDKQLVGTNEWSRCTEKMIKVRQYTVKEIREGADYKLRVSAVNAAGEGPPGETQPVTVAEPQEPPAVELDVSVKGGIQIMAGKTLRIPAVVTGRPVPTKVWTKEEGELDKDRVVIDNVGTKSELIIKDALRKDHGRYVITATNSCGSKFAAARVEVFDVPGPVLDLKPVVTNRKMCLLNWSDPEDDGGSEITGFIIERKDAKMHTWRQPIETERSKCDITGLLEGQEYKFRVIAKNKFGCGPPVEIGPILAVDPLGPPTSPERLTYTERTKSTITLDWKEPRSNGGSPIQGYIIEKRRHDKPDFERVNKRLCPTTSFLVENLDEHQMYEFRVKAVNEIGESEPSLPLNVVIQDDEVPPTIKLRLSVRGDTIKVKAGEPVHIPADVTGLPMPKIEWSKNETVIEKPTDALQITKEEVSRSEAKTELSIPKAVREDKGTYTVTASNRLGSVFRNVHVEVYDRPSPPRNLAVTDIKAESCYLTWDAPLDNGGSEITHYVIDKRDASRKKAEWEEVTNTAVEKRYGIWKLIPNGQYEFRVRAVNKYGISDECKSDKVVIQDPYRLPGPPGKPKVLARTKGSMLVSWTPPLDNGGSPITGYWLEKREEGSPYWSRVSRAPITKVGLKGVEFNVPRLLEGVKYQFRAMAINAAGIGPPSEPSDPEVAGDPIFPPGPPSCPEVKDKTKSSISLGWKPPAKDGGSPIKGYIVEMQEEGTTDWKRVNEPDKLITTCECVVPNLKELRKYRFRVKAVNEAGESEPSDTTGEIPATDIQEEPEVFIDIGAQDCLVCKAGSQIRIPAVIKGRPTPKSSWEFDGKAKKAMKDGVHDIPEDAQLETAENSSVIIIPECKRSHTGKYSITAKNKAGQKTANCRVKVMDVPGPPKDLKVSDITRGSCRLSWKMPDDDGGDRIKGYVIEKRTIDGKAWTKVNPDCGSTTFVVPDLLSEQQYFFRVRAENRFGIGPPVETIQRTTARDPIYPPDPPIKLKIGLITKNTVHLSWKPPKNDGGSPVTHYIVECLAWDPTGTKKEAWRQCNKRDVEELQFTVEDLVEGGEYEFRVKAVNAAGVSKPSATVGPVTVKDQTCPPSIDLKEFMEVEEGTNVNIVAKIKGVPFPTLTWFKAPPKKPDNKEPVLYDTHVNKLVVDDTCTLVIPQSRRSDTGLYTITAVNNLGTASKEMRLNVLGRPGPPVGPIKFESVSADQMTLSWFPPKDDGGSKITNYVIEKREANRKTWVHVSSEPKECTYTIPKLLEGHEYVFRIMAQNKYGIGEPLDSEPETARNLFSVPGAPDKPTVSSVTRNSMTVNWEEPEYDGGSPVTGYWLEMKDTTSKRWKRVNRDPIKAMTLGVSYKVTGLIEGSDYQFRVYAINAAGVGPASLPSDPATARDPIAPPGPPFPKVTDWTKSSADLEWSPPLKDGGSKVTGYIVEYKEEGKEEWEKGKDKEVRGTKLVVTGLKEGAFYKFRVRAVNIAGIGEPGEVTDVIEMKDRLVSPDLQLDASVRDRIVVHAGGVIRIIAYVSGKPPPTVTWNMNERTLPQEATIETTAISSSMVIKNCQRSHQGVYSLLAKNEAGERKKTIIVDVLDVPGPVGTPFLAHNLTNESCKLTWFSPEDDGGSPITNYVIEKRESDRRAWTPVTYTVTRQNATVQGLIQGKAYFFRIAAENSIGMGPFVETSEALVIREPITVPERPEDLEVKEVTKNTVTLTWNPPKYDGGSEIINYVLESRLIGTEKFHKVTNDNLLSRKYTVKGLKEGDTYEYRVSAVNIVGQGKPSFCTKPITCKDELAPPTLHLDFRDKLTIRVGEAFALTGRYSGKPKPKVSWFKDEADVLEDDRTHIKTTPATLALEKIKAKRSDSGKYCVVVENSTGSRKGFCQVNVVDRPGPPVGPVSFDEVTKDYMVISWKPPLDDGGSKITNYIIEKKEVGKDVWMPVTSASAKTTCKVSKLLEGKDYIFRIHAENLYGISDPLVSDSMKAKDRFRVPDAPDQPIVTEVTKDSALVTWNKPHDGGKPITNYILEKRETMSKRWARVTKDPIHPYTKFRVPDLLEGCQYEFRVSAENEIGIGDPSPPSKPVFAKDPIAKPSPPVNPEAIDTTCNSVDLTWQPPRHDGGSKILGYIVEYQKVGDEEWRRANHTPESCPETKYKVTGLRDGQTYKFRVLAVNAAGESDPAHVPEPVLVKDRLEPPELILDANMAREQHIKVGDTLRLSAIIKGVPFPKVTWKKEDRDAPTKARIDVTPVGSKLEIRNAAHEDGGIYSLTVENPAGSKTVSVKVLVLDKPGPPRDLEVSEIRKDSCYLTWKEPLDDGGSVITNYVVERRDVASAQWSPLSATSKKKSHFAKHLNEGNQYLFRVAAENQYGRGPFVETPKPIKALDPLHPPGPPKDLHHVDVDKTEVSLVWNKPDRDGGSPITGYLVEYQEEGTQDWIKFKTVTNLECVVTGLQQGKTYRFRVKAENIVGLGLPDTTIPIECQEKLVPPSVELDVKLIEGLVVKAGTTVRFPAIIRGVPVPTAKWTTDGSEIKTDEHYTVETDNFSSVLTIKNCLRRDTGEYQITVSNAAGSKTVAVHLTVLDVPGPPTGPINILDVTPEHMTISWQPPKDDGGSPVINYIVEKQDTRKDTWGVVSSGSSKTKLKIPHLQKGCEYVFRVRAENKIGVGPPLDSTPTVAKHKFSPPSPPGKPVVTDITENAATVSWTLPKSDGGSPITGYYMERREVTGKWVRVNKTPIADLKFRVTGLYEGNTYEFRVFAENLAGLSKPSPSSDPIKACRPIKPPGPPINPKLKDKSRETADLVWTKPLSDGGSPILGYVVECQKPGTAQWNRINKDELIRQCAFRVPGLIEGNEYRFRIKAANIVGEGEPRELAESVIAKDILHPPEVELDVTCRDVITVRVGQTIRILARVKGRPEPDITWTKEGKVLVREKRVDLIQDLPRVELQIKEAVRADHGKYIISAKNSSGHAQGSAIVNVLDRPGPCQNLKVTNVTKENCTISWENPLDNGGSEITNFIVEYRKPNQKGWSIVASDVTKRLIKANLLANNEYYFRVCAENKVGVGPTIETKTPILAINPIDRPGEPENLHIADKGKTFVYLKWRRPDYDGGSPNLSYHVERRLKGSDDWERVHKGSIKETHYMVDRCVENQIYEFRVQTKNEGGESDWVKTEEVVVKEDLQKPVLDLKLSGVLTVKAGDTIRLEAGVRGKPFPEVAWTKDKDATDLTRSPRVKIDTRADSSKFSLTKAKRSDGGKYVVTATNTAGSFVAYATVNVLDKPGPVRNLKIVDVSSDRCTVCWDPPEDDGGCEIQNYILEKCETKRMVWSTYSATVLTPGTTVTRLIEGNEYIFRVRAENKIGTGPPTESKPVIAKTKYDKPGRPDPPEVTKVSKEEMTVVWNPPEYDGGKSITGYFLEKKEKHSTRWVPVNKSAIPERRMKVQNLLPDHEYQFRVKAENEIGIGEPSLPSRPVVAKDPIEPPGPPTNFRVVDTTKHSITLGWGKPVYDGGAPIIGYVVEMRPKIADASPDEGWKRCNAAAQLVRKEFTVTSLDENQEYEFRVCAQNQVGIGRPAELKEAIKPKEILEPPEIDLDASMRKLVIVRAGCPIRLFAIVRGRPAPKVTWRKVGIDNVVRKGQVDLVDTMAFLVIPNSTRDDSGKYSLTLVNPAGEKAVFVNVRVLDTPGPVSDLKVSDVTKTSCHVSWAPPENDGGSQVTHYIVEKREADRKTWSTVTPEVKKTSFHVTNLVPGNEYYFRVTAVNEYGPGVPTDVPKPVLASDPLSEPDPPRKLEVTEMTKNSATLAWLPPLRDGGAKIDGYITSYREEEQPADRWTEYSVVKDLSLVVTGLKEGKKYKFRVAARNAVGVSLPREAEGVYEAKEQLLPPKILMPEQITIKAGKKLRIEAHVYGKPHPTCKWKKGEDEVVTSSHLAVHKADSSSILIIKDVTRKDSGYYSLTAENSSGTDTQKIKVVVMDAPGPPQPPFDISDIDADACSLSWHIPLEDGGSNITNYIVEKCDVSRGDWVTALASVTKTSCRVGKLIPGQEYIFRVRAENRFGISEPLTSPKMVAQFPFGVPSEPKNARVTKVNKDCIFVAWDRPDSDGGSPIIGYLIERKERNSLLWVKANDTLVRSTEYPCAGLVEGLEYSFRIYALNKAGSSPPSKPTEYVTARMPVDPPGKPEVIDVTKSTVSLIWARPKHDGGSKIIGYFVEACKLPGDKWVRCNTAPHQIPQEEYTATGLEEKAQYQFRAIARTAVNISPPSEPSDPVTILAENVPPRIDLSVAMKSLLTVKAGTNVCLDATVFGKPMPTVSWKKDGTLLKPAEGIKMAMQRNLCTLELFSVNRKDSGDYTITAENSSGSKSATIKLKVLDKPGPPASVKINKMYSDRAMLSWEPPLEDGGSEITNYIVDKRETSRPNWAQVSATVPITSCSVEKLIEGHEYQFRICAENKYGVGDPVFTEPAIAKNPYDPPGRCDPPVISNITKDHMTVSWKPPADDGGSPITGYLLEKRETQAVNWTKVNRKPIIERTLKATGLQEGTEYEFRVTAINKAGPGKPSDASKAAYARDPQYPPGPPAFPKVYDTTRSSVSLSWGKPAYDGGSPIIGYLVEVKRADSDNWVRCNLPQNLQKTRFEVTGLMEDTQYQFRVYAVNKIGYSDPSDVPDKHYPKDILIPPEGELDADLRKTLILRAGVTMRLYVPVKGRPPPKITWSKPNVNLRDRIGLDIKSTDFDTFLRCENVNKYDAGKYILTLENSCGKKEYTIVVKVLDTPGPPVNVTVKEISKDSAYVTWEPPIIDGGSPIINYVVQKRDAERKSWSTVTTECSKTSFRVANLEEGKSYFFRVFAENEYGIGDPGETRDAVKASQTPGPVVDLKVRSVSKSSCSIGWKKPHSDGGSRIIGYVVDFLTEENKWQRVMKSLSLQYSAKDLTEGKEYTFRVSAENENGEGTPSEITVVARDDVVAPDLDLKGLPDLCYLAKENSNFRLKIPIKGKPAPSVSWKKGEDPLATDTRVSVESSAVNTTLIVYDCQKSDAGKYTITLKNVAGTKEGTISIKVVGKPGIPTGPIKFDEVTAEAMTLKWAPPKDDGGSEITNYILEKRDSVNNKWVTCASAVQKTTFRVTRLHEGMEYTFRVSAENKYGVGEGLKSEPIVARHPFDVPDAPPPPNIVDVRHDSVSLTWTDPKKTGGSPITGYHLEFKERNSLLWKRANKTPIRMRDFKVTGLTEGLEYEFRVMAINLAGVGKPSLPSEPVVALDPIDPPGKPEVINITRNSVTLIWTEPKYDGGHKLTGYIVEKRDLPSKSWMKANHVNVPECAFTVTDLVEGGKYEFRIRAKNTAGAISAPSESTETIICKDEYEAPTIVLDPTIKDGLTIKAGDTIVLNAISILGKPLPKSSWSKAGKDIRPSDITQITSTPTSSMLTIKYATRKDAGEYTITATNPFGTKVEHVKVTVLDVPGPPGPVEISNVSAEKATLTWTPPLEDGGSPIKSYILEKRETSRLLWTVVSEDIQSCRHVATKLIQGNEYIFRVSAVNHYGKGEPVQSEPVKMVDRFGPPGPPEKPEVSNVTKNTATVSWKRPVDDGGSEITGYHVERREKKSLRWVRAIKTPVSDLRCKVTGLQEGSTYEFRVSAENRAGIGPPSEASDSVLMKDAAYPPGPPSNPHVTDTTKKSASLAWGKPHYDGGLEITGYVVEHQKVGDEAWIKDTTGTALRITQFVVPDLQTKEKYNFRISAINDAGVGEPAVIPDVEIVEREMAPDFELDAELRRTLVVRAGLSIRIFVPIKGRPAPEVTWTKDNINLKNRANIENTESFTLLIIPECNRYDTGKFVMTIENPAGKKSGFVNVRVLDTPGPVLNLRPTDITKDSVTLHWDLPLIDGGSRITNYIVEKREATRKSYSTATTKCHKCTYKVTGLSEGCEYFFRVMAENEYGIGEPTETTEPVKASEAPSPPDSLNIMDITKSTVSLAWPKPKHDGGSKITGYVIEAQRKGSDQWTHITTVKGLECVVRNLTEGEEYTFQVMAVNSAGRSAPRESRPVIVKEQTMLPELDLRGIYQKLVIAKAGDNIKVEIPVLGRPKPTVTWKKGDQILKQTQRVNFETTATSTILNINECVRSDSGPYPLTARNIVGEVGDVITIQVHDIPGPPTGPIKFDEVSSDFVTFSWDPPENDGGVPISNYVVEMRQTDSTTWVELATTVIRTTYKATRLTTGLEYQFRVKAQNRYGVGPGITSACIVANYPFKVPGPPGTPQVTAVTKDSMTISWHEPLSDGGSPILGYHVERKERNGILWQTVSKALVPGNIFKSSGLTDGIAYEFRVIAENMAGKSKPSKPSEPMLALDPIDPPGKPVPLNITRHTVTLKWAKPEYTGGFKITSYIVEKRDLPNGRWLKANFSNILENEFTVSGLTEDAAYEFRVIAKNAAGAISPPSEPSDAITCRDDVEAPKIKVDVKFKDTVILKAGEAFRLEADVSGRPPPTMEWSKDGKELEGTAKLEIKIADFSTNLVNKDSTRRDSGAYTLTATNPGGFAKHIFNVKVLDRPGPPEGPLAVTEVTSEKCVLSWFPPLDDGGAKIDHYIVQKRETSRLAWTNVASEVQVTKLKVTKLLKGNEYIFRVMAVNKYGVGEPLESEPVLAVNPYGPPDPPKNPEVTTITKDSMVVCWGHPDSDGGSEIINYIVERRDKAGQRWIKCNKKTLTDLRYKVSGLTEGHEYEFRIMAENAAGISAPSPTSPFYKACDTVFKPGPPGNPRVLDTSRSSISIAWNKPIYDGGSEITGYMVEIALPEEDEWQIVTPPAGLKATSYTITGLTENQEYKIRIYAMNSEGLGEPALVPGTPKAEDRMLPPEIELDADLRKVVTIRACCTLRLFVPIKGRPAPEVKWARDHGESLDKASIESTSSYTLLIVGNVNRFDSGKYILTVENSSGSKSAFVNVRVLDTPGPPQDLKVKEVTKTSVTLTWDPPLLDGGSKIKNYIVEKRESTRKAYSTVATNCHKTSWKVDQLQEGCSYYFRVLAENEYGIGLPAETAESVKASERPLPPGKITLMDVTRNSVSLSWEKPEHDGGSRILGYIVEMQTKGSDKWATCATVKVTEATITGLIQGEEYSFRVSAQNEKGISDPRQLSVPVIAKDLVIPPAFKLLFNTFTVLAGEDLKVDVPFIGRPTPAVTWHKDNVPLKQTTRVNAESTENNSLLTIKDACREDVGHYVVKLTNSAGEAIETLNVIVLDKPGPPTGPVKMDEVTADSITLSWGPPKYDGGSSINNYIVEKRDTSTTTWQIVSATVARTTIKACRLKTGCEYQFRIAAENRYGKSTYLNSEPTVAQYPFKVPGPPGTPVVTLSSRDSMEVQWNEPISDGGSRVIGYHLERKERNSILWVKLNKTPIPQTKFKTTGLEEGVEYEFRVSAENIVGIGKPSKVSECYVARDPCDPPGRPEAIIVTRNSVTLQWKKPTYDGGSKITGYIVEKKELPEGRWMKASFTNIIDTHFEVTGLVEDHRYEFRVIARNAAGVFSEPSESTGAITARDEVDPPRISMDPKYKDTIVVHAGESFKVDADIYGKPIPTIQWIKGDQELSNTARLEIKSTDFATSLSVKDAVRVDSGNYILKAKNVAGERSVTVNVKVLDRPGPPEGPVVISGVTAEKCTLAWKPPLQDGGSDIINYIVERRETSRLVWTVVDANVQTLSCKVTKLLEGNEYTFRIMAVNKYGVGEPLESEPVVAKNPFVVPDAPKAPEVTTVTKDSMIVVWERPASDGGSEILGYVLEKRDKEGIRWTRCHKRLIGELRLRVTGLIENHDYEFRVSAENAAGLSEPSPPSAYQKACDPIYKPGPPNNPKVIDITRSSVFLSWSKPIYDGGCEIQGYIVEKCDVSVGEWTMCTPPTGINKTNIEVEKLLEKHEYNFRICAINKAGVGEHADVPGPIIVEEKLEAPDIDLDLELRKIINIRAGGSLRLFVPIKGRPTPEVKWGKVDGEIRDAAIIDVTSSFTSLVLDNVNRYDSGKYTLTLENSSGTKSAFVTVRVLDTPSPPVNLKVTEITKDSVSITWEPPLLDGGSKIKNYIVEKREATRKSYAAVVTNCHKNSWKIDQLQEGCSYYFRVTAENEYGIGLPAQTADPIKVAEVPQPPGKITVDDVTRNSVSLSWTKPEHDGGSKIIQYIVEMQAKHSEKWSECARVKSLQAVITNLTQGEEYLFRVVAVNEKGRSDPRSLAVPIVAKDLVIEPDVKPAFSSYSVQVGQDLKIEVPISGRPKPTITWTKDGLPLKQTTRINVTDSLDLTTLSIKETHKDDGGQYGITVANVVGQKTASIEIVTLDKPDPPKGPVKFDDVSAESITLSWNPPLYTGGCQITNYIVQKRDTTTTVWDVVSATVARTTLKVTKLKTGTEYQFRIFAENRYGQSFALESDPIVAQYPYKEPGPPGTPFATAISKDSMVIQWHEPVNNGGSPVIGYHLERKERNSILWTKVNKTIIHDTQFKAQNLEEGIEYEFRVYAENIVGVGKASKNSECYVARDPCDPPGTPEPIMVKRNEITLQWTKPVYDGGSMITGYIVEKRDLPDGRWMKASFTNVIETQFTVSGLTEDQRYEFRVIAKNAAGAISKPSDSTGPITAKDEVELPRISMDPKFRDTIVVNAGETFRLEADVHGKPLPTIEWLRGDKEIEESARCEIKNTDFKALLIVKDAIRIDGGQYILRASNVAGSKSFPVNVKVLDRPGPPEGPVQVTGVTSEKCSLTWSPPLQDGGSDISHYVVEKRETSRLAWTVVASEVVTNSLKVTKLLEGNEYVFRIMAVNKYGVGEPLESAPVLMKNPFVLPGPPKSLEVTNIAKDSMTVCWNRPDSDGGSEIIGYIVEKRDRSGIRWIKCNKRRITDLRLRVTGLTEDHEYEFRVSAENAAGVGEPSPATVYYKACDPVFKPGPPTNAHIVDTTKNSITLAWGKPIYDGGSEILGYVVEICKADEEEWQIVTPQTGLRVTRFEISKLTEHQEYKIRVCALNKVGLGEATSVPGTVKPEDKLEAPELDLDSELRKGIVVRAGGSARIHIPFKGRPTPEITWSREEGEFTDKVQIEKGVNYTQLSIDNCDRNDAGKYILKLENSSGSKSAFVTVKVLDTPGPPQNLAVKEVRKDSAFLVWEPPIIDGGAKVKNYVIDKRESTRKAYANVSSKCSKTSFKVENLTEGAIYYFRVMAENEFGVGVPVETVDAVKAAEPPSPPGKVTLTDVSQTSASLMWEKPEHDGGSRVLGYVVEMQPKGTEKWSIVAESKVCNAVVTGLSSGQEYQFRVKAYNEKGKSDPRVLGVPVIAKDLTIQPSLKLPFNTYSIQAGEDLKIEIPVIGRPRPNISWVKDGEPLKQTTRVNVEETATSTVLHIKEGNKDDFGKYTVTATNSAGTATENLSVIVLEKPGPPVGPVRFDEVSADFVVISWEPPAYTGGCQISNYIVEKRDTTTTTWHMVSATVARTTIKITKLKTGTEYQFRIFAENRYGKSAPLDSKAVIVQYPFKEPGPPGTPFVTSISKDQMLVQWHEPVNDGGTKIIGYHLEQKEKNSILWVKLNKTPIQDTKFKTTGLDEGLEYEFKVSAENIVGIGKPSKVSECFVARDPCDPPGRPEAIVITRNNVTLKWKKPAYDGGSKITGYIVEKKDLPDGRWMKASFTNVLETEFTVSGLVEDQRYEFRVIARNAAGNFSEPSDSSGAITARDEIDAPNASLDPKYKDVIVVHAGETFVLEADIRGKPIPDVVWSKDGKELEETAARMEIKSTIQKTTLVVKDCIRTDGGQYILKLSNVGGTKSIPITVKVLDRPGPPEGPLKVTGVTAEKCYLAWNPPLQDGGANISHYIIEKRETSRLSWTQVSTEVQALNYKVTKLLPGNEYIFRVMAVNKYGIGEPLESGPVTACNPYKPPGPPSTPEVSAITKDSMVVTWARPVDDGGTEIEGYILEKRDKEGVRWTKCNKKTLTDLRLRVTGLTEGHSYEFRVAAENAAGVGEPSEPSVFYRACDALYPPGPPSNPKVTDTSRSSVSLAWSKPIYDGGAPVKGYVVEVKEAAADEWTTCTPPTGLQGKQFTVTKLKENTEYNFRICAINSEGVGEPATLPGSVVAQERIEPPEIELDADLRKVVVLRASATLRLFVTIKGRPEPEVKWEKAEGILTDRAQIEVTSSFTMLVIDNVTRFDSGRYNLTLENNSGSKTAFVNVRVLDSPSAPVNLTIREVKKDSVTLSWEPPLIDGGAKITNYIVEKRETTRKAYATITNNCTKTTFRIENLQEGCSYYFRVLASNEYGIGLPAETTEPVKVSEPPLPPGRVTLVDVTRNTATIKWEKPESDGGSKITGYVVEMQTKGSEKWSTCTQVKTLEATISGLTAGEEYVFRVAAVNEKGRSDPRQLGVPVIARDIEIKPSVELPFHTFNVKAREQLKIDVPFKGRPQATVNWRKDGQTLKETTRVNVSSSKTVTSLSIKEASKEDVGTYELCVSNSAGSITVPITIIVLDRPGPPGPIRIDEVSCDSITISWNPPEYDGGCQISNYIVEKKETTSTTWHIVSQAVARTSIKIVRLTTGSEYQFRVCAENRYGKSSYSESSAVVAEYPFSPPGPPGTPKVVHATKSTMLVTWQVPVNDGGSRVIGYHLEYKERSSILWSKANKILIADTQMKVSGLDEGLMYEYRVYAENIAGIGKCSKSCEPVPARDPCDPPGQPEVTNITRKSVSLKWSKPHYDGGAKITGYIVERRELPDGRWLKCNYTNIQETYFEVTELTEDQRYEFRVFARNAADSVSEPSESTGPIIVKDDVEPPRVMMDVKFRDVIVVKAGEVLKINADIAGRPLPVISWAKDGIEIEERARTEIISTDNHTLLTVKDCIRRDTGQYVLTLKNVAGTRSVAVNCKVLDKPGPPAGPLEINGLTAEKCSLSWGRPQEDGGADIDYYIVEKRETSHLAWTICEGELQMTSCKVTKLLKGNEYIFRVTGVNKYGVGEPLESVAIKALDPFTVPSPPTSLEITSVTKESMTLCWSRPESDGGSEISGYIIERREKNSLRWVRVNKKPVYDLRVKSTGLREGCEYEYRVYAENAAGLSLPSETSPLIRAEDPVFLPSPPSKPKIVDSGKTTITIAWVKPLFDGGAPITGYTVEYKKSDDTDWKTSIQSLRGTEYTISGLTTGAEYVFRVKSVNKVGASDPSDSSDPQIAKEREEEPLFDIDSEMRKTLIVKAGASFTMTVPFRGRPVPNVLWSKPDTDLRTRAYVDTTDSRTSLTIENANRNDSGKYTLTIQNVLSAASLTLVVKVLDTPGPPTNITVQDVTKESAVLSWDVPENDGGAPVKNYHIEKREASKKAWVSVTNNCNRLSYKVTNLQEGAIYYFRVSGENEFGVGIPAETKEGVKITEKPSPPEKLGVTSISKDSVSLTWLKPEHDGGSRIVHYVVEALEKGQKNWVKCAVAKSTHHVVSGLRENSEYFFRVFAENQAGLSDPRELLLPVLIKEQLEPPEIDMKNFPSHTVYVRAGSNLKVDIPISGKPLPKVTLSRDGVPLKATMRFNTEITAENLTINLKESVTADAGRYEITAANSSGTTKAFINIVVLDRPGPPTGPVVISDITEESVTLKWEPPKYDGGSQVTNYILLKRETSTAVWTEVSATVARTMMKVMKLTTGEEYQFRIKAENRFGISDHIDSACVTVKLPYTTPGPPSTPWVTNVTRESITVGWHEPVSNGGSAVVGYHLEMKDRNSILWQKANKLVIRTTHFKVTTISAGLIYEFRVYAENAAGVGKPSHPSEPVLAIDACEPPRNVRITDISKNSVSLSWQQPAFDGGSKITGYIVERRDLPDGRWTKASFTNVTETQFIISGLTQNSQYEFRVFARNAVGSISNPSEVVGPITCIDSYGGPVIDLPLEYTEVVKYRAGTSVKLRAGISGKPAPTIEWYKDDKELQTNALVCVENTTDLASILIKDADRLNSGCYELKLRNAMGSASATIRVQILDKPGPPGGPIEFKTVTAEKITLLWRPPADDGGAKITHYIVEKRETSRVVWSMVSEHLEECIITTTKIIKGNEYIFRVRAVNKYGIGEPLESDSVVAKNAFVTPGPPGIPEVTKITKNSMTVVWSRPIADGGSDISGYFLEKRDKKSLGWFKVLKETIRDTRQKVTGLTENSDYQYRVCAVNAAGQGPFSEPSEFYKAADPIDPPGPPAKIRIADSTKSSITLGWSKPVYDGGSAVTGYVVEIRQGEEEEWTTVSTKGEVRTTEYVVSNLKPGVNYYFRVSAVNCAGQGEPIEMNEPVQAKDILEAPEIDLDVALRTSVIAKAGEDVQVLIPFKGRPPPTVTWRKDEKNLGSDARYSIENTDSSSLLTIPQVTRNDTGKYILTIENGVGEPKSSTVSVKVLDTPAACQKLQVKHVSRGTVTLLWDPPLIDGGSPIINYVIEKRDATKRTWSVVSHKCSSTSFKLIDLSEKTPFFFRVLAENEIGIGEPCETTEPVKAAEVPAPIRDLSMKDSTKTSVILSWTKPDFDGGSVITEYVVERKGKGEQTWSHAGISKTCEIEVSQLKEQSVLEFRVFAKNEKGLSDPVTIGPITVKELIITPEVDLSDIPGAQVTVRIGHNVHLELPYKGKPKPSISWLKDGLPLKESEFVRFSKTENKITLSIKNAKKEHGGKYTVILDNAVCRIAVPITVITLGPPSKPKGPIRFDEIKADSVILSWDVPEDNGGGEITCYSIEKRETSQTNWKMVCSSVARTTFKVPNLVKDAEYQFRVRAENRYGVSQPLVSSIIVAKHQFRIPGPPGKPVIYNVTSDGMSLTWDAPVYDGGSEVTGFHVEKKERNSILWQKVNTSPISGREYRATGLVEGLDYQFRVYAENSAGLSSPSDPSKFTLAVSPVDPPGTPDYIDVTRETITLKWNPPLRDGGSKIVGYSIEKRQGNERWVRCNFTDVSECQYTVTGLSPGDRYEFRIIARNAVGTISPPSQSSGIIMTRDENVPPIVEFGPEYFDGLIIKSGESLRIKALVQGRPVPRVTWFKDGVEIEKRMNMEITDVLGSTSLFVRDATRDHRGVYTVEAKNASGSAKAEIKVKVQDTPGKVVGPIRFTNITGEKMTLWWDAPLNDGCAPITHYIIEKRETSRLAWALIEDKCEAQSYTAIKLINGNEYQFRVSAVNKFGVGRPLDSDPVVAQIQYTVPDAPGIPEPSNITGNSITLTWARPESDGGSEIQQYILERREKKSTRWVKVISKRPISETRFKVTGLTEGNEYEFHVMAENAAGVGPASGISRLIKCREPVNPPGPPTVVKVTDTSKTTVSLEWSKPVFDGGMEIIGYIIEMCKADLGDWHKVNAEACVKTRYTVTDLQAGEEYKFRVSAINGAGKGDSCEVTGTIKAVDRLTAPELDIDANFKQTHVVRAGASIRLFIAYQGRPTPTAVWSKPDSNLSLRADIHTTDSFSTLTVENCNRNDAGKYTLTVENNSGSKSITFTVKVLDTPGPPGPITFKDVTRGSATLMWDAPLLDGGARIHHYVVEKREASRRSWQVISEKCTRQIFKVNDLAEGVPYYFRVSAVNEYGVGEPYEMPEPIVATEQPAPPRRLDVVDTSKSSAVLAWLKPDHDGGSRITGYLLEMRQKGSDFWVEAGHTKQLTFTVERLVEKTEYEFRVKAKNDAGYSEPREAFSSVIIKEPQIEPTADLTGITNQLITCKAGSPFTIDVPISGRPAPKVTWKLEEMRLKETDRVSITTTKDRTTLTVKDSMRGDSGRYFLTLENTAGVKTFSVTVVVIGRPGPVTGPIEVSSVSAESCVLSWGEPKDGGGTEITNYIVEKRESGTTAWQLVNSSVKRTQIKVTHLTKYMEYSFRVSSENRFGVSKPLESAPIIAEHPFVPPSAPTRPEVYHVSANAMSIRWEEPYHDGGSKIIGYWVEKKERNTILWVKENKVPCLECNYKVTGLVEGLEYQFRTYALNAAGVSKASEASRPIMAQNPVDAPGRPEVTDVTRSTVSLIWSAPAYDGGSKVVGYIIERKPVSEVGDGRWLKCNYTIVSDNFFTVTALSEGDTYEFRVLAKNAAGVISKGSESTGPVTCRDEYAPPKAELDARLHGDLVTIRAGSDLVLDAAVGGKPEPKIIWTKGDKELDLCEKVSLQYTGKRATAVIKFCDRSDSGKYTLTVKNASGTKAVSVMVKVLDSPGPCGKLTVSRVTQEKCTLAWSLPQEDGGAEITHYIVERRETSRLNWVIVEGECPTLSYVVTRLIKNNEYIFRVRAVNKYGPGVPVESEPIVARNSFTIPSPPGIPEEVGTGKEHIIIQWTKPESDGGNEISNYLVDKREKKSLRWTRVNKDYVVYDTRLKVTSLMEGCDYQFRVTAVNAAGNSEPSEASNFISCREPSYTPGPPSAPRVVDTTKHSISLAWTKPMYDGGTDIVGYVLEMQEKDTDQWYRVHTNATIRNTEFTVPDLKMGQKYSFRVAAVNVKGMSEYSESIAEIEPVERIEIPDLELADDLKKTVTIRAGASLRLMVSVSGRPPPVITWSKQGIDLASRAIIDTTESYSLLIVDKVNRYDAGKYTIEAENQSGKKSATVLVKVYDTPGPCPSVKVKEVSRDSVTITWEIPTIDGGAPVNNYIVEKREAAMRAFKTVTTKCSKTLYRISGLVEGTMYYFRVLPENIYGIGEPCETSDAVLVSEVPLVPAKLEVVDVTKSTVTLAWEKPLYDGGSRLTGYVLEACKAGTERWMKVVTLKPTVLEHTVTSLNEGEQYLFRIRAQNEKGVSEPRETVTAVTVQDLRVLPTIDLSTMPQKTIHVPAGRPVELVIPIAGRPPPAASWFFAGSKLRESERVTVETHTKVAKLTIRETTIRDTGEYTLELKNVTGTTSETIKVIILDKPGPPTGPIKIDEIDATSITISWEPPELDGGAPLSGYVVEQRDAHRPGWLPVSESVTRSTFKFTRLTEGNEYVFRVAATNRFGIGSYLQSEVIECRSSIRIPGPPETLQIFDVSRDGMTLTWYPPEDDGGSQVTGYIVERKEVRADRWVRVNKVPVTMTRYRSTGLTEGLEYEHRVTAINARGSGKPSRPSKPIVAMDPIAPPGKPQNPRVTDTTRTSVSLAWSVPEDEGGSKVTGYLIEMQKVDQHEWTKCNTTPTKIREYTLTHLPQGAEYRFRVLACNAGGPGEPAEVPGTVKVTEMLEYPDYELDERYQEGIFVRQGGVIRLTIPIKGKPFPICKWTKEGQDISKRAMIATSETHTELVIKEADRGDSGTYDLVLENKCGKKAVYIKVRVIGSPNSPEGPLEYDDIQVRSVRVSWRPPADDGGADILGYILERREVPKAAWYTIDSRVRGTSLVVKGLKENVEYHFRVSAENQFGISKPLKSEEPVTPKTPLNPPEPPSNPPEVLDVTKSSVSLSWSRPKDDGGSRVTGYYIERKETSTDKWVRHNKTQITTTMYTVTGLVPDAEYQFRIIAQNDVGLSETSPASEPVVCKDPFDKPSQPGELEILSISKDSVTLQWEKPECDGGKEILGYWVEYRQSGDSAWKKSNKERIKDKQFTIGGLLEATEYEFRVFAENETGLSRPRRTAMSIKTKLTSGEAPGIRKEMKDVTTKLGEAAQLSCQIVGRPLPDIKWYRFGKELIQSRKYKMSSDGRTHTLTVMTEEQEDEGVYTCIATNEVGEVETSSKLLLQATPQFHPGYPLKEKYYGAVGSTLRLHVMYIGRPVPAMTWFHGQKLLQNSENITIENTEHYTHLVMKNVQRKTHAGKYKVQLSNVFGTVDAILDVEIQDKPDKPTGPIVIEALLKNSAVISWKPPADDGGSWITNYVVEKCEAKEGAEWQLVSSAISVTTCRIVNLTENAGYYFRVSAQNTFGISDPLEVSSVVIIKSPFEKPGAPGKPTITAVTKDSCVVAWKPPASDGGAKIRNYYLEKREKKQNKWISVTTEEIRETVFSVKNLIEGLEYEFRVKCENLGGESEWSEISEPITPKSDVPIQAPHFKEELRNLNVRYQSNATLVCKVTGHPKPIVKWYRQGKEIIADGLKYRIQEFKGGYHQLIIASVTDDDATVYQVRATNQGGSVSGTASLEVEVPAKIHLPKTLEGMGAVHALRGEVVSIKIPFSGKPDPVITWQKGQDLIDNNGHYQVIVTRSFTSLVFPNGVERKDAGFYVVCAKNRFGIDQKTVELDVADVPDPPRGVKVSDVSRDSVNLTWTEPASDGGSKITNYIVEKCATTAERWLRVGQARETRYTVINLFGKTSYQFRVIAENKFGLSKPSEPSEPTITKEDKTRAMNYDEEVDETREVSMTKASHSSTKELYEKYMIAEDLGRGEFGIVHRCVETSSKKTYMAKFVKVKGTDQVLVKKEISILNIARHRNILHLHESFESMEELVMIFEFISGLDIFERINTSAFELNEREIVSYVHQVCEALQFLHSHNIGHFDIRPENIIYQTRRSSTIKIIEFGQARQLKPGDNFRLLFTAPEYYAPEVHQHDVVSTATDMWSLGTLVYVLLSGINPFLAETNQQIIENIMNAEYTFDEEAFKEISIEAMDFVDRLLVKERKSRMTASEALQHPWLKQKIERVSTKVIRTLKHRRYYHTLIKKDLNMVVSAARISCGGAIRSQKGVSVAKVKVASIEIGPVSGQIMHAVGEEGGHVKYVCKIENYDQSTQVTWYFGVRQLENSEKYEITYEDGVAILYVKDITKLDDGTYRCKVVNDYGEDSSYAELFVKGVREVYDYYCRRTMKKIKRRTDTMRLLERPPEFTLPLYNKTAYVGENVRFGVTITVHPEPHVTWYKSGQKIKPGDNDKKYTFESDKGLYQLTINSVTTDDDAEYTVVARNKYGEDSCKAKLTVTLHPPPTDSTLRPMFKRLLANAECQEGQSVCFEIRVSGIPPPTLKWEKDGQPLSLGPNIEIIHEGLDYYALHIRDTLPEDTGYYRVTATNTAGSTSCQAHLQVERLRYKKQEFKSKEEHERHVQKQIDKTLRMAEILSGTESVPLTQVAKEALREAAVLYKPAVSTKTVKGEFRLEIEEKKEERKLRMPYDVPEPRKYKQTTIEEDQRIKQFVPMSDMKWYKKIRDQYEMPGKLDRVVQKRPKRIRLSRWEQFYVMPLPRITDQYRPKWRIPKLSQDDLEIVRPARRRTPSPDYDFYYRPRRRSLGDISDEELLLPIDDYLAMKRTEEERLRLEEELELGFSASPPSRSPPHFELSSLRYSSPQAHVKVEETRKDFRYSTYHIPTKAEASTSYAELRERHAQAAYRQPKQRQRIMAEREDEELLRPVTTTQHLSEYKSELDFMSKEEKSRKKSRRQREVTEITEIEEEYEISKHAQRESSSSASRLLRRRRSLSPTYIELMRPVSELIRSRPQPAEEYEDDTERRSPTPERTRPRSPSPVSSERSLSRFERSARFDIFSRYESMKAALKTQKTSERKYEVLSQQPFTLDHAPRITLRMRSHRVPCGQNTRFILNVQSKPTAEVKWYHNGVELQESSKIHYTNTSGVLTLEILDCHTDDSGTYRAVCTNYKGEASDYATLDVTGGDYTTYASQRRDEEVPRSVFPELTRTEAYAVSSFKKTSEMEASSSVREVKSQMTETRESLSSYEHSASAEMKSAALEEKSLEEKSTTRKIKTTLAARILTKPRSMTVYEGESARFSCDTDGEPVPTVTWLRKGQVLSTSARHQVTTTKYKSTFEISSVQASDEGNYSVVVENSEGKQEAEFTLTIQKARVTEKAVTSPPRVKSPEPRVKSPEAVKSPKRVKSPEPSHPKAVSPTETKPTPTEKVQHLPVSAPPKITQFLKAEASKEIAKLTCVVESSVLRAKEVTWYKDGKKLKENGHFQFHYSADGTYELKINNLTESDQGEYVCEISGEGGTSKTNLQFMGQAFKSIHEKVSKISETKKSDQKTTESTVTRKTEPKAPEPISSKPVIVTGLQDTTVSSDSVAKFAVKATGEPRPTAIWTKDGKAITQGGKYKLSEDKGGFFLEIHKTDTSDSGLYTCTVKNSAGSVSSSCKLTIKAIKDTEAQKVSTQKTSEITPQKKAVVQEEISQKALRSEEIKMSEAKSQEKLALKEEASKVLISEEVKKSAATSLEKSIVHEEITKTSQASEEVRTHAEIKAFSTQMSINEGQRLVLKANIAGATDVKWVLNGVELTNSEEYRYGVSGSDQTLTIKQASHRDEGILTCISKTKEGIVKCQYDLTLSKELSDAPAFISQPRSQNINEGQNVLFTCEISGEPSPEIEWFKNNLPISISSNVSISRSRNVYSLEIRNASVSDSGKYTIKAKNFRGQCSATASLMVLPLVEEPSREVVLRTSGDTSLQGSFSSQSVQMSASKQEASFSSFSSSSASSMTEMKFASMSAQSMSSMQESFVEMSSSSFMGISNMTQLESSTSKMLKAGIRGIPPKIEALPSDISIDEGKVLTVACAFTGEPTPEVTWSCGGRKIHSQEQGRFHIENTDDLTTLIIMDVQKQDGGLYTLSLGNEFGSDSATVNIHIRSI

SEQ ID NO: 7371 - protein, 32900 aa, Homo sapiens
MTTQAPTFTQPLQSVVVLEGSTATFEAHISGFPVPEVSWFRDGQVISTSTLPGVQISFSDGRAKLTIPAVTKANSGRYSLKATNGSGQATSTAELLVKAETAPPNFVQRLQSMTVRQGSQVRLQVRVTGIPTPVVKFYRDGAEIQSSLDFQISQEGDLYSLLIAEAYPEDSGTYSVNATNSVGRATSTAELLVQGEEEVPAKKTKTIVSTAQISESRQTRIEKKIEAHFDARSIATVEMVIDGAAGQQLPHKTPPRIPPKPKSRSPTPPSIAAKAQLARQQSPSPIRHSPSPVRHVRAPTPSPVRSVSPAARISTSPIRSVRSPLLMRKTQASTVATGPEVPPPWKQEGYVASSSEAEMRETTLTTSTQIRTEERWEGRYGVQEQVTISGAAGAAASVSASASYAAEAVATGAKEVKQDADKSAAVATVVAAVDMARVREPVISAVEQTAQRTTTTAVHIQPAQEQVRKEAEKTAVTKVVVAADKAKEQELKSRTKEVITTKQEQMHVTHEQIRKETEKTFVPKVVISAAKAKEQETRISEEITKKQKQVTQEAIRQETEITAASMVVVATAKSTKLETVPGAQEETTTQQDQMHLSYEKIMKETRKTVVPKVIVATPKVKEQDLVSRGREGITTKREQVQITQEKMRKEAEKTALSTIAVATAKAKEQETILRTRETMATRQEQIQVTHGKVDVGKKAEAVATVVAAVDQARVREPREPGHLEESYAQQTTLEYGYKERISAAKVAEPPQRPASEPHVVPKAVKPRVIQAPSETHIKTTDQKGMHISSQIKKTTDLTTERLVHVDKRPRTASPHFTVSKISVPKTEHGYEASIAGSAIATLQKELSATSSAQKITKSVKAPTVKPSETRVRAEPTPLPQFPFADTPDTYKSEAGVEVKKEVGVSITGTTVREERFEVLHGREAKVTETARVPAPVEIPVTPPTLVSGLKNVTVIEGESVTLECHISGYPSPTVTWYREDYQIESSIDFQITFQSGIARLMIREAFAEDSGRFTCSAVNEAGTVSTSCYLAVQVSEEFEKETTAVTEKFTTEEKRFVESRDVVMTDTSLTEEQAGPGEPAAPYFITKPVVQKLVEGGSVVFGCQVGGNPKPHVYWKKSGVPLTTGYRYKVSYNKQTGECKLVISMTFADDAGEYTIVVRNKHGETSASASLLEEADYELLMKSQQEMLYQTQVTAFVQEPKVGETAPGFVYSEYEKEYEKEQALIRKKMAKDTVVVRTYVEDQEFHISSFEERLIKEIEYRIIKTTLEELLEEDGEEKMAVDISESEAVESGFDSRIKNYRILEGMGVTFHCKMSGYPLPKIAWYKDGKRIKHGERYQMDFLQDGRASLRIPVVLPEDEGIYTAFASNIKGNAICSGKLYVEPAAPLGAPTYIPTLEPVSRIRSLSPRSVSRSPIRMSPARMSPARMSPARMSPARMSPGRRLEETDESQLERLYKPVFVLKPVSFKCLEGQTARFDLKVVGRPMPETFWFHDGQQIVNDYTHKVVIKEDGTQSLIIVPATPSDSGEWTVVAQNRAGRSSISVILTVEAVEHQVKPMFVEKLKNVNIKEGSRLEMKVRATGNPNPDIVWLKNSDIIVPHKYPKIRIEGTKGEAALKIDSTVSQDSAWYTATAINKAGRDTTRCKVNVEVEFAEPEPERKLIIPRGTYRAKEIAAPELEPLHLRYGQEQWEEGDLYDKEKQQKPFFKKKLTSLRLKRFGPAHFECRLTPIGDPTMVVEWLHDGKPLEAANRLRMINEFGYCSLDYGVAYSRDSGIITCRATNKYGTDHTSATLIVKDEKSLVEESQLPEGRKGLQRIEELERMAHEGALTGVTTDQKEKQKPDIVLYPEPVRVLEGETARFRCRVTGYPQPKVNWYLNGQLIRKSKRFRVRYDGIHYLDIVDCKSYDTGEVKVTAENPEGVIEHKVKLEIQQREDFRSVLRRAPEPRPEFHVHEPGKLQFEVQKVDRPVDTTETKEVVKLKRAERITHEKVPEESEELRSKFKRRTEEGYYEAITAVELKSRKKDESYEELLRKTKDELLHWTKELTEEEKKALAEEGKITIPTFKPDKIELSPSMEAPKIFERIQSQTVGQGSDAHFRVRVVGKPDPECEWYKNGVKIERSDRIYWYWPEDNVCELVIRDVTAEDSASIMVKAINIAGETSSHAFLLVQAKQLITFTQELQDVVAKEKDTMATFECETSEPFVKVKWYKDGMEVHEGDKYRMHSDRKVHFLSILTIDTSDAEDYSCVLVEDENVKTTAKLIVEGAVVEFVKELQDIEVPESYSGELECIVSPENIEGKWYHNDVELKSNGKYTITSRRGRQNLTVKDVTKEDQGEYSFVIDGKKTTCKLKMKPRPIAILQGLSDQKVCEGDIVQLEVKVSLESVEGVWMKDGQEVQPSDRVHIVIDKQSHMLLIEDMTKEDAGNYSFTIPALGLSTSGRVSVYSVDVITPLKDVNVIEGTKAVLECKVSVPDVTSVKWYLNDEQIKPDDRVQAIVKGTKQRLVINRTHASDEGPYKLIVGRVETNCNLSVEKIKIIRGLRDLTCTETQNVVFEVELSHSGIDVLWNFKDKEIKPSSKYKIEAHGKIYKLTVLNMMKDDEGKYTFYAGENMTSGKLTVAGGAISKPLTDQTVAESQEAVFECEVANPDSKGEWLRDGKHLPLTNNIRSESDGHKRRLIIAATKLDDIGEYTYKVATSKTSAKLKVEAVKIKKTLKNLTVTETQDAVFTVELTHPNVKGVQWIKNGVVLESNEKYAISVKGTIYSLRIKNCAIVDESVYGFRLGRLGASARLHVETVKIIKKPKDVTALENATVAFEVSVSHDTVPVKWFHKSVEIKPSDKHRLVSERKVHKLMLQNISPSDAGEYTAVVGQLECKAKLFVETLHITKTMKNIEVPETKTASFECEVSHFNVPSMWLKNGVEIEMSEKFKIVVQGKLHQLIIMNTSTEDSAEYTFVCGNDQVSATLTVTPIMITSMLKDINAEEKDTITFEVTVNYEGISYKWLKNGVEIKSTDKCQMRTKKLTHSLNIRNVHFGDAADYTFVAGKATSTATLYVEARHIEFRKHIKDIKVLEKKRAMFECEVSEPDITVQWMKDDQELQITDRIKIQKEKYVHRLLIPSTRMSDAGKYTVVAGGNVSTAKLFVEGRDVRIRSIKKEVQVIEKQRAVVEFEVNEDDVDAHWYKDGIEINFQVQERHKYVVERRIHRMFISETRQSDAGEYTFVAGRNRSSVTLYVNAPEPPQVLQELQPVTVQSGKPARFCAVISGRPQPKISWYKEEQLLSTGFKCKFLHDGQEYTLLLIEAFPEDAAVYTCEAKNDYGVATTSASLSVEVPEVVSPDQEMPVYPPAIITPLQDTVTSEGQPARFQCRVSGTDLKVSWYSKDKKIKPSRFFRMTQFEDTYQLEIAEAYPEDEGTYTFVASNAVGQVSSTANLSLEAPESILHERIEQEIEMEMKEFSSSFLSAEEEGLHSAELQLSKINETLELLSESPVYPTKFDSEKEGTGPIFIKEVSNADISMGDVATLSVTVIGIPKPKIQWFFNGVLLTPSADYKFVFDGDDHSLIILFTKLEDEGEYTCMASNDYGKTICSAYLKINSKGEGHKDTETESAVAKSLEKLGGPCPPHFLKELKPIRCAQGLPAIFEYTVVGEPAPTVTWFKENKQLCTSVYYTIIHNPNGSGTFIVNDPQREDSGLYICKAENMLGESTCAAELLVLLEDTDMTDTPCKAKSTPEAPEDFPQTPLKGPAVEALDSEQEIATFVKDTILKAALITEENQQLSYEHIAKANELSSQLPLGAQELQSILEQDKLTPESTREFLCINGSIHFQPLKEPSPNLQLQIVQSQKTFSKEGILMPEEPETQAVLSDTEKIFPSAMSIEQINSLTVEPLKTLLAEPEGNYPQSSIEPPMHSYLTSVAEEVLSPKEKTVSDTNREQRVTLQKQEAQSALILSQSLAEGHVESLQSPDVMISQVNYEPLVPSEHSCTEGGKILIESANPLENAGQDSAVRIEEGKSLRFPLALEEKQVLLKEEHSDNVVMPPDQIIESKREPVAIKKVQEVQGRDLLSKESLLSGIPEEQRLNLKIQICRALQAAVASEQPGLFSEWLRNIEKVEVEAVNITQEPRHIMCMYLVTSAKSVTEEVTIIIEDVDPQMANLKMELRDALCAIIYEEIDILTAEGPRIQQGAKTSLQEEMDSFSGSQKVEPITEPEVESKYLISTEEVSYFNVQSRVKYLDATPVTKGVASAVVSDEKQDESLKPSEEKEESSSESGTEEVATVKIQEAEGGLIKEDGPMIHTPLVDTVSEEGDIVHLTTSITNAKEVNWYFENKLVPSDEKFKCLQDQNTYTLVIDKVNTEDHQGEYVCEALNDSGKTATSAKLTVVKRAAPVIKRKIEPLEVALGHLAKFTCEIQSAPNVRFQWFKAGREIYESDKCSIRSSKYISSLEILRTQVVDCGEYTCKASNEYGSVSCTATLTVTEAYPPTFLSRPKSLTTFVGKAAKFICTVTGTPVIETIWQKDGAALSPSPNWRISDAENKHILELSNLTIQDRGVYSCKASNKFGADICQAELIIIDKPHFIKELEPVQSAINKKVHLECQVDEDRKVTVTWSKDGQKLPPGKDYKICFEDKIATLEIPLAKLKDSGTYVCTASNEAGSSSCSATVTVREPPSFVKKVDPSYLMLPGESARLHCKLKGSPVIQVTWFKNNKELSESNTVRMYFVNSEAILDITDVKVEDSGSYSCEAVNDVGSDSCSTEIVIKEPPSFIKTLEPADIVRGTNALLQCEVSGTGPFEISWFKDKKQIRSSKKYRLFSQKSLVCLEIFSFNSADVGEYECVVANEVGKCGCMATHLLKEPPTFVKKVDDLIALGGQTVTLQAAVRGSEPISVTWMKGQEVIREDGKIKMSFSNGVAVLIIPDVQISFGGKYTCLAENEAGSQTSVGELIVKEPAKIIERAELIQVTAGDPATLEYTVAGTPELKPKWYKDGRPLVASKKYRISFKNNVAQLKFYSAELHDSGQYTFEISNEVGSSSCETTFTVLDRDIAPFFTKPLRNVDSVVNGTCRLDCKIAGSLPMRVSWFKDGKEIAASDRYRIAFVEGTASLEIIRVDMNDAGNFTCRATNSVGSKDSSGALIVQEPPSFVTKPGSKDVLPGSAVCLKSTFQGSTPLTIRWFKGNKELVSGGSCYITKEALESSLELYLVKTSDSGTYTCKVSNVAGGVECSANLFVKEPATFVEKLEPSQLLKKGDATQLACKVTGTPPIKITWFANDREIKESSKHRMSFVESTAVLRLTDVGIEDSGEYMCEAQNEAGSDHCSSIVIVKESPYFTKEFKPIEVLKEYDVMLLAEVAGTPPFEITWFKDNTILRSGRKYKTFIQDHLVSLQILKFVAADAGEYQCRVTNEVGSSICSARVTLREPPSFIKKIESTSSLRGGTAAFQATLKGSLPITVTWLKDSDEITEDDNIRMTFENNVASLYLSGIEVKHDGKYVCQAKNDAGIQRCSALLSVKEPATITEEAVSIDVTQGDPATLQVKFSGTKEITAKWFKDGQELTLGSKYKISVTDTVSILKIISTEKKDSGEYTFEVQNDVGRSSCKARINVLDLIIPPSFTKKLKKMDSIKGSFIDLECIVAGSHPISIQWFKDDQEISASEKYKFSFHDNTAFLEISQLEGTDSGTYTCSATNKAGHNQCSGHLTVKEPPYFVEKPQSQDVNPNTRVQLKALVGGTAPMTIKWFKDNKELHSGAARSVWKDDTSTSLELFAAKATDSGTYICQLSNDVGTATSKATLFVKEPPQFIKKPSPVLVLRNGQSTTFECQITGTPKIRVSWYLDGNEITAIQKHGISFIDGLATFQISGARVENSGTYVCEARNDAGTASCSIELKVKEPPTFIRELKPVEVVKYSDVELECEVTGTPPFEVTWLKNNREIRSSKKYTLTDRVSVFNLHITKCDPSDTGEYQCIVSNEGGSCSCSTRVALKEPPSFIKKIENTTTVLKSSATFQSTVAGSPPISITWLKDDQILDEDDNVYISFVDSVATLQIRSVDNGHSGRYTCQAKNESGVERCYAFLLVQEPAQIVEKAKSVDVTEKDPMTLECVVAGTPELKVKWLKDGKQIVPSRYFSMSFENNVASFRIQSVMKQDSGQYTFKVENDFGSSSCDAYLRVLDQNIPPSFTKKLTKMDKVLGSSIHMECKVSGSLPISAQWFKDGKEISTSAKYRLVCHERSVSLEVNNLELEDTANYTCKVSNVAGDDACSGILTVKEPPSFLVKPGRQQAIPDSTVEFKAILKGTPPFKIKWFKDDVELVSGPKCFIGLEGSTSFLNLYSVDASKTGQYTCHVTNDVGSDSCTTMLLVTEPPKFVKKLEASKIVKAGDSSRLECKIAGSPEIRVVWFRNEHELPASDKYRMTFIDSVAVIQMNNLSTEDSGDFICEAQNPAGSTSCSTKVIVKEPPVFSSFPPIVETLKNAEVSLECELSGTPPFEVVWYKDKRQLRSSKKYKIASKNFHTSIHILNVDTSDIGEYHCKAQNEVGSDTCVCTVKLKEPPRFVSKLNSLTVVAGEPAELQASIEGAQPIFVQWLKEKEEVIRESENIRITFVENVATLQFAKAEPANAGKYICQIKNDGGMRENMATLMVLEPAVIVEKAGPMTVTVGETCTLECKVAGTPELSVEWYKDGKLLTSSQKHKFSFYNKISSLRILSVERQDAGTYTFQVQNNVGKSSCTAVVDVSDRAVPPSFTRRLKNTGGVLGASCILECKVAGSSPISVAWFHEKTKIVSGAKYQTTFSDNVCTLQLNSLDSSDMGNYTCVAANVAGSDECRAVLTVQEPPSFVKEPEPLEVLPGKNVTFTSVIRGTPPFKVNWFRGARELVKGDRCNIYFEDTVAELELFNIDISQSGEYTCVVSNNAGQASCTTRLFVKEPAAFLKRLSDHSVEPGKSIILESTYTGTLPISVTWKKDGFNITTSEKCNIVTTEKTCILEILNSTKRDAGQYSCEIENEAGRDVCGALVSTLEPPYFVTELEPLEAAVGDSVSLQCQVAGTPEITVSWYKGDTKLRPTPEYRTYFTNNVATLVFNKVNINDSGEYTCKAENSIGTASSKTVFRIQERQLPPSFARQLKDIEQTVGLPVTLTCRLNGSAPIQVCWYRDGVLLRDDENLQTSFVDNVATLKILQTDLSHSGQYSCSASNPLGTASSSARLTAREPKKSPFFDIKPVSIDVIAGESADFECHVTGAQPMRITWSKDNKEIRPGGNYTITCVGNTPHLRILKVGKGDSGQYTCQATNDVGKDMCSAQLSVKEPPKFVKKLEASKVAKQGESIQLECKISGSPEIKVSWFRNDSELHESWKYNMSFINSVALLTINEASAEDSGDYICEAHNGVGDASCSTALTVKAPPVFTQKPSPVGALKGSDVILQCEISGTPPFEVVWVKDRKQVRNSKKFKITSKHFDTSLHILNLEASDVGEYHCKATNEVGSDTCSCSVKFKEPPRFVKKLSDTSTLIGDAVELRAIVEGFQPISVVWLKDRGEVIRESENTRISFIDNIATLQLGSPEASNSGKYICQIKNDAGMRECSAVLTVLEPARIIEKPEPMTVTTGNPFALECVVTGTPELSAKWFKDGRELSADSKHHITFINKVASLKIPCAEMSDKGLYSFEVKNSVGKSNCTVSVHVSDRIVPPSFIRKLKDVNAILGASVVLECRVSGSAPISVGWFQDGNEIVSGPKCQSSFSENVCTLNLSLLEPSDTGIYTCVAANVAGSDECSAVLTVQEPPSFEQTPDSVEVLPGMSLTFTSVIRGTPPFKVKWFKGSRELVPGESCNISLEDFVTELELFEVQPLESGDYSCLVTNDAGSASCTTHLFVKEPATFVKRLADFSVETGSPIVLEATYTGTPPISVSWIKDEYLISQSERCSITMTEKSTILEILESTIEDYAQYSCLIENEAGQDICEALVSVLEPPYFIEPLEHVEAVIGEPATLQCKVDGTPEIRISWYKEHTKLRSAPAYKMQFKNNVASLVINKVDHSDVGEYSCKADNSVGAVASSAVLVIKARKLPPFFARKLKDVHETLGFPVAFECRINGSEPLQVSWYKDGVLLKDDANLQTSFVHNVATLQILQTDQSHIGQYNCSASNPLGTASSSAKLILSEHEVPPFFDLKPVSVDLALGESGTFKCHVTGTAPIKITWAKDNREIRPGGNYKMTLVENTATLTVLKVGKGDAGQYTCYASNIAGKDSCSAQLGVQEPPRFIKKLEPSRIVKQDEFTRYECKIGGSPEIKVLWYKDETEIQESSKFRMSFVDSVAVLEMHNLSVEDSGDYTCEAHNAAGSASSSTSLKVKEPPIFRKKPHPIETLKGADVHLECELQGTPPFHVSWYKDKRELRSGKKYKIMSENFLTSIHILNVDAADIGEYQCKATNDVGSDTCVGSIALKAPPRFVKKLSDISTVVGKEVQLQTTIEGAEPISVVWFKDKGEIVRESDNIWISYSENIATLQFSRVEPANAGKYTCQIKNDAGMQECFATLSVLEPATIVEKPESIKVTTGDTCTLECTVAGTPELSTKWFKDGKELTSDNKYKISFFNKVSGLKIINVAPSDSGVYSFEVQNPVGKDSCTASLQVSDRTVPPSFTRKLKETNGLSGSSVVMECKVYGSPPISVSWFHEGNEISSGRKYQTTLTDNTCALTVNMLEESDSGDYTCIATNMAGSDECSAPLTVREPPSFVQKPDPMDVLTGTNVTFTSIVKGTPPFSVSWFKGSSELVPGDRCNVSLEDSVAELELFDVDTSQSGEYTCIVSNEAGKASCTTHLYIKAPAKFVKRLNDYSIEKGKPLILEGTFTGTPPISVTWKKNGINVTPSQRCNITTTEKSAILEIPSSTVEDAGQYNCYIENASGKDSCSAQILILEPPYFVKQLEPVKVSVGDSASLQCQLAGTPEIGVSWYKGDTKLRPTTTYKMHFRNNVATLVFNQVDINDSGEYICKAENSVGEVSASTFLTVQEQKLPPSFSRQLRDVQETVGLPVVFDCAISGSEPISVSWYKDGKPLKDSPNVQTSFLDNTATLNIFKTDRSLAGQYSCTATNPIGSASSSARLILTEGKNPPFFDIRLAPVDAVVGESADFECHVTGTQPIKVSWAKDSREIRSGGKYQISYLENSAHLTVLKVDKGDSGQYTCYAVNEVGKDSCTAQLNIKERLIPPSFTKRLSETVEETEGNSFKLEGRVAGSQPITVAWYKNNIEIQPTSNCEITFKNNTLVLQVRKAGMNDAGLYTCKVSNDAGSALCTSSIVIKEPKKPPVFDQHLTPVTVSEGEYVQLSCHVQGSEPIRIQWLKAGREIKPSDRCSFSFASGTAVLELRDVAKADSGDYVCKASNVAGSDTTKSKVTIKDKPAVAPATKKAAVDGRLFFVSEPQSIRVVEKTTATFIAKVGGDPIPNVKWTKGKWRQLNQGGRVFIHQKGDEAKLEIRDTTKTDSGLYRCVAFNEHGEIESNVNLQVDERKKQEKIEGDLRAMLKKTPILKKGAGEEEEIDIMELLKNVDPKEYEKYARMYGITDFRGLLQAFELLKQSQEEETHRLEIEEIERSERDEKEFEELVSFIQQRLSQTEPVTLIKDIENQTVLKDNDAVFEIDIKINYPEIKLSWYKGTEKLEPSDKFEISIDGDRHTLRVKNCQLKDQGNYRLVCGPHIASAKLTVIEPAWERHLQDVTLKEGQTCTMTCQFSVPNVKSEWFRNGRILKPQGRHKTEVEHKVHKLTIADVRAEDQGQYTCKYEDLETSAELRIEAEPIQFTKRIQNIVVSEHQSATFECEVSFDDAIVTWYKGPTELTESQKYNFRNDGRCHYMTIHNVTPDDEGVYSVIARLEPRGEARSTAELYLTTKEIKLELKPPDIPDSRVPIPTMPIRAVPPEEIPPVVAPPIPLLLPTPEEKKPPPKRIEVTKKAVKKDAKKVVAKPKEMTPREEIVKKPPPPTTLIPAKAPEIIDVSSKAEEVKIMTITRKKEVQKEKEAVYEKKQAVHKEKRVFIESFEEPYDELEVEPYTEPFEQPYYEEPDEDYEEIKVEAKKEVHEEWEEDFEEGQEYYEREEGYDEGEEEWEEAYQEREVIQVQKEVYEESHERKVPAKVPEKKAPPPPKVIKKPVIEKIEKTSRRMEEEKVQVTKVPEVSKKIVPQKPSRTPVQEEVIEVKVPAVHTKKMVISEEKMFFASHTEEEVSVTVPEVQKEIVTEEKIHVAISKRVEPPPKVPELPEKPAPEEVAPVPIPKKVEPPAPKVPEVPKKPVPEEKKPVPVPKKEPAAPPKVPEVPKKPVPEEKIPVPVAKKKEAPPAKVPEVQKGVVTEEKITIVTQREESPPPAVPEIPKKKVPEERKPVPRKEEEVPPPPKVPALPKKPVPEEKVAVPVPVAKKAPPPREVTIMEEKERAYTLEEEAVSVQREEEYEEYEEYDYKEFEEYEPTEEYDQYEEYEEREYERYEEHEEYITEPEKPIPVKPVPEEPVPTKPKAPPAKVPEVPKKPVPEEKVPVPVPKKVEAPPAKVPEVPKKPVPEKKVPVPAPKKVEAPPAKVPEVPKKLIPEEKKPTPVPKKVEAPPPKVTEEPEEEPISEEEIPEEPPSIEEVEEVAPPRVPEVIKKAVPEAPTPVPKKVEAPPAKVPGGEKKVRKLLPERKPEPKEEVVLKSVLRKRPEEEEPKVEPKKLEKVKKPAVPEPPPPKPVEEVEVPTVTKRERKIPEPTKVPEIKPAIPLPAPEPKPKPEAEVKTIKPPPVEPEPTPIAAPVTVPVVGKKADDTDAGTYTVTVENANNLECSSCVKVVEVIRDWLVKPIRDQHVKPKGTAIFACDIAKDTPNIKWFKGYDEIPAEPNDKTEILRDGNHLYLKIKNAMPEDIAEYAVEIEGKRYPAKLTLGEREVELLKPIEDVTIYEKESASFDAEISEADIPGQWKLKGELLRPSPTCEIKAEGGKRFLTLHKVKLDQAGEVLYQALNAITTAILTVKEIELDFAVPLKDVTVPERRQARFECVLTREANVIWSKGPDIIKSSDKFDIIADGKKHILVINDSQFDDEGVYTAEVEGKKTSARLFVTGIRLKFMSPLEDQTVKEGETATFVCELSHEKMHVVWFKNDAKLHTSRTVLISSEGKTHKLEMKEVTLDDISQIKAQVKELSSTAQLKVLEADPYFTVKLHDKTAVEKDEITLKCEVSKDVPVKWFKDGEEIVPSPKYSIKADGLRRILKIKKADLKDKGEYVCDCGTDKTKANVTVEARLIKVEKPLYGVEVFVGETAHFEIELSEPDVHGQWKLKGQPLTASPDCEIIEDGKKHILILHNCQLGMTGEVSFQAANAKSAANLKVKELPLIFITPLSDVKVFEKDEAKFECEVSREPKTFRWLKGTQEITGDDRFELIKDGTKHSMVIKSAAFEDEAKYMFEAEDKHTSGKLIIEGIRLKFLTPLKDVTAKEKESAVFTVELSHDNIRVKWFKNDQRLHTTRSVSMQDEGKTHSITFKDLSIDDTSQIRVEAMGMSSEAKLTVLEGDPYFTGKLQDYTGVEKDEVILQCEISKADAPVKWFKDGKEIKPSKNAVIKADGKKRMLILKKALKSDIGQYTCDCGTDKTSGKLDIEDREIKLVRPLHSVEVMETETARFETEISEDDIHANWKLKGEALLQTPDCEIKEEGKIHSLVLHNCRLDQTGGVDFQAANVKSSAHLRVKPRVIGLLRPLKDVTVTAGETATFDCELSYEDIPVEWYLKGKKLEPSDKVVPRSEGKVHTLTLRDVKLEDAGEVQLTAKDFKTHANLFVKEPPVEFTKPLEDQTVEEGATAVLECEVSRENAKVKWFKNGTEILKSKKYEIVADGRVRKLVIHDCTPEDIKTYTCDAKDFKTSCNLNVVPPHVEFLRPLTDLQVREKEMARFECELSRENAKVKWFKDGAEIKKGKKYDIISKGAVRILVINKCLLDDEAEYSCEVRTARTSGMLTVLEEEAVFTKNLANIEVSETDTIKLVCEVSKPGAEVIWYKGDEEIIETGRYEILTEGRKRILVIQNAHLEDAGNYNCRLPSSRTDGKVKVHELAAEFISKPQNLEILEGEKAEFVCSISKESFPVQWKRDDKTLESGDKYDVIADGKKRVLVVKDATLQDMGTYVVMVGAARAAAHLTVIEKLRIVVPLKDTRVKEQQEVVFNCEVNTEGAKAKWFRNEEAIFDSSKYIILQKDLVYTLRIRDAHLDDQANYNVSLTNHRGENVKSAANLIVEEEDLRIVEPLKDIETMEKKSVTFWCKVNRLNVTLKWTKNGEEVPFDNRVSYRVDKYKHMLTIKDCGFPDEGEYIVTAGQDKSVAELLIIEAPTEFVEHLEDQTVTEFDDAVFSCQLSREKANVKWYRNGREIKEGKKYKFEKDGSIHRLIIKDCRLDDECEYACGVEDRKSRARLFVEEIPVEIIRPPQDILEAPGADVVFLAELNKDKVEVQWLRNNMVVVQGDKHQMMSEGKIHRLQICDIKPRDQGEYRFIAKDKEARAKLELAAAPKIKTADQDLVVDVGKPLTMVVPYDAYPKAEAEWFKENEPLSTKTIDTTAEQTSFRILEAKKGDKGRYKIVLQNKHGKAEGFINLKVIDVPGPVRNLEVTETFDGEVSLAWEEPLTDGGSKIIGYVVERRDIKRKTWVLATDRAESCEFTVTGLQKGGVEYLFRVSARNRVGTGEPVETDNPVEARSKYDVPGPPLNVTITDVNRFGVSLTWEPPEYDGGAEITNYVIELRDKTSIRWDTAMTVRAEDLSATVTDVVEGQEYSFRVRAQNRIGVGKPSAATPFVKVADPIERPSPPVNLTSSDQTQSSVQLKWEPPLKDGGSPILGYIIERCEEGKDNWIRCNMKLVPELTYKVTGLEKGNKYLYRVSAENKAGVSDPSEILGPLTADDAFVEPTMDLSAFKDGLEVIVPNPITILVPSTGYPRPTATWCFGDKVLETGDRVKMKTLSAYAELVISPSERSDKGIYTLKLENRVKTISGEIDVNVIARPSAPKELKFGDITKDSVHLTWEPPDDDGGSPLTGYVVEKREVSRKTWTKVMDFVTDLEFTVPDLVQGKEYLFKVCARNKCGPGEPAYVDEPVNMSTPATVPDPPENVKWRDRTANSIFLTWDPPKNDGGSRIKGYIVERCPRGSDKWVACGEPVAETKMEVTGLEEGKWYAYRVKALNRQGASKPSRPTEEIQAVDTQEAPEIFLDVKLLAGLTVKAGTKIELPATVTGKPEPKITWTKADMILKQDKRITIENVPKKSTVTIVDSKRSDTGTYIIEAVNVCGRATAVVEVNVLDKPGPPAAFDITDVTNESCLLTWNPPRDDGGSKITNYVVERRATDSEVWHKLSSTVKDTNFKATKLIPNKEYIFRVAAENMYGVGEPVQASPITAKYQFDPPGPPTRLEPSDITKDAVTLTWCEPDDDGGSPITGYWVERLDPDTDKWVRCNKMPVKDTTYRVKGLTNKKKYRFRVLAENLAGPGKPSKSTEPILIKDPIDPPWPPGKPTVKDVGKTSVRLNWTKPEHDGGAKIESYVIEMLKTGTDEWVRVAEGVPTTQHLLPGLMEGQEYSFRVRAVNKAGESEPSEPSDPVLCREKLYPPSPPRWLEVINITKNTADLKWTVPEKDGGSPITNYIVEKRDVRRKGWQTVDTTVKDTKCTVTPLTEGSLYVFRVAAENAIGQSDYTEIEDSVLAKDTFTTPGPPYALAVVDVTKRHVDLKWEPPKNDGGRPIQRYVIEKKERLGTRWVKAGKTAGPDCNFRVTDVIEGTEVQFQVRAENEAGVGHPSEPTEILSIEDPTSPPSPPLDLHVTDAGRKHIAIAWKPPEKNGGSPIIGYHVEMCPVGTEKWMRVNSRPIKDLKFKVEEGVVPDKEYVLRVRAVNAIGVSEPSEISENVVAKDPDCKPTIDLETHDIIVIEGEKLSIPVPFRAVPVPTVSWHKDGKEVKASDRLTMKNDHISAHLEVPKSVRADAGIYTITLENKLGSATASINVKVIGLPGPCKDIKASDITKSSCKLTWEPPEFDGGTPILHYVLERREAGRRTYIPVMSGENKLSWTVKDLIPNGEYFFRVKAVNKVGGGEYIELKNPVIAQDPKQPPDPPVDVEVHNPTAEAMTITWKPPLYDGGSKIMGYIIEKIAKGEERWKRCNEHLVPILTYTAKGLEEGKEYQFRVRAENAAGISEPSRATPPTKAVDPIDAPKVILRTSLEVKRGDEIALDASISGSPYPTITWIKDENVIVPEEIKKRAAPLVRRRKGEVQEEEPFVLPLTQRLSIDNSKKGESQLRVRDSLRPDHGLYMIKVENDHGIAKAPCTVSVLDTPGPPINFVFEDIRKTSVLCKWEPPLDDGGSEIINYTLEKKDKTKPDSEWIVVTSTLRHCKYSVTKLIEGKEYLFRVRAENRFGPGPPCVSKPLVAKDPFGPPDAPDKPIVEDVTSNSMLVKWNEPKDNGSPILGYWLEKREVNSTHWSRVNKSLLNALKANVDGLLEGLTYVFRVCAENAAGPGKFSPPSDPKTAHDPISPPGPPIPRVTDTSSTTIELEWEPPAFNGGGEIVGYFVDKQLVGTNEWSRCTEKMIKVRQYTVKEIREGADYKLRVSAVNAAGEGPPGETQPVTVAEPQEPPAVELDVSVKGGIQIMAGKTLRIPAVVTGRPVPTKVWTKEEGELDKDRVVIDNVGTKSELIIKDALRKDHGRYVITATNSCGSKFAAARVEVFDVPGPVLDLKPVVTNRKMCLLNWSDPEDDGGSEITGFIIERKDAKMHTWRQPIETERSKCDITGLLEGQEYKFRVIAKNKFGCGPPVEIGPILAVDPLGPPTSPERLTYTERTKSTITLDWKEPRSNGGSPIQGYIIEKRRHDKPDFERVNKRLCPTTSFLVENLDEHQMYEFRVKAVNEIGESEPSLPLNVVIQDDEVPPTIKLRLSVRGDTIKVKAGEPVHIPADVTGLPMPKIEWSKNETVIEKPTDALQITKEEVSRSEAKTELSIPKAVREDKGTYTVTASNRLGSVFRNVHVEVYDRPSPPRNLAVTDIKAESCYLTWDAPLDNGGSEITHYVIDKRDASRKKAEWEEVTNTAVEKRYGIWKLIPNGQYEFRVRAVNKYGISDECKSDKVVIQDPYRLPGPPGKPKVLARTKGSMLVSWTPPLDNGGSPITGYWLEKREEGSPYWSRVSRAPITKVGLKGVEFNVPRLLEGVKYQFRAMAINAAGIGPPSEPSDPEVAGDPIFPPGPPSCPEVKDKTKSSISLGWKPPAKDGGSPIKGYIVEMQEEGTTDWKRVNEPDKLITTCECVVPNLKELRKYRFRVKAVNEAGESEPSDTTGEIPATDIQEEPEVFIDIGAQDCLVCKAGSQIRIPAVIKGRPTPKSSWEFDGKAKKAMKDGVHDIPEDAQLETAENSSVIIIPECKRSHTGKYSITAKNKAGQKTANCRVKVMDVPGPPKDLKVSDITRGSCRLSWKMPDDDGGDRIKGYVIEKRTIDGKAWTKVNPDCGSTTFVVPDLLSEQQYFFRVRAENRFGIGPPVETIQRTTARDPIYPPDPPIKLKIGLITKNTVHLSWKPPKNDGGSPVTHYIVECLAWDPTGTKKEAWRQCNKRDVEELQFTVEDLVEGGEYEFRVKAVNAAGVSKPSATVGPVTVKDQTCPPSIDLKEFMEVEEGTNVNIVAKIKGVPFPTLTWFKAPPKKPDNKEPVLYDTHVNKLVVDDTCTLVIPQSRRSDTGLYTITAVNNLGTASKEMRLNVLGRPGPPVGPIKFESVSADQMTLSWFPPKDDGGSKITNYVIEKREANRKTWVHVSSEPKECTYTIPKLLEGHEYVFRIMAQNKYGIGEPLDSEPETARNLFSVPGAPDKPTVSSVTRNSMTVNWEEPEYDGGSPVTGYWLEMKDTTSKRWKRVNRDPIKAMTLGVSYKVTGLIEGSDYQFRVYAINAAGVGPASLPSDPATARDPIAPPGPPFPKVTDWTKSSADLEWSPPLKDGGSKVTGYIVEYKEEGKEEWEKGKDKEVRGTKLVVTGLKEGAFYKFRVRAVNIAGIGEPGEVTDVIEMKDRLVSPDLQLDASVRDRIVVHAGGVIRIIAYVSGKPPPTVTWNMNERTLPQEATIETTAISSSMVIKNCQRSHQGVYSLLAKNEAGERKKTIIVDVLDVPGPVGTPFLAHNLTNESCKLTWFSPEDDGGSPITNYVIEKRESDRRAWTPVTYTVTRQNATVQGLIQGKAYFFRIAAENSIGMGPFVETSEALVIREPITVPERPEDLEVKEVTKNTVTLTWNPPKYDGGSEIINYVLESRLIGTEKFHKVTNDNLLSRKYTVKGLKEGDTYEYRVSAVNIVGQGKPSFCTKPITCKDELAPPTLHLDFRDKLTIRVGEAFALTGRYSGKPKPKVSWFKDEADVLEDDRTHIKTTPATLALEKIKAKRSDSGKYCVVVENSTGSRKGFCQVNVVDRPGPPVGPVSFDEVTKDYMVISWKPPLDDGGSKITNYIIEKKEVGKDVWMPVTSASAKTTCKVSKLLEGKDYIFRIHAENLYGISDPLVSDSMKAKDRFRVPDAPDQPIVTEVTKDSALVTWNKPHDGGKPITNYILEKRETMSKRWARVTKDPIHPYTKFRVPDLLEGCQYEFRVSAENEIGIGDPSPPSKPVFAKDPIAKPSPPVNPEAIDTTCNSVDLTWQPPRHDGGSKILGYIVEYQKVGDEEWRRANHTPESCPETKYKVTGLRDGQTYKFRVLAVNAAGESDPAHVPEPVLVKDRLEPPELILDANMAREQHIKVGDTLRLSAIIKGVPFPKVTWKKEDRDAPTKARIDVTPVGSKLEIRNAAHEDGGIYSLTVENPAGSKTVSVKVLVLDKPGPPRDLEVSEIRKDSCYLTWKEPLDDGGSVITNYVVERRDVASAQWSPLSATSKKKSHFAKHLNEGNQYLFRVAAENQYGRGPFVETPKPIKALDPLHPPGPPKDLHHVDVDKTEVSLVWNKPDRDGGSPITGYLVEYQEEGTQDWIKFKTVTNLECVVTGLQQGKTYRFRVKAENIVGLGLPDTTIPIECQEKLVPPSVELDVKLIEGLVVKAGTTVRFPAIIRGVPVPTAKWTTDGSEIKTDEHYTVETDNFSSVLTIKNCLRRDTGEYQITVSNAAGSKTVAVHLTVLDVPGPPTGPINILDVTPEHMTISWQPPKDDGGSPVINYIVEKQDTRKDTWGVVSSGSSKTKLKIPHLQKGCEYVFRVRAENKIGVGPPLDSTPTVAKHKFSPPSPPGKPVVTDITENAATVSWTLPKSDGGSPITGYYMERREVTGKWVRVNKTPIADLKFRVTGLYEGNTYEFRVFAENLAGLSKPSPSSDPIKACRPIKPPGPPINPKLKDKSRETADLVWTKPLSDGGSPILGYVVECQKPGTAQWNRINKDELIRQCAFRVPGLIEGNEYRFRIKAANIVGEGEPRELAESVIAKDILHPPEVELDVTCRDVITVRVGQTIRILARVKGRPEPDITWTKEGKVLVREKRVDLIQDLPRVELQIKEAVRADHGKYIISAKNSSGHAQGSAIVNVLDRPGPCQNLKVTNVTKENCTISWENPLDNGGSEITNFIVEYRKPNQKGWSIVASDVTKRLIKANLLANNEYYFRVCAENKVGVGPTIETKTPILAINPIDRPGEPENLHIADKGKTFVYLKWRRPDYDGGSPNLSYHVERRLKGSDDWERVHKGSIKETHYMVDRCVENQIYEFRVQTKNEGGESDWVKTEEVVVKEDLQKPVLDLKLSGVLTVKAGDTIRLEAGVRGKPFPEVAWTKDKDATDLTRSPRVKIDTRADSSKFSLTKAKRSDGGKYVVTATNTAGSFVAYATVNVLDKPGPVRNLKIVDVSSDRCTVCWDPPEDDGGCEIQNYILEKCETKRMVWSTYSATVLTPGTTVTRLIEGNEYIFRVRAENKIGTGPPTESKPVIAKTKYDKPGRPDPPEVTKVSKEEMTVVWNPPEYDGGKSITGYFLEKKEKHSTRWVPVNKSAIPERRMKVQNLLPDHEYQFRVKAENEIGIGEPSLPSRPVVAKDPIEPPGPPTNFRVVDTTKHSITLGWGKPVYDGGAPIIGYVVEMRPKIADASPDEGWKRCNAAAQLVRKEFTVTSLDENQEYEFRVCAQNQVGIGRPAELKEAIKPKEILEPPEIDLDASMRKLVIVRAGCPIRLFAIVRGRPAPKVTWRKVGIDNVVRKGQVDLVDTMAFLVIPNSTRDDSGKYSLTLVNPAGEKAVFVNVRVLDTPGPVSDLKVSDVTKTSCHVSWAPPENDGGSQVTHYIVEKREADRKTWSTVTPEVKKTSFHVTNLVPGNEYYFRVTAVNEYGPGVPTDVPKPVLASDPLSEPDPPRKLEVTEMTKNSATLAWLPPLRDGGAKIDGYITSYREEEQPADRWTEYSVVKDLSLVVTGLKEGKKYKFRVAARNAVGVSLPREAEGVYEAKEQLLPPKILMPEQITIKAGKKLRIEAHVYGKPHPTCKWKKGEDEVVTSSHLAVHKADSSSILIIKDVTRKDSGYYSLTAENSSGTDTQKIKVVVMDAPGPPQPPFDISDIDADACSLSWHIPLEDGGSNITNYIVEKCDVSRGDWVTALASVTKTSCRVGKLIPGQEYIFRVRAENRFGISEPLTSPKMVAQFPFGVPSEPKNARVTKVNKDCIFVAWDRPDSDGGSPIIGYLIERKERNSLLWVKANDTLVRSTEYPCAGLVEGLEYSFRIYALNKAGSSPPSKPTEYVTARMPVDPPGKPEVIDVTKSTVSLIWARPKHDGGSKIIGYFVEACKLPGDKWVRCNTAPHQIPQEEYTATGLEEKAQYQFRAIARTAVNISPPSEPSDPVTILAENVPPRIDLSVAMKSLLTVKAGTNVCLDATVFGKPMPTVSWKKDGTLLKPAEGIKMAMQRNLCTLELFSVNRKDSGDYTITAENSSGSKSATIKLKVLDKPGPPASVKINKMYSDRAMLSWEPPLEDGGSEITNYIVDKRETSRPNWAQVSATVPITSCSVEKLIEGHEYQFRICAENKYGVGDPVFTEPAIAKNPYDPPGRCDPPVISNITKDHMTVSWKPPADDGGSPITGYLLEKRETQAVNWTKVNRKPIIERTLKATGLQEGTEYEFRVTAINKAGPGKPSDASKAAYARDPQYPPGPPAFPKVYDTTRSSVSLSWGKPAYDGGSPIIGYLVEVKRADSDNWVRCNLPQNLQKTRFEVTGLMEDTQYQFRVYAVNKIGYSDPSDVPDKHYPKDILIPPEGELDADLRKTLILRAGVTMRLYVPVKGRPPPKITWSKPNVNLRDRIGLDIKSTDFDTFLRCENVNKYDAGKYILTLENSCGKKEYTIVVKVLDTPGPPVNVTVKEISKDSAYVTWEPPIIDGGSPIINYVVQKRDAERKSWSTVTTECSKTSFRVANLEEGKSYFFRVFAENEYGIGDPGETRDAVKASQTPGPVVDLKVRSVSKSSCSIGWKKPHSDGGSRIIGYVVDFLTEENKWQRVMKSLSLQYSAKDLTEGKEYTFRVSAENENGEGTPSEITVVARDDVVAPDLDLKGLPDLCYLAKENSNFRLKIPIKGKPAPSVSWKKGEDPLATDTRVSVESSAVNTTLIVYDCQKSDAGKYTITLKNVAGTKEGTISIKVVGKPGIPTGPIKFDEVTAEAMTLKWAPPKDDGGSEITNYILEKRDSVNNKWVTCASAVQKTTFRVTRLHEGMEYTFRVSAENKYGVGEGLKSEPIVARHPFDVPDAPPPPNIVDVRHDSVSLTWTDPKKTGGSPITGYHLEFKERNSLLWKRANKTPIRMRDFKVTGLTEGLEYEFRVMAINLAGVGKPSLPSEPVVALDPIDPPGKPEVINITRNSVTLIWTEPKYDGGHKLTGYIVEKRDLPSKSWMKANHVNVPECAFTVTDLVEGGKYEFRIRAKNTAGAISAPSESTETIICKDEYEAPTIVLDPTIKDGLTIKAGDTIVLNAISILGKPLPKSSWSKAGKDIRPSDITQITSTPTSSMLTIKYATRKDAGEYTITATNPFGTKVEHVKVTVLDVPGPPGPVEISNVSAEKATLTWTPPLEDGGSPIKSYILEKRETSRLLWTVVSEDIQSCRHVATKLIQGNEYIFRVSAVNHYGKGEPVQSEPVKMVDRFGPPGPPEKPEVSNVTKNTATVSWKRPVDDGGSEITGYHVERREKKSLRWVRAIKTPVSDLRCKVTGLQEGSTYEFRVSAENRAGIGPPSEASDSVLMKDAAYPPGPPSNPHVTDTTKKSASLAWGKPHYDGGLEITGYVVEHQKVGDEAWIKDTTGTALRITQFVVPDLQTKEKYNFRISAINDAGVGEPAVIPDVEIVEREMAPDFELDAELRRTLVVRAGLSIRIFVPIKGRPAPEVTWTKDNINLKNRANIENTESFTLLIIPECNRYDTGKFVMTIENPAGKKSGFVNVRVLDTPGPVLNLRPTDITKDSVTLHWDLPLIDGGSRITNYIVEKREATRKSYSTATTKCHKCTYKVTGLSEGCEYFFRVMAENEYGIGEPTETTEPVKASEAPSPPDSLNIMDITKSTVSLAWPKPKHDGGSKITGYVIEAQRKGSDQWTHITTVKGLECVVRNLTEGEEYTFQVMAVNSAGRSAPRESRPVIVKEQTMLPELDLRGIYQKLVIAKAGDNIKVEIPVLGRPKPTVTWKKGDQILKQTQRVNFETTATSTILNINECVRSDSGPYPLTARNIVGEVGDVITIQVHDIPGPPTGPIKFDEVSSDFVTFSWDPPENDGGVPISNYVVEMRQTDSTTWVELATTVIRTTYKATRLTTGLEYQFRVKAQNRYGVGPGITSACIVANYPFKVPGPPGTPQVTAVTKDSMTISWHEPLSDGGSPILGYHVERKERNGILWQTVSKALVPGNIFKSSGLTDGIAYEFRVIAENMAGKSKPSKPSEPMLALDPIDPPGKPVPLNITRHTVTLKWAKPEYTGGFKITSYIVEKRDLPNGRWLKANFSNILENEFTVSGLTEDAAYEFRVIAKNAAGAISPPSEPSDAITCRDDVEAPKIKVDVKFKDTVILKAGEAFRLEADVSGRPPPTMEWSKDGKELEGTAKLEIKIADFSTNLVNKDSTRRDSGAYTLTATNPGGFAKHIFNVKVLDRPGPPEGPLAVTEVTSEKCVLSWFPPLDDGGAKIDHYIVQKRETSRLAWTNVASEVQVTKLKVTKLLKGNEYIFRVMAVNKYGVGEPLESEPVLAVNPYGPPDPPKNPEVTTITKDSMVVCWGHPDSDGGSEIINYIVERRDKAGQRWIKCNKKTLTDLRYKVSGLTEGHEYEFRIMAENAAGISAPSPTSPFYKACDTVFKPGPPGNPRVLDTSRSSISIAWNKPIYDGGSEITGYMVEIALPEEDEWQIVTPPAGLKATSYTITGLTENQEYKIRIYAMNSEGLGEPALVPGTPKAEDRMLPPEIELDADLRKVVTIRACCTLRLFVPIKGRPAPEVKWARDHGESLDKASIESTSSYTLLIVGNVNRFDSGKYILTVENSSGSKSAFVNVRVLDTPGPPQDLKVKEVTKTSVTLTWDPPLLDGGSKIKNYIVEKRESTRKAYSTVATNCHKTSWKVDQLQEGCSYYFRVLAENEYGIGLPAETAESVKASERPLPPGKITLMDVTRNSVSLSWEKPEHDGGSRILGYIVEMQTKGSDKWATCATVKVTEATITGLIQGEEYSFRVSAQNEKGISDPRQLSVPVIAKDLVIPPAFKLLFNTFTVLAGEDLKVDVPFIGRPTPAVTWHKDNVPLKQTTRVNAESTENNSLLTIKDACREDVGHYVVKLTNSAGEAIETLNVIVLDKPGPPTGPVKMDEVTADSITLSWGPPKYDGGSSINNYIVEKRDTSTTTWQIVSATVARTTIKACRLKTGCEYQFRIAAENRYGKSTYLNSEPTVAQYPFKVPGPPGTPVVTLSSRDSMEVQWNEPISDGGSRVIGYHLERKERNSILWVKLNKTPIPQTKFKTTGLEEGVEYEFRVSAENIVGIGKPSKVSECYVARDPCDPPGRPEAIIVTRNSVTLQWKKPTYDGGSKITGYIVEKKELPEGRWMKASFTNIIDTHFEVTGLVEDHRYEFRVIARNAAGVFSEPSESTGAITARDEVDPPRISMDPKYKDTIVVHAGESFKVDADIYGKPIPTIQWIKGDQELSNTARLEIKSTDFATSLSVKDAVRVDSGNYILKAKNVAGERSVTVNVKVLDRPGPPEGPVVISGVTAEKCTLAWKPPLQDGGSDIINYIVERRETSRLVWTVVDANVQTLSCKVTKLLEGNEYTFRIMAVNKYGVGEPLESEPVVAKNPFVVPDAPKAPEVTTVTKDSMIVVWERPASDGGSEILGYVLEKRDKEGIRWTRCHKRLIGELRLRVTGLIENHDYEFRVSAENAAGLSEPSPPSAYQKACDPIYKPGPPNNPKVIDITRSSVFLSWSKPIYDGGCEIQGYIVEKCDVSVGEWTMCTPPTGINKTNIEVEKLLEKHEYNFRICAINKAGVGEHADVPGPIIVEEKLEAPDIDLDLELRKIINIRAGGSLRLFVPIKGRPTPEVKWGKVDGEIRDAAIIDVTSSFTSLVLDNVNRYDSGKYTLTLENSSGTKSAFVTVRVLDTPSPPVNLKVTEITKDSVSITWEPPLLDGGSKIKNYIVEKREATRKSYAAVVTNCHKNSWKIDQLQEGCSYYFRVTAENEYGIGLPAQTADPIKVAEVPQPPGKITVDDVTRNSVSLSWTKPEHDGGSKIIQYIVEMQAKHSEKWSECARVKSLQAVITNLTQGEEYLFRVVAVNEKGRSDPRSLAVPIVAKDLVIEPDVKPAFSSYSVQVGQDLKIEVPISGRPKPTITWTKDGLPLKQTTRINVTDSLDLTTLSIKETHKDDGGQYGITVANVVGQKTASIEIVTLDKPDPPKGPVKFDDVSAESITLSWNPPLYTGGCQITNYIVQKRDTTTTVWDVVSATVARTTLKVTKLKTGTEYQFRIFAENRYGQSFALESDPIVAQYPYKEPGPPGTPFATAISKDSMVIQWHEPVNNGGSPVIGYHLERKERNSILWTKVNKTIIHDTQFKAQNLEEGIEYEFRVYAENIVGVGKASKNSECYVARDPCDPPGTPEPIMVKRNEITLQWTKPVYDGGSMITGYIVEKRDLPDGRWMKASFTNVIETQFTVSGLTEDQRYEFRVIAKNAAGAISKPSDSTGPITAKDEVELPRISMDPKFRDTIVVNAGETFRLEADVHGKPLPTIEWLRGDKEIEESARCEIKNTDFKALLIVKDAIRIDGGQYILRASNVAGSKSFPVNVKVLDRPGPPEGPVQVTGVTSEKCSLTWSPPLQDGGSDISHYVVEKRETSRLAWTVVASEVVTNSLKVTKLLEGNEYVFRIMAVNKYGVGEPLESAPVLMKNPFVLPGPPKSLEVTNIAKDSMTVCWNRPDSDGGSEIIGYIVEKRDRSGIRWIKCNKRRITDLRLRVTGLTEDHEYEFRVSAENAAGVGEPSPATVYYKACDPVFKPGPPTNAHIVDTTKNSITLAWGKPIYDGGSEILGYVVEICKADEEEWQIVTPQTGLRVTRFEISKLTEHQEYKIRVCALNKVGLGEATSVPGTVKPEDKLEAPELDLDSELRKGIVVRAGGSARIHIPFKGRPTPEITWSREEGEFTDKVQIEKGVNYTQLSIDNCDRNDAGKYILKLENSSGSKSAFVTVKVLDTPGPPQNLAVKEVRKDSAFLVWEPPIIDGGAKVKNYVIDKRESTRKAYANVSSKCSKTSFKVENLTEGAIYYFRVMAENEFGVGVPVETVDAVKAAEPPSPPGKVTLTDVSQTSASLMWEKPEHDGGSRVLGYVVEMQPKGTEKWSIVAESKVCNAVVTGLSSGQEYQFRVKAYNEKGKSDPRVLGVPVIAKDLTIQPSLKLPFNTYSIQAGEDLKIEIPVIGRPRPNISWVKDGEPLKQTTRVNVEETATSTVLHIKEGNKDDFGKYTVTATNSAGTATENLSVIVLEKPGPPVGPVRFDEVSADFVVISWEPPAYTGGCQISNYIVEKRDTTTTTWHMVSATVARTTIKITKLKTGTEYQFRIFAENRYGKSAPLDSKAVIVQYPFKEPGPPGTPFVTSISKDQMLVQWHEPVNDGGTKIIGYHLEQKEKNSILWVKLNKTPIQDTKFKTTGLDEGLEYEFKVSAENIVGIGKPSKVSECFVARDPCDPPGRPEAIVITRNNVTLKWKKPAYDGGSKITGYIVEKKDLPDGRWMKASFTNVLETEFTVSGLVEDQRYEFRVIARNAAGNFSEPSDSSGAITARDEIDAPNASLDPKYKDVIVVHAGETFVLEADIRGKPIPDVVWSKDGKELEETAARMEIKSTIQKTTLVVKDCIRTDGGQYILKLSNVGGTKSIPITVKVLDRPGPPEGPLKVTGVTAEKCYLAWNPPLQDGGANISHYIIEKRETSRLSWTQVSTEVQALNYKVTKLLPGNEYIFRVMAVNKYGIGEPLESGPVTACNPYKPPGPPSTPEVSAITKDSMVVTWARPVDDGGTEIEGYILEKRDKEGVRWTKCNKKTLTDLRLRVTGLTEGHSYEFRVAAENAAGVGEPSEPSVFYRACDALYPPGPPSNPKVTDTSRSSVSLAWSKPIYDGGAPVKGYVVEVKEAAADEWTTCTPPTGLQGKQFTVTKLKENTEYNFRICAINSEGVGEPATLPGSVVAQERIEPPEIELDADLRKVVVLRASATLRLFVTIKGRPEPEVKWEKAEGILTDRAQIEVTSSFTMLVIDNVTRFDSGRYNLTLENNSGSKTAFVNVRVLDSPSAPVNLTIREVKKDSVTLSWEPPLIDGGAKITNYIVEKRETTRKAYATITNNCTKTTFRIENLQEGCSYYFRVLASNEYGIGLPAETTEPVKVSEPPLPPGRVTLVDVTRNTATIKWEKPESDGGSKITGYVVEMQTKGSEKWSTCTQVKTLEATISGLTAGEEYVFRVAAVNEKGRSDPRQLGVPVIARDIEIKPSVELPFHTFNVKAREQLKIDVPFKGRPQATVNWRKDGQTLKETTRVNVSSSKTVTSLSIKEASKEDVGTYELCVSNSAGSITVPITIIVLDRPGPPGPIRIDEVSCDSITISWNPPEYDGGCQISNYIVEKKETTSTTWHIVSQAVARTSIKIVRLTTGSEYQFRVCAENRYGKSSYSESSAVVAEYPFSPPGPPGTPKVVHATKSTMLVTWQVPVNDGGSRVIGYHLEYKERSSILWSKANKILIADTQMKVSGLDEGLMYEYRVYAENIAGIGKCSKSCEPVPARDPCDPPGQPEVTNITRKSVSLKWSKPHYDGGAKITGYIVERRELPDGRWLKCNYTNIQETYFEVTELTEDQRYEFRVFARNAADSVSEPSESTGPIIVKDDVEPPRVMMDVKFRDVIVVKAGEVLKINADIAGRPLPVISWAKDGIEIEERARTEIISTDNHTLLTVKDCIRRDTGQYVLTLKNVAGTRSVAVNCKVLDKPGPPAGPLEINGLTAEKCSLSWGRPQEDGGADIDYYIVEKRETSHLAWTICEGELQMTSCKVTKLLKGNEYIFRVTGVNKYGVGEPLESVAIKALDPFTVPSPPTSLEITSVTKESMTLCWSRPESDGGSEISGYIIERREKNSLRWVRVNKKPVYDLRVKSTGLREGCEYEYRVYAENAAGLSLPSETSPLIRAEDPVFLPSPPSKPKIVDSGKTTITIAWVKPLFDGGAPITGYTVEYKKSDDTDWKTSIQSLRGTEYTISGLTTGAEYVFRVKSVNKVGASDPSDSSDPQIAKEREEEPLFDIDSEMRKTLIVKAGASFTMTVPFRGRPVPNVLWSKPDTDLRTRAYVDTTDSRTSLTIENANRNDSGKYTLTIQNVLSAASLTLVVKVLDTPGPPTNITVQDVTKESAVLSWDVPENDGGAPVKNYHIEKREASKKAWVSVTNNCNRLSYKVTNLQEGAIYYFRVSGENEFGVGIPAETKEGVKITEKPSPPEKLGVTSISKDSVSLTWLKPEHDGGSRIVHYVVEALEKGQKNWVKCAVAKSTHHVVSGLRENSEYFFRVFAENQAGLSDPRELLLPVLIKEQLEPPEIDMKNFPSHTVYVRAGSNLKVDIPISGKPLPKVTLSRDGVPLKATMRFNTEITAENLTINLKESVTADAGRYEITAANSSGTTKAFINIVVLDRPGPPTGPVVISDITEESVTLKWEPPKYDGGSQVTNYILLKRETSTAVWTEVSATVARTMMKVMKLTTGEEYQFRIKAENRFGISDHIDSACVTVKLPYTTPGPPSTPWVTNVTRESITVGWHEPVSNGGSAVVGYHLEMKDRNSILWQKANKLVIRTTHFKVTTISAGLIYEFRVYAENAAGVGKPSHPSEPVLAIDACEPPRNVRITDISKNSVSLSWQQPAFDGGSKITGYIVERRDLPDGRWTKASFTNVTETQFIISGLTQNSQYEFRVFARNAVGSISNPSEVVGPITCIDSYGGPVIDLPLEYTEVVKYRAGTSVKLRAGISGKPAPTIEWYKDDKELQTNALVCVENTTDLASILIKDADRLNSGCYELKLRNAMGSASATIRVQILDKPGPPGGPIEFKTVTAEKITLLWRPPADDGGAKITHYIVEKRETSRVVWSMVSEHLEECIITTTKIIKGNEYIFRVRAVNKYGIGEPLESDSVVAKNAFVTPGPPGIPEVTKITKNSMTVVWSRPIADGGSDISGYFLEKRDKKSLGWFKVLKETIRDTRQKVTGLTENSDYQYRVCAVNAAGQGPFSEPSEFYKAADPIDPPGPPAKIRIADSTKSSITLGWSKPVYDGGSAVTGYVVEIRQGEEEEWTTVSTKGEVRTTEYVVSNLKPGVNYYFRVSAVNCAGQGEPIEMNEPVQAKDILEAPEIDLDVALRTSVIAKAGEDVQVLIPFKGRPPPTVTWRKDEKNLGSDARYSIENTDSSSLLTIPQVTRNDTGKYILTIENGVGEPKSSTVSVKVLDTPAACQKLQVKHVSRGTVTLLWDPPLIDGGSPIINYVIEKRDATKRTWSVVSHKCSSTSFKLIDLSEKTPFFFRVLAENEIGIGEPCETTEPVKAAEVPAPIRDLSMKDSTKTSVILSWTKPDFDGGSVITEYVVERKGKGEQTWSHAGISKTCEIEVSQLKEQSVLEFRVFAKNEKGLSDPVTIGPITVKELIITPEVDLSDIPGAQVTVRIGHNVHLELPYKGKPKPSISWLKDGLPLKESEFVRFSKTENKITLSIKNAKKEHGGKYTVILDNAVCRIAVPITVITLGPPSKPKGPIRFDEIKADSVILSWDVPEDNGGGEITCYSIEKRETSQTNWKMVCSSVARTTFKVPNLVKDAEYQFRVRAENRYGVSQPLVSSIIVAKHQFRIPGPPGKPVIYNVTSDGMSLTWDAPVYDGGSEVTGFHVEKKERNSILWQKVNTSPISGREYRATGLVEGLDYQFRVYAENSAGLSSPSDPSKFTLAVSPVDPPGTPDYIDVTRETITLKWNPPLRDGGSKIVGYSIEKRQGNERWVRCNFTDVSECQYTVTGLSPGDRYEFRIIARNAVGTISPPSQSSGIIMTRDENVPPIVEFGPEYFDGLIIKSGESLRIKALVQGRPVPRVTWFKDGVEIEKRMNMEITDVLGSTSLFVRDATRDHRGVYTVEAKNASGSAKAEIKVKVQDTPGKVVGPIRFTNITGEKMTLWWDAPLNDGCAPITHYIIEKRETSRLAWALIEDKCEAQSYTAIKLINGNEYQFRVSAVNKFGVGRPLDSDPVVAQIQYTVPDAPGIPEPSNITGNSITLTWARPESDGGSEIQQYILERREKKSTRWVKVISKRPISETRFKVTGLTEGNEYEFHVMAENAAGVGPASGISRLIKCREPVNPPGPPTVVKVTDTSKTTVSLEWSKPVFDGGMEIIGYIIEMCKADLGDWHKVNAEACVKTRYTVTDLQAGEEYKFRVSAINGAGKGDSCEVTGTIKAVDRLTAPELDIDANFKQTHVVRAGASIRLFIAYQGRPTPTAVWSKPDSNLSLRADIHTTDSFSTLTVENCNRNDAGKYTLTVENNSGSKSITFTVKVLDTPGPPGPITFKDVTRGSATLMWDAPLLDGGARIHHYVVEKREASRRSWQVISEKCTRQIFKVNDLAEGVPYYFRVSAVNEYGVGEPYEMPEPIVATEQPAPPRRLDVVDTSKSSAVLAWLKPDHDGGSRITGYLLEMRQKGSDFWVEAGHTKQLTFTVERLVEKTEYEFRVKAKNDAGYSEPREAFSSVIIKEPQIEPTADLTGITNQLITCKAGSPFTIDVPISGRPAPKVTWKLEEMRLKETDRVSITTTKDRTTLTVKDSMRGDSGRYFLTLENTAGVKTFSVTVVVIGRPGPVTGPIEVSSVSAESCVLSWGEPKDGGGTEITNYIVEKRESGTTAWQLVNSSVKRTQIKVTHLTKYMEYSFRVSSENRFGVSKPLESAPIIAEHPFVPPSAPTRPEVYHVSANAMSIRWEEPYHDGGSKIIGYWVEKKERNTILWVKENKVPCLECNYKVTGLVEGLEYQFRTYALNAAGVSKASEASRPIMAQNPVDAPGRPEVTDVTRSTVSLIWSAPAYDGGSKVVGYIIERKPVSEVGDGRWLKCNYTIVSDNFFTVTALSEGDTYEFRVLAKNAAGVISKGSESTGPVTCRDEYAPPKAELDARLHGDLVTIRAGSDLVLDAAVGGKPEPKIIWTKGDKELDLCEKVSLQYTGKRATAVIKFCDRSDSGKYTLTVKNASGTKAVSVMVKVLDSPGPCGKLTVSRVTQEKCTLAWSLPQEDGGAEITHYIVERRETSRLNWVIVEGECPTLSYVVTRLIKNNEYIFRVRAVNKYGPGVPVESEPIVARNSFTIPSPPGIPEEVGTGKEHIIIQWTKPESDGGNEISNYLVDKREKKSLRWTRVNKDYVVYDTRLKVTSLMEGCDYQFRVTAVNAAGNSEPSEASNFISCREPSYTPGPPSAPRVVDTTKHSISLAWTKPMYDGGTDIVGYVLEMQEKDTDQWYRVHTNATIRNTEFTVPDLKMGQKYSFRVAAVNVKGMSEYSESIAEIEPVERIEIPDLELADDLKKTVTIRAGASLRLMVSVSGRPPPVITWSKQGIDLASRAIIDTTESYSLLIVDKVNRYDAGKYTIEAENQSGKKSATVLVKVYDTPGPCPSVKVKEVSRDSVTITWEIPTIDGGAPVNNYIVEKREAAMRAFKTVTTKCSKTLYRISGLVEGTMYYFRVLPENIYGIGEPCETSDAVLVSEVPLVPAKLEVVDVTKSTVTLAWEKPLYDGGSRLTGYVLEACKAGTERWMKVVTLKPTVLEHTVTSLNEGEQYLFRIRAQNEKGVSEPRETVTAVTVQDLRVLPTIDLSTMPQKTIHVPAGRPVELVIPIAGRPPPAASWFFAGSKLRESERVTVETHTKVAKLTIRETTIRDTGEYTLELKNVTGTTSETIKVIILDKPGPPTGPIKIDEIDATSITISWEPPELDGGAPLSGYVVEQRDAHRPGWLPVSESVTRSTFKFTRLTEGNEYVFRVAATNRFGIGSYLQSEVIECRSSIRIPGPPETLQIFDVSRDGMTLTWYPPEDDGGSQVTGYIVERKEVRADRWVRVNKVPVTMTRYRSTGLTEGLEYEHRVTAINARGSGKPSRPSKPIVAMDPIAPPGKPQNPRVTDTTRTSVSLAWSVPEDEGGSKVTGYLIEMQKVDQHEWTKCNTTPTKIREYTLTHLPQGAEYRFRVLACNAGGPGEPAEVPGTVKVTEMLEYPDYELDERYQEGIFVRQGGVIRLTIPIKGKPFPICKWTKEGQDISKRAMIATSETHTELVIKEADRGDSGTYDLVLENKCGKKAVYIKVRVIGSPNSPEGPLEYDDIQVRSVRVSWRPPADDGGADILGYILERREVPKAAWYTIDSRVRGTSLVVKGLKENVEYHFRVSAENQFGISKPLKSEEPVTPKTPLNPPEPPSNPPEVLDVTKSSVSLSWSRPKDDGGSRVTGYYIERKETSTDKWVRHNKTQITTTMYTVTGLVPDAEYQFRIIAQNDVGLSETSPASEPVVCKDPFDKPSQPGELEILSISKDSVTLQWEKPECDGGKEILGYWVEYRQSGDSAWKKSNKERIKDKQFTIGGLLEATEYEFRVFAENETGLSRPRRTAMSIKTKLTSGEAPGIRKEMKDVTTKLGEAAQLSCQIVGRPLPDIKWYRFGKELIQSRKYKMSSDGRTHTLTVMTEEQEDEGVYTCIATNEVGEVETSSKLLLQATPQFHPGYPLKEKYYGAVGSTLRLHVMYIGRPVPAMTWFHGQKLLQNSENITIENTEHYTHLVMKNVQRKTHAGKYKVQLSNVFGTVDAILDVEIQDKPDKPTGPIVIEALLKNSAVISWKPPADDGGSWITNYVVEKCEAKEGAEWQLVSSAISVTTCRIVNLTENAGYYFRVSAQNTFGISDPLEVSSVVIIKSPFEKPGAPGKPTITAVTKDSCVVAWKPPASDGGAKIRNYYLEKREKKQNKWISVTTEEIRETVFSVKNLIEGLEYEFRVKCENLGGESEWSEISEPITPKSDVPIQAPHFKEELRNLNVRYQSNATLVCKVTGHPKPIVKWYRQGKEIIADGLKYRIQEFKGGYHQLIIASVTDDDATVYQVRATNQGGSVSGTASLEVEVPAKIHLPKTLEGMGAVHALRGEVVSIKIPFSGKPDPVITWQKGQDLIDNNGHYQVIVTRSFTSLVFPNGVERKDAGFYVVCAKNRFGIDQKTVELDVADVPDPPRGVKVSDVSRDSVNLTWTEPASDGGSKITNYIVEKCATTAERWLRVGQARETRYTVINLFGKTSYQFRVIAENKFGLSKPSEPSEPTITKEDKTRAMNYDEEVDETREVSMTKASHSSTKELYEKYMIAEDLGRGEFGIVHRCVETSSKKTYMAKFVKVKGTDQVLVKKEISILNIARHRNILHLHESFESMEELVMIFEFISGLDIFERINTSAFELNEREIVSYVHQVCEALQFLHSHNIGHFDIRPENIIYQTRRSSTIKIIEFGQARQLKPGDNFRLLFTAPEYYAPEVHQHDVVSTATDMWSLGTLVYVLLSGINPFLAETNQQIIENIMNAEYTFDEEAFKEISIEAMDFVDRLLVKERKSRMTASEALQHPWLKQKIERVSTKVIRTLKHRRYYHTLIKKDLNMVVSAARISCGGAIRSQKGVSVAKVKVASIEIGPVSGQIMHAVGEEGGHVKYVCKIENYDQSTQVTWYFGVRQLENSEKYEITYEDGVAILYVKDITKLDDGTYRCKVVNDYGEDSSYAELFVKGVREVYDYYCRRTMKKIKRRTDTMRLLERPPEFTLPLYNKTAYVGENVRFGVTITVHPEPHVTWYKSGQKIKPGDNDKKYTFESDKGLYQLTINSVTTDDDAEYTVVARNKYGEDSCKAKLTVTLHPPPTDSTLRPMFKRLLANAECQEGQSVCFEIRVSGIPPPTLKWEKDGQPLSLGPNIEIIHEGLDYYALHIRDTLPEDTGYYRVTATNTAGSTSCQAHLQVERLRYKKQEFKSKEEHERHVQKQIDKTLRMAEILSGTESVPLTQVAKEALREAAVLYKPAVSTKTVKGEFRLEIEEKKEERKLRMPYDVPEPRKYKQTTIEEDQRIKQFVPMSDMKWYKKIRDQYEMPGKLDRVVQKRPKRIRLSRWEQFYVMPLPRITDQYRPKWRIPKLSQDDLEIVRPARRRTPSPDYDFYYRPRRRSLGDISDEELLLPIDDYLAMKRTEEERLRLEEELELGFSASPPSRSPPHFELSSLRYSSPQAHVKVEETRKDFRYSTYHIPTKAEASTSYAELRERHAQAAYRQPKQRQRIMAEREDEELLRPVTTTQHLSEYKSELDFMSKEEKSRKKSRRQREVTEITEIEEEYEISKHAQRESSSSASRLLRRRRSLSPTYIELMRPVSELIRSRPQPAEEYEDDTERRSPTPERTRPRSPSPVSSERSLSRFERSARFDIFSRYESMKAALKTQKTSERKYEVLSQQPFTLDHAPRITLRMRSHRVPCGQNTRFILNVQSKPTAEVKWYHNGVELQESSKIHYTNTSGVLTLEILDCHTDDSGTYRAVCTNYKGEASDYATLDVTGGDYTTYASQRRDEEVPRSVFPELTRTEAYAVSSFKKTSEMEASSSVREVKSQMTETRESLSSYEHSASAEMKSAALEEKSLEEKSTTRKIKTTLAARILTKPRSMTVYEGESARFSCDTDGEPVPTVTWLRKGQVLSTSARHQVTTTKYKSTFEISSVQASDEGNYSVVVENSEGKQEAEFTLTIQKARVTEKAVTSPPRVKSPEPRVKSPEAVKSPKRVKSPEPSHPKAVSPTETKPTPTEKVQHLPVSAPPKITQFLKAEASKEIAKLTCVVESSVLRAKEVTWYKDGKKLKENGHFQFHYSADGTYELKINNLTESDQGEYVCEISGEGGTSKTNLQFMGQAFKSIHEKVSKISETKKSDQKTTESTVTRKTEPKAPEPISSKPVIVTGLQDTTVSSDSVAKFAVKATGEPRPTAIWTKDGKAITQGGKYKLSEDKGGFFLEIHKTDTSDSGLYTCTVKNSAGSVSSSCKLTIKAIKDTEAQKVSTQKTSEITPQKKAVVQEEISQKALRSEEIKMSEAKSQEKLALKEEASKVLISEEVKKSAATSLEKSIVHEEITKTSQASEEVRTHAEIKAFSTQMSINEGQRLVLKANIAGATDVKWVLNGVELTNSEEYRYGVSGSDQTLTIKQASHRDEGILTCISKTKEGIVKCQYDLTLSKELSDAPAFISQPRSQNINEGQNVLFTCEISGEPSPEIEWFKNNLPISISSNVSISRSRNVYSLEIRNASVSDSGKYTIKAKNFRGQCSATASLMVLPLVEEPSREVVLRTSGDTSLQGSFSSQSVQMSASKQEASFSSFSSSSASSMTEMKFASMSAQSMSSMQESFVEMSSSSFMGISNMTQLESSTSKMLKAGIRGIPPKIEALPSDISIDEGKVLTVACAFTGEPTPEVTWSCGGRKIHSQEQGRFHIENTDDLTTLIIMDVQKQDGGLYTLSLGNEFGSDSATVNIHIRSI

SEQ ID NO: 7372 - protein, 5604 aa, Homo sapiens
MTTQAPTFTQPLQSVVVLEGSTATFEAHISGFPVPEVSWFRDGQVISTSTLPGVQISFSDGRAKLTIPAVTKANSGRYSLKATNGSGQATSTAELLVKAETAPPNFVQRLQSMTVRQGSQVRLQVRVTGIPTPVVKFYRDGAEIQSSLDFQISQEGDLYSLLIAEAYPEDSGTYSVNATNSVGRATSTAELLVQGEEEVPAKKTKTIVSTAQISESRQTRIEKKIEAHFDARSIATVEMVIDGAAGQQLPHKTPPRIPPKPKSRSPTPPSIAAKAQLARQQSPSPIRHSPSPVRHVRAPTPSPVRSVSPAARISTSPIRSVRSPLLMRKTQASTVATGPEVPPPWKQEGYVASSSEAEMRETTLTTSTQIRTEERWEGRYGVQEQVTISGAAGAAASVSASASYAAEAVATGAKEVKQDADKSAAVATVVAAVDMARVREPVISAVEQTAQRTTTTAVHIQPAQEQVRKEAEKTAVTKVVVAADKAKEQELKSRTKEVITTKQEQMHVTHEQIRKETEKTFVPKVVISAAKAKEQETRISEEITKKQKQVTQEAIRQETEITAASMVVVATAKSTKLETVPGAQEETTTQQDQMHLSYEKIMKETRKTVVPKVIVATPKVKEQDLVSRGREGITTKREQVQITQEKMRKEAEKTALSTIAVATAKAKEQETILRTRETMATRQEQIQVTHGKVDVGKKAEAVATVVAAVDQARVREPREPGHLEESYAQQTTLEYGYKERISAAKVAEPPQRPASEPHVVPKAVKPRVIQAPSETHIKTTDQKGMHISSQIKKTTDLTTERLVHVDKRPRTASPHFTVSKISVPKTEHGYEASIAGSAIATLQKELSATSSAQKITKSVKAPTVKPSETRVRAEPTPLPQFPFADTPDTYKSEAGVEVKKEVGVSITGTTVREERFEVLHGREAKVTETARVPAPVEIPVTPPTLVSGLKNVTVIEGESVTLECHISGYPSPTVTWYREDYQIESSIDFQITFQSGIARLMIREAFAEDSGRFTCSAVNEAGTVSTSCYLAVQVSEEFEKETTAVTEKFTTEEKRFVESRDVVMTDTSLTEEQAGPGEPAAPYFITKPVVQKLVEGGSVVFGCQVGGNPKPHVYWKKSGVPLTTGYRYKVSYNKQTGECKLVISMTFADDAGEYTIVVRNKHGETSASASLLEEADYELLMKSQQEMLYQTQVTAFVQEPKVGETAPGFVYSEYEKEYEKEQALIRKKMAKDTVVVRTYVEDQEFHISSFEERLIKEIEYRIIKTTLEELLEEDGEEKMAVDISESEAVESGFDSRIKNYRILEGMGVTFHCKMSGYPLPKIAWYKDGKRIKHGERYQMDFLQDGRASLRIPVVLPEDEGIYTAFASNIKGNAICSGKLYVEPAAPLGAPTYIPTLEPVSRIRSLSPRSVSRSPIRMSPARMSPARMSPARMSPARMSPGRRLEETDESQLERLYKPVFVLKPVSFKCLEGQTARFDLKVVGRPMPETFWFHDGQQIVNDYTHKVVIKEDGTQSLIIVPATPSDSGEWTVVAQNRAGRSSISVILTVEAVEHQVKPMFVEKLKNVNIKEGSRLEMKVRATGNPNPDIVWLKNSDIIVPHKYPKIRIEGTKGEAALKIDSTVSQDSAWYTATAINKAGRDTTRCKVNVEVEFAEPEPERKLIIPRGTYRAKEIAAPELEPLHLRYGQEQWEEGDLYDKEKQQKPFFKKKLTSLRLKRFGPAHFECRLTPIGDPTMVVEWLHDGKPLEAANRLRMINEFGYCSLDYGVAYSRDSGIITCRATNKYGTDHTSATLIVKDEKSLVEESQLPEGRKGLQRIEELERMAHEGALTGVTTDQKEKQKPDIVLYPEPVRVLEGETARFRCRVTGYPQPKVNWYLNGQLIRKSKRFRVRYDGIHYLDIVDCKSYDTGEVKVTAENPEGVIEHKVKLEIQQREDFRSVLRRAPEPRPEFHVHEPGKLQFEVQKVDRPVDTTETKEVVKLKRAERITHEKVPEESEELRSKFKRRTEEGYYEAITAVELKSRKKDESYEELLRKTKDELLHWTKELTEEEKKALAEEGKITIPTFKPDKIELSPSMEAPKIFERIQSQTVGQGSDAHFRVRVVGKPDPECEWYKNGVKIERSDRIYWYWPEDNVCELVIRDVTAEDSASIMVKAINIAGETSSHAFLLVQAKQLITFTQELQDVVAKEKDTMATFECETSEPFVKVKWYKDGMEVHEGDKYRMHSDRKVHFLSILTIDTSDAEDYSCVLVEDENVKTTAKLIVEGAVVEFVKELQDIEVPESYSGELECIVSPENIEGKWYHNDVELKSNGKYTITSRRGRQNLTVKDVTKEDQGEYSFVIDGKKTTCKLKMKPRPIAILQGLSDQKVCEGDIVQLEVKVSLESVEGVWMKDGQEVQPSDRVHIVIDKQSHMLLIEDMTKEDAGNYSFTIPALGLSTSGRVSVYSVDVITPLKDVNVIEGTKAVLECKVSVPDVTSVKWYLNDEQIKPDDRVQAIVKGTKQRLVINRTHASDEGPYKLIVGRVETNCNLSVEKIKIIRGLRDLTCTETQNVVFEVELSHSGIDVLWNFKDKEIKPSSKYKIEAHGKIYKLTVLNMMKDDEGKYTFYAGENMTSGKLTVAGGAISKPLTDQTVAESQEAVFECEVANPDSKGEWLRDGKHLPLTNNIRSESDGHKRRLIIAATKLDDIGEYTYKVATSKTSAKLKVEAVKIKKTLKNLTVTETQDAVFTVELTHPNVKGVQWIKNGVVLESNEKYAISVKGTIYSLRIKNCAIVDESVYGFRLGRLGASARLHVETVKIIKKPKDVTALENATVAFEVSVSHDTVPVKWFHKSVEIKPSDKHRLVSERKVHKLMLQNISPSDAGEYTAVVGQLECKAKLFVETLHITKTMKNIEVPETKTASFECEVSHFNVPSMWLKNGVEIEMSEKFKIVVQGKLHQLIIMNTSTEDSAEYTFVCGNDQVSATLTVTPIMITSMLKDINAEEKDTITFEVTVNYEGISYKWLKNGVEIKSTDKCQMRTKKLTHSLNIRNVHFGDAADYTFVAGKATSTATLYVEARHIEFRKHIKDIKVLEKKRAMFECEVSEPDITVQWMKDDQELQITDRIKIQKEKYVHRLLIPSTRMSDAGKYTVVAGGNVSTAKLFVEGRDVRIRSIKKEVQVIEKQRAVVEFEVNEDDVDAHWYKDGIEINFQVQERHKYVVERRIHRMFISETRQSDAGEYTFVAGRNRSSVTLYVNAPEPPQVLQELQPVTVQSGKPARFCAVISGRPQPKISWYKEEQLLSTGFKCKFLHDGQEYTLLLIEAFPEDAAVYTCEAKNDYGVATTSASLSVEVPEVVSPDQEMPVYPPAIITPLQDTVTSEGQPARFQCRVSGTDLKVSWYSKDKKIKPSRFFRMTQFEDTYQLEIAEAYPEDEGTYTFVASNAVGQVSSTANLSLEAPESILHERIEQEIEMEMKELFSEGESEHSERDTRDAFSDSEDIDHKSMAAKRYASRISSTSSWPEYFKPSFTQKLTFKYVLEGEPVVFTCRLIACPTPEMTWFHNNRPIPTGLRRIIKAESDLHHHSSSLEIKRVQDRDSGSYRLLAINSEGSAESTASLLVIQKGQDEKYLEFLKRAERTHENVEALVERGEDRIKVDLRFTGSPFNKKQDVEQKGMMRTIHFKTMSSAKKTDYMYDEEYLESKSDIRGWLNVGESFLDKETKVKLQRLREARKTLMEKKKLSLLDTSSEISSRTLRSEASDKDILFSREDMKIRSMSDLAESYKVDHSAESIVQNPHALSNQMDQNIESEELPTSFQTIVDEEIFQTEIRMSQEALVKESLPKDHLYGEILVNENTQARGQLEEIMANTTIGESSTYITNVCEKEEVYETPENVSQAITPHASESFGTLVNVEESEEIASERIKKDDLRELQLSASTRIDEFKTEQKEENMRFFENSFRKRPQRCPPSFLQEIESQEVYEGDSCNFVCHFQGYPQPIVTWYNNDMPIPRNQNFIIHSLENYSILTLSSVHHQNEGSITCVLFNQYGTVKTTSMLKVKAKQKHDVKAHKVPVFHDYLDEEEELALVFDQAKGAHPSMSQEGQTNLHLLKTNPPVPPSGDTELLSFPVEIQVTAATPIPEQDKESKEVFQTEELEPKAMPQDQVTQSPKHRFVFLSDITNEPPKMLQEMPKHARCREGDSIILECLISGEPQPVVTWFQNGVLLKQNQKFQFEEVNCSHQLYIKDVNSQDSGKYKCVAENNSGAVESVSDLTVEPVTYRENSQFENIGEIYGKYSRDQQLQDQGESVRAHFYDYPAGPFTPWTNVKEYSVRDYFQSLETIEQIDQKEQVRCIPSREKIPRFVHGASRTIKISKPIRAEFIQCQAEGKERHVSEKSKLHQAEGTVYPFVDDFSDVTIKKEIRNNFGKLGRSEKENVQECAQSDYLPNIHSERISDSYNTKDSSAIVYEESLGEEIHYPGKKVKHRIIEFEKLHVEKGVLEKRPTRTSIVNPPQKKIDDKAFSLKQRESRSSNLNANMYQAEKMSPNTESDSSNIAINLKLLSSQTHKEFDAQEREQQEKISLIDKPAISKRAEHESPITFDLKQFHTQIKHTDVKFQELDSGQPEEAYFKIQHPADTENIVFDLKQMYSHIGDPALEFQGQETREQQEIHYKEKIPSPETLQPDTHNISKSVQNNVFASQEISSSQELSNRTMVEKSSIDENSISLEKEVRHVQEQNLDILKTDLSLKSFSEEIYSESCALLPTSSADIEETDLSEKSCPLENGGRSSISHLKKAASEEKPLGVGEMEEECTLEPELAAFPKQDGGTQEYTDATLEDHRGDVQEADTLHRQLSLSQCFPLLMTEEQQNPGEQISTNIHASGEEKCYEEVQVQNEASFSTLEGEMIETSFSQNIPKLDEAHTTEAAESETSLTQYLLAAGKREVPETKDTRDQAKLVQSESITSMEVEEVTFNTVYEYYNQKQESLGRPLSPESDISIGVGSTTSEEISELDQFYTPPSSVEYFESPKSPDLYFNPSDITKQSSIHSGGETVERYSTPLGEVAERYSTPSEGEVGERYSTPPGETLERYSTPPGETLERYSTPPGETLERYSTPPGETLERYSTPPGETLERYSTPPGEALERYSIPTGGPNPTGTFKTYPSKIEREDGTPNEHFYTPTEERGSAYEIWRSDSFGTPNEAIEPKDNEMPPSFIEPLTKRKVYENTTLGFIVEVEGLPVPGVKWYRNKSLLEPDERIKMERVGNVCSLEISNIQKGEGGEYMCHAVNIIGEAKSFANVDIMPQEERVVALPPPVTHQHVMEFDLEHTTSSRTPSPQEIVLEVELSEKDVKEFEKQVKIVTVPEFTPDHKSMIVSLDVLPFNFVDPNMDSREGEDKELKIDLEVFEMPPRFIMPICDFKIPENSDAVFKCSVIGIPTPEVKWYKEYMCIEPDNIKYVISEEKGSHTLKIRNVCLSDSATYRCRAVNCVGEAICRGFLTMGDSEIFAVIAKKSKVTLSSLMEELVLKSNYTDSFFEFQVVEGPPRFIKGISDCYAPIGTAAYFQCLVRGSPRPTVYWYKDGKLVQGRRFTVEESGTGFHNLFITSLVKSDEGEYRCVATNKSGMAESFAALTLT

SEQ ID NO: 7373 - protein, 33615 aa, Homo sapiens
MTTQAPTFTQPLQSVVVLEGSTATFEAHISGFPVPEVSWFRDGQVISTSTLPGVQISFSDGRAKLTIPAVTKANSGRYSLKATNGSGQATSTAELLVKAETAPPNFVQRLQSMTVRQGSQVRLQVRVTGIPTPVVKFYRDGAEIQSSLDFQISQEGDLYSLLIAEAYPEDSGTYSVNATNSVGRATSTAELLVQGEEEVPAKKTKTIVSTAQISESRQTRIEKKIEAHFDARSIATVEMVIDGAAGQQLPHKTPPRIPPKPKSRSPTPPSIAAKAQLARQQSPSPIRHSPSPVRHVRAPTPSPVRSVSPAARISTSPIRSVRSPLLMRKTQASTVATGPEVPPPWKQEGYVASSSEAEMRETTLTTSTQIRTEERWEGRYGVQEQVTISGAAGAAASVSASASYAAEAVATGAKEVKQDADKSAAVATVVAAVDMARVREPVISAVEQTAQRTTTTAVHIQPAQEQVRKEAEKTAVTKVVVAADKAKEQELKSRTKEVITTKQEQMHVTHEQIRKETEKTFVPKVVISAAKAKEQETRISEEITKKQKQVTQEAIRQETEITAASMVVVATAKSTKLETVPGAQEETTTQQDQMHLSYEKIMKETRKTVVPKVIVATPKVKEQDLVSRGREGITTKREQVQITQEKMRKEAEKTALSTIAVATAKAKEQETILRTRETMATRQEQIQVTHGKVDVGKKAEAVATVVAAVDQARVREPREPGHLEESYAQQTTLEYGYKERISAAKVAEPPQRPASEPHVVPKAVKPRVIQAPSETHIKTTDQKGMHISSQIKKTTDLTTERLVHVDKRPRTASPHFTVSKISVPKTEHGYEASIAGSAIATLQKELSATSSAQKITKSVKAPTVKPSETRVRAEPTPLPQFPFADTPDTYKSEAGVEVKKEVGVSITGTTVREERFEVLHGREAKVTETARVPAPVEIPVTPPTLVSGLKNVTVIEGESVTLECHISGYPSPTVTWYREDYQIESSIDFQITFQSGIARLMIREAFAEDSGRFTCSAVNEAGTVSTSCYLAVQVSEEFEKETTAVTEKFTTEEKRFVESRDVVMTDTSLTEEQAGPGEPAAPYFITKPVVQKLVEGGSVVFGCQVGGNPKPHVYWKKSGVPLTTGYRYKVSYNKQTGECKLVISMTFADDAGEYTIVVRNKHGETSASASLLEEADYELLMKSQQEMLYQTQVTAFVQEPKVGETAPGFVYSEYEKEYEKEQALIRKKMAKDTVVVRTYVEDQEFHISSFEERLIKEIEYRIIKTTLEELLEEDGEEKMAVDISESEAVESGFDSRIKNYRILEGMGVTFHCKMSGYPLPKIAWYKDGKRIKHGERYQMDFLQDGRASLRIPVVLPEDEGIYTAFASNIKGNAICSGKLYVEPAAPLGAPTYIPTLEPVSRIRSLSPRSVSRSPIRMSPARMSPARMSPARMSPARMSPGRRLEETDESQLERLYKPVFVLKPVSFKCLEGQTARFDLKVVGRPMPETFWFHDGQQIVNDYTHKVVIKEDGTQSLIIVPATPSDSGEWTVVAQNRAGRSSISVILTVEAVEHQVKPMFVEKLKNVNIKEGSRLEMKVRATGNPNPDIVWLKNSDIIVPHKYPKIRIEGTKGEAALKIDSTVSQDSAWYTATAINKAGRDTTRCKVNVEVEFAEPEPERKLIIPRGTYRAKEIAAPELEPLHLRYGQEQWEEGDLYDKEKQQKPFFKKKLTSLRLKRFGPAHFECRLTPIGDPTMVVEWLHDGKPLEAANRLRMINEFGYCSLDYGVAYSRDSGIITCRATNKYGTDHTSATLIVKDEKSLVEESQLPEGRKGLQRIEELERMAHEGALTGVTTDQKEKQKPDIVLYPEPVRVLEGETARFRCRVTGYPQPKVNWYLNGQLIRKSKRFRVRYDGIHYLDIVDCKSYDTGEVKVTAENPEGVIEHKVKLEIQQREDFRSVLRRAPEPRPEFHVHEPGKLQFEVQKVDRPVDTTETKEVVKLKRAERITHEKVPEESEELRSKFKRRTEEGYYEAITAVELKSRKKDESYEELLRKTKDELLHWTKELTEEEKKALAEEGKITIPTFKPDKIELSPSMEAPKIFERIQSQTVGQGSDAHFRVRVVGKPDPECEWYKNGVKIERSDRIYWYWPEDNVCELVIRDVTAEDSASIMVKAINIAGETSSHAFLLVQAKQLITFTQELQDVVAKEKDTMATFECETSEPFVKVKWYKDGMEVHEGDKYRMHSDRKVHFLSILTIDTSDAEDYSCVLVEDENVKTTAKLIVEGAVVEFVKELQDIEVPESYSGELECIVSPENIEGKWYHNDVELKSNGKYTITSRRGRQNLTVKDVTKEDQGEYSFVIDGKKTTCKLKMKPRPIAILQGLSDQKVCEGDIVQLEVKVSLESVEGVWMKDGQEVQPSDRVHIVIDKQSHMLLIEDMTKEDAGNYSFTIPALGLSTSGRVSVYSVDVITPLKDVNVIEGTKAVLECKVSVPDVTSVKWYLNDEQIKPDDRVQAIVKGTKQRLVINRTHASDEGPYKLIVGRVETNCNLSVEKIKIIRGLRDLTCTETQNVVFEVELSHSGIDVLWNFKDKEIKPSSKYKIEAHGKIYKLTVLNMMKDDEGKYTFYAGENMTSGKLTVAGGAISKPLTDQTVAESQEAVFECEVANPDSKGEWLRDGKHLPLTNNIRSESDGHKRRLIIAATKLDDIGEYTYKVATSKTSAKLKVEAVKIKKTLKNLTVTETQDAVFTVELTHPNVKGVQWIKNGVVLESNEKYAISVKGTIYSLRIKNCAIVDESVYGFRLGRLGASARLHVETVKIIKKPKDVTALENATVAFEVSVSHDTVPVKWFHKSVEIKPSDKHRLVSERKVHKLMLQNISPSDAGEYTAVVGQLECKAKLFVETLHITKTMKNIEVPETKTASFECEVSHFNVPSMWLKNGVEIEMSEKFKIVVQGKLHQLIIMNTSTEDSAEYTFVCGNDQVSATLTVTPIMITSMLKDINAEEKDTITFEVTVNYEGISYKWLKNGVEIKSTDKCQMRTKKLTHSLNIRNVHFGDAADYTFVAGKATSTATLYVEARHIEFRKHIKDIKVLEKKRAMFECEVSEPDITVQWMKDDQELQITDRIKIQKEKYVHRLLIPSTRMSDAGKYTVVAGGNVSTAKLFVEGRDVRIRSIKKEVQVIEKQRAVVEFEVNEDDVDAHWYKDGIEINFQVQERHKYVVERRIHRMFISETRQSDAGEYTFVAGRNRSSVTLYVNAPEPPQVLQELQPVTVQSGKPARFCAVISGRPQPKISWYKEEQLLSTGFKCKFLHDGQEYTLLLIEAFPEDAAVYTCEAKNDYGVATTSASLSVEVPEVVSPDQEMPVYPPAIITPLQDTVTSEGQPARFQCRVSGTDLKVSWYSKDKKIKPSRFFRMTQFEDTYQLEIAEAYPEDEGTYTFVASNAVGQVSSTANLSLEVQALDRQSSGKDVRESTKSQAVADSSFTKEESKISQKEIKSFQGSSYEYEVQVFESVSQSSIHTAASVQDTQLCHTASLSQIAESTELSKECAKESTGEAPKIFLHLQDVTVKCGDTAQFLCVLKDDSFIDVTWTHEGAKIEESERLKQSQNGNIQFLTICNVQLVDQGLYSCIVHNDCGERTTSAVLSVEGAPESILHERIEQEIEMEMKAAPVIKRKIEPLEVALGHLAKFTCEIQSAPNVRFQWFKAGREIYESDKCSIRSSKYISSLEILRTQVVDCGEYTCKASNEYGSVSCTATLTVTEAYPPTFLSRPKSLTTFVGKAAKFICTVTGTPVIETIWQKDGAALSPSPNWRISDAENKHILELSNLTIQDRGVYSCKASNKFGADICQAELIIIDKPHFIKELEPVQSAINKKVHLECQVDEDRKVTVTWSKDGQKLPPGKDYKICFEDKIATLEIPLAKLKDSGTYVCTASNEAGSSSCSATVTVREPPSFVKKVDPSYLMLPGESARLHCKLKGSPVIQVTWFKNNKELSESNTVRMYFVNSEAILDITDVKVEDSGSYSCEAVNDVGSDSCSTEIVIKEPPSFIKTLEPADIVRGTNALLQCEVSGTGPFEISWFKDKKQIRSSKKYRLFSQKSLVCLEIFSFNSADVGEYECVVANEVGKCGCMATHLLKEPPTFVKKVDDLIALGGQTVTLQAAVRGSEPISVTWMKGQEVIREDGKIKMSFSNGVAVLIIPDVQISFGGKYTCLAENEAGSQTSVGELIVKEPAKIIERAELIQVTAGDPATLEYTVAGTPELKPKWYKDGRPLVASKKYRISFKNNVAQLKFYSAELHDSGQYTFEISNEVGSSSCETTFTVLDRDIAPFFTKPLRNVDSVVNGTCRLDCKIAGSLPMRVSWFKDGKEIAASDRYRIAFVEGTASLEIIRVDMNDAGNFTCRATNSVGSKDSSGALIVQEPPSFVTKPGSKDVLPGSAVCLKSTFQGSTPLTIRWFKGNKELVSGGSCYITKEALESSLELYLVKTSDSGTYTCKVSNVAGGVECSANLFVKEPATFVEKLEPSQLLKKGDATQLACKVTGTPPIKITWFANDREIKESSKHRMSFVESTAVLRLTDVGIEDSGEYMCEAQNEAGSDHCSSIVIVKESPYFTKEFKPIEVLKEYDVMLLAEVAGTPPFEITWFKDNTILRSGRKYKTFIQDHLVSLQILKFVAADAGEYQCRVTNEVGSSICSARVTLREPPSFIKKIESTSSLRGGTAAFQATLKGSLPITVTWLKDSDEITEDDNIRMTFENNVASLYLSGIEVKHDGKYVCQAKNDAGIQRCSALLSVKEPATITEEAVSIDVTQGDPATLQVKFSGTKEITAKWFKDGQELTLGSKYKISVTDTVSILKIISTEKKDSGEYTFEVQNDVGRSSCKARINVLDLIIPPSFTKKLKKMDSIKGSFIDLECIVAGSHPISIQWFKDDQEISASEKYKFSFHDNTAFLEISQLEGTDSGTYTCSATNKAGHNQCSGHLTVKEPPYFVEKPQSQDVNPNTRVQLKALVGGTAPMTIKWFKDNKELHSGAARSVWKDDTSTSLELFAAKATDSGTYICQLSNDVGTATSKATLFVKEPPQFIKKPSPVLVLRNGQSTTFECQITGTPKIRVSWYLDGNEITAIQKHGISFIDGLATFQISGARVENSGTYVCEARNDAGTASCSIELKVKEPPTFIRELKPVEVVKYSDVELECEVTGTPPFEVTWLKNNREIRSSKKYTLTDRVSVFNLHITKCDPSDTGEYQCIVSNEGGSCSCSTRVALKEPPSFIKKIENTTTVLKSSATFQSTVAGSPPISITWLKDDQILDEDDNVYISFVDSVATLQIRSVDNGHSGRYTCQAKNESGVERCYAFLLVQEPAQIVEKAKSVDVTEKDPMTLECVVAGTPELKVKWLKDGKQIVPSRYFSMSFENNVASFRIQSVMKQDSGQYTFKVENDFGSSSCDAYLRVLDQNIPPSFTKKLTKMDKVLGSSIHMECKVSGSLPISAQWFKDGKEISTSAKYRLVCHERSVSLEVNNLELEDTANYTCKVSNVAGDDACSGILTVKEPPSFLVKPGRQQAIPDSTVEFKAILKGTPPFKIKWFKDDVELVSGPKCFIGLEGSTSFLNLYSVDASKTGQYTCHVTNDVGSDSCTTMLLVTEPPKFVKKLEASKIVKAGDSSRLECKIAGSPEIRVVWFRNEHELPASDKYRMTFIDSVAVIQMNNLSTEDSGDFICEAQNPAGSTSCSTKVIVKEPPVFSSFPPIVETLKNAEVSLECELSGTPPFEVVWYKDKRQLRSSKKYKIASKNFHTSIHILNVDTSDIGEYHCKAQNEVGSDTCVCTVKLKEPPRFVSKLNSLTVVAGEPAELQASIEGAQPIFVQWLKEKEEVIRESENIRITFVENVATLQFAKAEPANAGKYICQIKNDGGMRENMATLMVLEPAVIVEKAGPMTVTVGETCTLECKVAGTPELSVEWYKDGKLLTSSQKHKFSFYNKISSLRILSVERQDAGTYTFQVQNNVGKSSCTAVVDVSDRAVPPSFTRRLKNTGGVLGASCILECKVAGSSPISVAWFHEKTKIVSGAKYQTTFSDNVCTLQLNSLDSSDMGNYTCVAANVAGSDECRAVLTVQEPPSFVKEPEPLEVLPGKNVTFTSVIRGTPPFKVNWFRGARELVKGDRCNIYFEDTVAELELFNIDISQSGEYTCVVSNNAGQASCTTRLFVKEPAAFLKRLSDHSVEPGKSIILESTYTGTLPISVTWKKDGFNITTSEKCNIVTTEKTCILEILNSTKRDAGQYSCEIENEAGRDVCGALVSTLEPPYFVTELEPLEAAVGDSVSLQCQVAGTPEITVSWYKGDTKLRPTPEYRTYFTNNVATLVFNKVNINDSGEYTCKAENSIGTASSKTVFRIQERQLPPSFARQLKDIEQTVGLPVTLTCRLNGSAPIQVCWYRDGVLLRDDENLQTSFVDNVATLKILQTDLSHSGQYSCSASNPLGTASSSARLTAREPKKSPFFDIKPVSIDVIAGESADFECHVTGAQPMRITWSKDNKEIRPGGNYTITCVGNTPHLRILKVGKGDSGQYTCQATNDVGKDMCSAQLSVKEPPKFVKKLEASKVAKQGESIQLECKISGSPEIKVSWFRNDSELHESWKYNMSFINSVALLTINEASAEDSGDYICEAHNGVGDASCSTALTVKAPPVFTQKPSPVGALKGSDVILQCEISGTPPFEVVWVKDRKQVRNSKKFKITSKHFDTSLHILNLEASDVGEYHCKATNEVGSDTCSCSVKFKEPPRFVKKLSDTSTLIGDAVELRAIVEGFQPISVVWLKDRGEVIRESENTRISFIDNIATLQLGSPEASNSGKYICQIKNDAGMRECSAVLTVLEPARIIEKPEPMTVTTGNPFALECVVTGTPELSAKWFKDGRELSADSKHHITFINKVASLKIPCAEMSDKGLYSFEVKNSVGKSNCTVSVHVSDRIVPPSFIRKLKDVNAILGASVVLECRVSGSAPISVGWFQDGNEIVSGPKCQSSFSENVCTLNLSLLEPSDTGIYTCVAANVAGSDECSAVLTVQEPPSFEQTPDSVEVLPGMSLTFTSVIRGTPPFKVKWFKGSRELVPGESCNISLEDFVTELELFEVQPLESGDYSCLVTNDAGSASCTTHLFVKEPATFVKRLADFSVETGSPIVLEATYTGTPPISVSWIKDEYLISQSERCSITMTEKSTILEILESTIEDYAQYSCLIENEAGQDICEALVSVLEPPYFIEPLEHVEAVIGEPATLQCKVDGTPEIRISWYKEHTKLRSAPAYKMQFKNNVASLVINKVDHSDVGEYSCKADNSVGAVASSAVLVIKARKLPPFFARKLKDVHETLGFPVAFECRINGSEPLQVSWYKDGVLLKDDANLQTSFVHNVATLQILQTDQSHIGQYNCSASNPLGTASSSAKLILSEHEVPPFFDLKPVSVDLALGESGTFKCHVTGTAPIKITWAKDNREIRPGGNYKMTLVENTATLTVLKVGKGDAGQYTCYASNIAGKDSCSAQLGVQEPPRFIKKLEPSRIVKQDEFTRYECKIGGSPEIKVLWYKDETEIQESSKFRMSFVDSVAVLEMHNLSVEDSGDYTCEAHNAAGSASSSTSLKVKEPPIFRKKPHPIETLKGADVHLECELQGTPPFHVSWYKDKRELRSGKKYKIMSENFLTSIHILNVDAADIGEYQCKATNDVGSDTCVGSIALKAPPRFVKKLSDISTVVGKEVQLQTTIEGAEPISVVWFKDKGEIVRESDNIWISYSENIATLQFSRVEPANAGKYTCQIKNDAGMQECFATLSVLEPATIVEKPESIKVTTGDTCTLECTVAGTPELSTKWFKDGKELTSDNKYKISFFNKVSGLKIINVAPSDSGVYSFEVQNPVGKDSCTASLQVSDRTVPPSFTRKLKETNGLSGSSVVMECKVYGSPPISVSWFHEGNEISSGRKYQTTLTDNTCALTVNMLEESDSGDYTCIATNMAGSDECSAPLTVREPPSFVQKPDPMDVLTGTNVTFTSIVKGTPPFSVSWFKGSSELVPGDRCNVSLEDSVAELELFDVDTSQSGEYTCIVSNEAGKASCTTHLYIKAPAKFVKRLNDYSIEKGKPLILEGTFTGTPPISVTWKKNGINVTPSQRCNITTTEKSAILEIPSSTVEDAGQYNCYIENASGKDSCSAQILILEPPYFVKQLEPVKVSVGDSASLQCQLAGTPEIGVSWYKGDTKLRPTTTYKMHFRNNVATLVFNQVDINDSGEYICKAENSVGEVSASTFLTVQEQKLPPSFSRQLRDVQETVGLPVVFDCAISGSEPISVSWYKDGKPLKDSPNVQTSFLDNTATLNIFKTDRSLAGQYSCTATNPIGSASSSARLILTEGKNPPFFDIRLAPVDAVVGESADFECHVTGTQPIKVSWAKDSREIRSGGKYQISYLENSAHLTVLKVDKGDSGQYTCYAVNEVGKDSCTAQLNIKERLIPPSFTKRLSETVEETEGNSFKLEGRVAGSQPITVAWYKNNIEIQPTSNCEITFKNNTLVLQVRKAGMNDAGLYTCKVSNDAGSALCTSSIVIKEPKKPPVFDQHLTPVTVSEGEYVQLSCHVQGSEPIRIQWLKAGREIKPSDRCSFSFASGTAVLELRDVAKADSGDYVCKASNVAGSDTTKSKVTIKDKPAVAPATKKAAVDGRLFFVSEPQSIRVVEKTTATFIAKVGGDPIPNVKWTKGKWRQLNQGGRVFIHQKGDEAKLEIRDTTKTDSGLYRCVAFNEHGEIESNVNLQVDERKKQEKIEGDLRAMLKKTPILKKGAGEEEEIDIMELLKNVDPKEYEKYARMYGITDFRGLLQAFELLKQSQEEETHRLEIEEIERSERDEKEFEELVSFIQQRLSQTEPVTLIKDIENQTVLKDNDAVFEIDIKINYPEIKLSWYKGTEKLEPSDKFEISIDGDRHTLRVKNCQLKDQGNYRLVCGPHIASAKLTVIEPAWERHLQDVTLKEGQTCTMTCQFSVPNVKSEWFRNGRILKPQGRHKTEVEHKVHKLTIADVRAEDQGQYTCKYEDLETSAELRIEAEPIQFTKRIQNIVVSEHQSATFECEVSFDDAIVTWYKGPTELTESQKYNFRNDGRCHYMTIHNVTPDDEGVYSVIARLEPRGEARSTAELYLTTKEIKLELKPPDIPDSRVPIPTMPIRAVPPEEIPPVVAPPIPLLLPTPEEKKPPPKRIEVTKKAVKKDAKKVVAKPKEMTPREEIVKKPPPPTTLIPAKAPEIIDVSSKAEEVKIMTITRKKEVQKEKEAVYEKKQAVHKEKRVFIESFEEPYDELEVEPYTEPFEQPYYEEPDEDYEEIKVEAKKEVHEEWEEDFEEGQEYYEREEGYDEGEEEWEEAYQEREVIQVQKEVYEESHERKVPAKVPEKKAPPPPKVIKKPVIEKIEKTSRRMEEEKVQVTKVPEVSKKIVPQKPSRTPVQEEVIEVKVPAVHTKKMVISEEKMFFASHTEEEVSVTVPEVQKEIVTEEKIHVAISKRVEPPPKVPELPEKPAPEEVAPVPIPKKVEPPAPKVPEVPKKPVPEEKKPVPVPKKEPAAPPKVPEVPKKPVPEEKIPVPVAKKKEAPPAKVPEVQKGVVTEEKITIVTQREESPPPAVPEIPKKKVPEERKPVPRKEEEVPPPPKVPALPKKPVPEEKVAVPVPVAKKAPPPRAEVSKKTVVEEKRFVAEEKLSFAVPQRVEVTRHEVSAEEEWSYSEEEEGVSISVYREEEREEEEEAEVTEYEVMEEPEEYVVEEKLHIISKRVEAEPAEVTERQEKKIVLKPKIPAKIEEPPPAKVPEAPKKIVPEKKVPAPVPKKEKVPPPKVPEEPKKPVPEKKVPPKVIKMEEPLPAKVTERHMQITQEEKVLVAVTKKEAPPKARVPEEPKRAVPEEKVLKLKPKREEEPPAKVTEFRKRVVKEEKVSIEAPKREPQPIKEVTIMEEKERAYTLEEEAVSVQREEEYEEYEEYDYKEFEEYEPTEEYDQYEEYEEREYERYEEHEEYITEPEKPIPVKPVPEEPVPTKPKAPPAKVLKKAVPEEKVPVPIPKKLKPPPPKVPEEPKKVFEEKIRISITKREKEQVTEPAAKVPMKPKRVVAEEKVPVPRKEVAPPVRVPEVPKELEPEEVAFEEEVVTHVEEYLVEEEEEYIHEEEEFITEEEVVPVIPVKVPEVPRKPVPEEKKPVPVPKKKEAPPAKVPEVPKKPEEKVPVLIPKKEKPPPAKVPEVPKKPVPEEKVPVPVPKKVEAPPAKVPEVPKKPVPEKKVPVPAPKKVEAPPAKVPEVPKKLIPEEKKPTPVPKKVEAPPPKVPKKREPVPVPVALPQEEEVLFEEEIVPEEEVLPEEEEVLPEEEEVLPEEEEVLPEEEEIPPEEEEVPPEEEYVPEEEEFVPEEEVLPEVKPKVPVPAPVPEIKKKVTEKKVVIPKKEEAPPAKVPEVPKKVEEKRIILPKEEEVLPVEVTEEPEEEPISEEEIPEEPPSIEEVEEVAPPRVPEVIKKAVPEAPTPVPKKVEAPPAKVSKKIPEEKVPVPVQKKEAPPAKVPEVPKKVPEKKVLVPKKEAVPPAKGRTVLEEKVSVAFRQEVVVKERLELEVVEAEVEEIPEEEEFHEVEEYFEEGEFHEVEEFIKLEQHRVEEEHRVEKVHRVIEVFEAEEVEVFEKPKAPPKGPEISEKIIPPKKPPTKVVPRKEPPAKVPEVPKKIVVEEKVRVPEEPRVPPTKVPEVLPPKEVVPEKKVPVPPAKKPEAPPPKVPEAPKEVVPEKKVPVPPPKKPEVPPTKVPEVPKAAVPEKKVPEAIPPKPESPPPEVPEAPKEVVPEKKVPAAPPKKPEVTPVKVPEAPKEVVPEKKVPVPPPKKPEVPPTKVPEVPKVAVPEKKVPEAIPPKPESPPPEVFEEPEEVALEEPPAEVVEEPEPAAPPQVTVPPKKPVPEKKAPAVVAKKPELPPVKVPEVPKEVVPEKKVPLVVPKKPEAPPAKVPEVPKEVVPEKKVAVPKKPEVPPAKVPEVPKKPVLEEKPAVPVPERAESPPPEVYEEPEEIAPEEEIAPEEEKPVPVAEEEEPEVPPPAVPEEPKKIIPEKKVPVIKKPEAPPPKEPEPEKVIEKPKLKPRPPPPPPAPPKEDVKEKIFQLKAIPKKKVPEKPQVPEKVELTPLKVPGGEKKVRKLLPERKPEPKEEVVLKSVLRKRPEEEEPKVEPKKLEKVKKPAVPEPPPPKPVEEVEVPTVTKRERKIPEPTKVPEIKPAIPLPAPEPKPKPEAEVKTIKPPPVEPEPTPIAAPVTVPVVGKKAEAKAPKEEAAKPKGPIKGVPKKTPSPIEAERRKLRPGSGGEKPPDEAPFTYQLKAVPLKFVKEIKDIILTESEFVGSSAIFECLVSPSTAITTWMKDGSNIRESPKHRFIADGKDRKLHIIDVQLSDAGEYTCVLRLGNKEKTSTAKLVVEELPVRFVKTLEEEVTVVKGQPLYLSCELNKERDVVWRKDGKIVVEKPGRIVPGVIGLMRALTINDADDTDAGTYTVTVENANNLECSSCVKVVEVIRDWLVKPIRDQHVKPKGTAIFACDIAKDTPNIKWFKGYDEIPAEPNDKTEILRDGNHLYLKIKNAMPEDIAEYAVEIEGKRYPAKLTLGEREVELLKPIEDVTIYEKESASFDAEISEADIPGQWKLKGELLRPSPTCEIKAEGGKRFLTLHKVKLDQAGEVLYQALNAITTAILTVKEIELDFAVPLKDVTVPERRQARFECVLTREANVIWSKGPDIIKSSDKFDIIADGKKHILVINDSQFDDEGVYTAEVEGKKTSARLFVTGIRLKFMSPLEDQTVKEGETATFVCELSHEKMHVVWFKNDAKLHTSRTVLISSEGKTHKLEMKEVTLDDISQIKAQVKELSSTAQLKVLEADPYFTVKLHDKTAVEKDEITLKCEVSKDVPVKWFKDGEEIVPSPKYSIKADGLRRILKIKKADLKDKGEYVCDCGTDKTKANVTVEARLIKVEKPLYGVEVFVGETAHFEIELSEPDVHGQWKLKGQPLTASPDCEIIEDGKKHILILHNCQLGMTGEVSFQAANAKSAANLKVKELPLIFITPLSDVKVFEKDEAKFECEVSREPKTFRWLKGTQEITGDDRFELIKDGTKHSMVIKSAAFEDEAKYMFEAEDKHTSGKLIIEGIRLKFLTPLKDVTAKEKESAVFTVELSHDNIRVKWFKNDQRLHTTRSVSMQDEGKTHSITFKDLSIDDTSQIRVEAMGMSSEAKLTVLEGDPYFTGKLQDYTGVEKDEVILQCEISKADAPVKWFKDGKEIKPSKNAVIKADGKKRMLILKKALKSDIGQYTCDCGTDKTSGKLDIEDREIKLVRPLHSVEVMETETARFETEISEDDIHANWKLKGEALLQTPDCEIKEEGKIHSLVLHNCRLDQTGGVDFQAANVKSSAHLRVKPRVIGLLRPLKDVTVTAGETATFDCELSYEDIPVEWYLKGKKLEPSDKVVPRSEGKVHTLTLRDVKLEDAGEVQLTAKDFKTHANLFVKEPPVEFTKPLEDQTVEEGATAVLECEVSRENAKVKWFKNGTEILKSKKYEIVADGRVRKLVIHDCTPEDIKTYTCDAKDFKTSCNLNVVPPHVEFLRPLTDLQVREKEMARFECELSRENAKVKWFKDGAEIKKGKKYDIISKGAVRILVINKCLLDDEAEYSCEVRTARTSGMLTVLEEEAVFTKNLANIEVSETDTIKLVCEVSKPGAEVIWYKGDEEIIETGRYEILTEGRKRILVIQNAHLEDAGNYNCRLPSSRTDGKVKVHELAAEFISKPQNLEILEGEKAEFVCSISKESFPVQWKRDDKTLESGDKYDVIADGKKRVLVVKDATLQDMGTYVVMVGAARAAAHLTVIEKLRIVVPLKDTRVKEQQEVVFNCEVNTEGAKAKWFRNEEAIFDSSKYIILQKDLVYTLRIRDAHLDDQANYNVSLTNHRGENVKSAANLIVEEEDLRIVEPLKDIETMEKKSVTFWCKVNRLNVTLKWTKNGEEVPFDNRVSYRVDKYKHMLTIKDCGFPDEGEYIVTAGQDKSVAELLIIEAPTEFVEHLEDQTVTEFDDAVFSCQLSREKANVKWYRNGREIKEGKKYKFEKDGSIHRLIIKDCRLDDECEYACGVEDRKSRARLFVEEIPVEIIRPPQDILEAPGADVVFLAELNKDKVEVQWLRNNMVVVQGDKHQMMSEGKIHRLQICDIKPRDQGEYRFIAKDKEARAKLELAAAPKIKTADQDLVVDVGKPLTMVVPYDAYPKAEAEWFKENEPLSTKTIDTTAEQTSFRILEAKKGDKGRYKIVLQNKHGKAEGFINLKVIDVPGPVRNLEVTETFDGEVSLAWEEPLTDGGSKIIGYVVERRDIKRKTWVLATDRAESCEFTVTGLQKGGVEYLFRVSARNRVGTGEPVETDNPVEARSKYDVPGPPLNVTITDVNRFGVSLTWEPPEYDGGAEITNYVIELRDKTSIRWDTAMTVRAEDLSATVTDVVEGQEYSFRVRAQNRIGVGKPSAATPFVKVADPIERPSPPVNLTSSDQTQSSVQLKWEPPLKDGGSPILGYIIERCEEGKDNWIRCNMKLVPELTYKVTGLEKGNKYLYRVSAENKAGVSDPSEILGPLTADDAFVEPTMDLSAFKDGLEVIVPNPITILVPSTGYPRPTATWCFGDKVLETGDRVKMKTLSAYAELVISPSERSDKGIYTLKLENRVKTISGEIDVNVIARPSAPKELKFGDITKDSVHLTWEPPDDDGGSPLTGYVVEKREVSRKTWTKVMDFVTDLEFTVPDLVQGKEYLFKVCARNKCGPGEPAYVDEPVNMSTPATVPDPPENVKWRDRTANSIFLTWDPPKNDGGSRIKGYIVERCPRGSDKWVACGEPVAETKMEVTGLEEGKWYAYRVKALNRQGASKPSRPTEEIQAVDTQEAPEIFLDVKLLAGLTVKAGTKIELPATVTGKPEPKITWTKADMILKQDKRITIENVPKKSTVTIVDSKRSDTGTYIIEAVNVCGRATAVVEVNVLDKPGPPAAFDITDVTNESCLLTWNPPRDDGGSKITNYVVERRATDSEVWHKLSSTVKDTNFKATKLIPNKEYIFRVAAENMYGVGEPVQASPITAKYQFDPPGPPTRLEPSDITKDAVTLTWCEPDDDGGSPITGYWVERLDPDTDKWVRCNKMPVKDTTYRVKGLTNKKKYRFRVLAENLAGPGKPSKSTEPILIKDPIDPPWPPGKPTVKDVGKTSVRLNWTKPEHDGGAKIESYVIEMLKTGTDEWVRVAEGVPTTQHLLPGLMEGQEYSFRVRAVNKAGESEPSEPSDPVLCREKLYPPSPPRWLEVINITKNTADLKWTVPEKDGGSPITNYIVEKRDVRRKGWQTVDTTVKDTKCTVTPLTEGSLYVFRVAAENAIGQSDYTEIEDSVLAKDTFTTPGPPYALAVVDVTKRHVDLKWEPPKNDGGRPIQRYVIEKKERLGTRWVKAGKTAGPDCNFRVTDVIEGTEVQFQVRAENEAGVGHPSEPTEILSIEDPTSPPSPPLDLHVTDAGRKHIAIAWKPPEKNGGSPIIGYHVEMCPVGTEKWMRVNSRPIKDLKFKVEEGVVPDKEYVLRVRAVNAIGVSEPSEISENVVAKDPDCKPTIDLETHDIIVIEGEKLSIPVPFRAVPVPTVSWHKDGKEVKASDRLTMKNDHISAHLEVPKSVRADAGIYTITLENKLGSATASINVKVIGLPGPCKDIKASDITKSSCKLTWEPPEFDGGTPILHYVLERREAGRRTYIPVMSGENKLSWTVKDLIPNGEYFFRVKAVNKVGGGEYIELKNPVIAQDPKQPPDPPVDVEVHNPTAEAMTITWKPPLYDGGSKIMGYIIEKIAKGEERWKRCNEHLVPILTYTAKGLEEGKEYQFRVRAENAAGISEPSRATPPTKAVDPIDAPKVILRTSLEVKRGDEIALDASISGSPYPTITWIKDENVIVPEEIKKRAAPLVRRRKGEVQEEEPFVLPLTQRLSIDNSKKGESQLRVRDSLRPDHGLYMIKVENDHGIAKAPCTVSVLDTPGPPINFVFEDIRKTSVLCKWEPPLDDGGSEIINYTLEKKDKTKPDSEWIVVTSTLRHCKYSVTKLIEGKEYLFRVRAENRFGPGPPCVSKPLVAKDPFGPPDAPDKPIVEDVTSNSMLVKWNEPKDNGSPILGYWLEKREVNSTHWSRVNKSLLNALKANVDGLLEGLTYVFRVCAENAAGPGKFSPPSDPKTAHDPISPPGPPIPRVTDTSSTTIELEWEPPAFNGGGEIVGYFVDKQLVGTNEWSRCTEKMIKVRQYTVKEIREGADYKLRVSAVNAAGEGPPGETQPVTVAEPQEPPAVELDVSVKGGIQIMAGKTLRIPAVVTGRPVPTKVWTKEEGELDKDRVVIDNVGTKSELIIKDALRKDHGRYVITATNSCGSKFAAARVEVFDVPGPVLDLKPVVTNRKMCLLNWSDPEDDGGSEITGFIIERKDAKMHTWRQPIETERSKCDITGLLEGQEYKFRVIAKNKFGCGPPVEIGPILAVDPLGPPTSPERLTYTERTKSTITLDWKEPRSNGGSPIQGYIIEKRRHDKPDFERVNKRLCPTTSFLVENLDEHQMYEFRVKAVNEIGESEPSLPLNVVIQDDEVPPTIKLRLSVRGDTIKVKAGEPVHIPADVTGLPMPKIEWSKNETVIEKPTDALQITKEEVSRSEAKTELSIPKAVREDKGTYTVTASNRLGSVFRNVHVEVYDRPSPPRNLAVTDIKAESCYLTWDAPLDNGGSEITHYVIDKRDASRKKAEWEEVTNTAVEKRYGIWKLIPNGQYEFRVRAVNKYGISDECKSDKVVIQDPYRLPGPPGKPKVLARTKGSMLVSWTPPLDNGGSPITGYWLEKREEGSPYWSRVSRAPITKVGLKGVEFNVPRLLEGVKYQFRAMAINAAGIGPPSEPSDPEVAGDPIFPPGPPSCPEVKDKTKSSISLGWKPPAKDGGSPIKGYIVEMQEEGTTDWKRVNEPDKLITTCECVVPNLKELRKYRFRVKAVNEAGESEPSDTTGEIPATDIQEEPEVFIDIGAQDCLVCKAGSQIRIPAVIKGRPTPKSSWEFDGKAKKAMKDGVHDIPEDAQLETAENSSVIIIPECKRSHTGKYSITAKNKAGQKTANCRVKVMDVPGPPKDLKVSDITRGSCRLSWKMPDDDGGDRIKGYVIEKRTIDGKAWTKVNPDCGSTTFVVPDLLSEQQYFFRVRAENRFGIGPPVETIQRTTARDPIYPPDPPIKLKIGLITKNTVHLSWKPPKNDGGSPVTHYIVECLAWDPTGTKKEAWRQCNKRDVEELQFTVEDLVEGGEYEFRVKAVNAAGVSKPSATVGPVTVKDQTCPPSIDLKEFMEVEEGTNVNIVAKIKGVPFPTLTWFKAPPKKPDNKEPVLYDTHVNKLVVDDTCTLVIPQSRRSDTGLYTITAVNNLGTASKEMRLNVLGRPGPPVGPIKFESVSADQMTLSWFPPKDDGGSKITNYVIEKREANRKTWVHVSSEPKECTYTIPKLLEGHEYVFRIMAQNKYGIGEPLDSEPETARNLFSVPGAPDKPTVSSVTRNSMTVNWEEPEYDGGSPVTGYWLEMKDTTSKRWKRVNRDPIKAMTLGVSYKVTGLIEGSDYQFRVYAINAAGVGPASLPSDPATARDPIAPPGPPFPKVTDWTKSSADLEWSPPLKDGGSKVTGYIVEYKEEGKEEWEKGKDKEVRGTKLVVTGLKEGAFYKFRVRAVNIAGIGEPGEVTDVIEMKDRLVSPDLQLDASVRDRIVVHAGGVIRIIAYVSGKPPPTVTWNMNERTLPQEATIETTAISSSMVIKNCQRSHQGVYSLLAKNEAGERKKTIIVDVLDVPGPVGTPFLAHNLTNESCKLTWFSPEDDGGSPITNYVIEKRESDRRAWTPVTYTVTRQNATVQGLIQGKAYFFRIAAENSIGMGPFVETSEALVIREPITVPERPEDLEVKEVTKNTVTLTWNPPKYDGGSEIINYVLESRLIGTEKFHKVTNDNLLSRKYTVKGLKEGDTYEYRVSAVNIVGQGKPSFCTKPITCKDELAPPTLHLDFRDKLTIRVGEAFALTGRYSGKPKPKVSWFKDEADVLEDDRTHIKTTPATLALEKIKAKRSDSGKYCVVVENSTGSRKGFCQVNVVDRPGPPVGPVSFDEVTKDYMVISWKPPLDDGGSKITNYIIEKKEVGKDVWMPVTSASAKTTCKVSKLLEGKDYIFRIHAENLYGISDPLVSDSMKAKDRFRVPDAPDQPIVTEVTKDSALVTWNKPHDGGKPITNYILEKRETMSKRWARVTKDPIHPYTKFRVPDLLEGCQYEFRVSAENEIGIGDPSPPSKPVFAKDPIAKPSPPVNPEAIDTTCNSVDLTWQPPRHDGGSKILGYIVEYQKVGDEEWRRANHTPESCPETKYKVTGLRDGQTYKFRVLAVNAAGESDPAHVPEPVLVKDRLEPPELILDANMAREQHIKVGDTLRLSAIIKGVPFPKVTWKKEDRDAPTKARIDVTPVGSKLEIRNAAHEDGGIYSLTVENPAGSKTVSVKVLVLDKPGPPRDLEVSEIRKDSCYLTWKEPLDDGGSVITNYVVERRDVASAQWSPLSATSKKKSHFAKHLNEGNQYLFRVAAENQYGRGPFVETPKPIKALDPLHPPGPPKDLHHVDVDKTEVSLVWNKPDRDGGSPITGYLVEYQEEGTQDWIKFKTVTNLECVVTGLQQGKTYRFRVKAENIVGLGLPDTTIPIECQEKLVPPSVELDVKLIEGLVVKAGTTVRFPAIIRGVPVPTAKWTTDGSEIKTDEHYTVETDNFSSVLTIKNCLRRDTGEYQITVSNAAGSKTVAVHLTVLDVPGPPTGPINILDVTPEHMTISWQPPKDDGGSPVINYIVEKQDTRKDTWGVVSSGSSKTKLKIPHLQKGCEYVFRVRAENKIGVGPPLDSTPTVAKHKFSPPSPPGKPVVTDITENAATVSWTLPKSDGGSPITGYYMERREVTGKWVRVNKTPIADLKFRVTGLYEGNTYEFRVFAENLAGLSKPSPSSDPIKACRPIKPPGPPINPKLKDKSRETADLVWTKPLSDGGSPILGYVVECQKPGTAQWNRINKDELIRQCAFRVPGLIEGNEYRFRIKAANIVGEGEPRELAESVIAKDILHPPEVELDVTCRDVITVRVGQTIRILARVKGRPEPDITWTKEGKVLVREKRVDLIQDLPRVELQIKEAVRADHGKYIISAKNSSGHAQGSAIVNVLDRPGPCQNLKVTNVTKENCTISWENPLDNGGSEITNFIVEYRKPNQKGWSIVASDVTKRLIKANLLANNEYYFRVCAENKVGVGPTIETKTPILAINPIDRPGEPENLHIADKGKTFVYLKWRRPDYDGGSPNLSYHVERRLKGSDDWERVHKGSIKETHYMVDRCVENQIYEFRVQTKNEGGESDWVKTEEVVVKEDLQKPVLDLKLSGVLTVKAGDTIRLEAGVRGKPFPEVAWTKDKDATDLTRSPRVKIDTRADSSKFSLTKAKRSDGGKYVVTATNTAGSFVAYATVNVLDKPGPVRNLKIVDVSSDRCTVCWDPPEDDGGCEIQNYILEKCETKRMVWSTYSATVLTPGTTVTRLIEGNEYIFRVRAENKIGTGPPTESKPVIAKTKYDKPGRPDPPEVTKVSKEEMTVVWNPPEYDGGKSITGYFLEKKEKHSTRWVPVNKSAIPERRMKVQNLLPDHEYQFRVKAENEIGIGEPSLPSRPVVAKDPIEPPGPPTNFRVVDTTKHSITLGWGKPVYDGGAPIIGYVVEMRPKIADASPDEGWKRCNAAAQLVRKEFTVTSLDENQEYEFRVCAQNQVGIGRPAELKEAIKPKEILEPPEIDLDASMRKLVIVRAGCPIRLFAIVRGRPAPKVTWRKVGIDNVVRKGQVDLVDTMAFLVIPNSTRDDSGKYSLTLVNPAGEKAVFVNVRVLDTPGPVSDLKVSDVTKTSCHVSWAPPENDGGSQVTHYIVEKREADRKTWSTVTPEVKKTSFHVTNLVPGNEYYFRVTAVNEYGPGVPTDVPKPVLASDPLSEPDPPRKLEVTEMTKNSATLAWLPPLRDGGAKIDGYITSYREEEQPADRWTEYSVVKDLSLVVTGLKEGKKYKFRVAARNAVGVSLPREAEGVYEAKEQLLPPKILMPEQITIKAGKKLRIEAHVYGKPHPTCKWKKGEDEVVTSSHLAVHKADSSSILIIKDVTRKDSGYYSLTAENSSGTDTQKIKVVVMDAPGPPQPPFDISDIDADACSLSWHIPLEDGGSNITNYIVEKCDVSRGDWVTALASVTKTSCRVGKLIPGQEYIFRVRAENRFGISEPLTSPKMVAQFPFGVPSEPKNARVTKVNKDCIFVAWDRPDSDGGSPIIGYLIERKERNSLLWVKANDTLVRSTEYPCAGLVEGLEYSFRIYALNKAGSSPPSKPTEYVTARMPVDPPGKPEVIDVTKSTVSLIWARPKHDGGSKIIGYFVEACKLPGDKWVRCNTAPHQIPQEEYTATGLEEKAQYQFRAIARTAVNISPPSEPSDPVTILAENVPPRIDLSVAMKSLLTVKAGTNVCLDATVFGKPMPTVSWKKDGTLLKPAEGIKMAMQRNLCTLELFSVNRKDSGDYTITAENSSGSKSATIKLKVLDKPGPPASVKINKMYSDRAMLSWEPPLEDGGSEITNYIVDKRETSRPNWAQVSATVPITSCSVEKLIEGHEYQFRICAENKYGVGDPVFTEPAIAKNPYDPPGRCDPPVISNITKDHMTVSWKPPADDGGSPITGYLLEKRETQAVNWTKVNRKPIIERTLKATGLQEGTEYEFRVTAINKAGPGKPSDASKAAYARDPQYPPGPPAFPKVYDTTRSSVSLSWGKPAYDGGSPIIGYLVEVKRADSDNWVRCNLPQNLQKTRFEVTGLMEDTQYQFRVYAVNKIGYSDPSDVPDKHYPKDILIPPEGELDADLRKTLILRAGVTMRLYVPVKGRPPPKITWSKPNVNLRDRIGLDIKSTDFDTFLRCENVNKYDAGKYILTLENSCGKKEYTIVVKVLDTPGPPVNVTVKEISKDSAYVTWEPPIIDGGSPIINYVVQKRDAERKSWSTVTTECSKTSFRVANLEEGKSYFFRVFAENEYGIGDPGETRDAVKASQTPGPVVDLKVRSVSKSSCSIGWKKPHSDGGSRIIGYVVDFLTEENKWQRVMKSLSLQYSAKDLTEGKEYTFRVSAENENGEGTPSEITVVARDDVVAPDLDLKGLPDLCYLAKENSNFRLKIPIKGKPAPSVSWKKGEDPLATDTRVSVESSAVNTTLIVYDCQKSDAGKYTITLKNVAGTKEGTISIKVVGKPGIPTGPIKFDEVTAEAMTLKWAPPKDDGGSEITNYILEKRDSVNNKWVTCASAVQKTTFRVTRLHEGMEYTFRVSAENKYGVGEGLKSEPIVARHPFDVPDAPPPPNIVDVRHDSVSLTWTDPKKTGGSPITGYHLEFKERNSLLWKRANKTPIRMRDFKVTGLTEGLEYEFRVMAINLAGVGKPSLPSEPVVALDPIDPPGKPEVINITRNSVTLIWTEPKYDGGHKLTGYIVEKRDLPSKSWMKANHVNVPECAFTVTDLVEGGKYEFRIRAKNTAGAISAPSESTETIICKDEYEAPTIVLDPTIKDGLTIKAGDTIVLNAISILGKPLPKSSWSKAGKDIRPSDITQITSTPTSSMLTIKYATRKDAGEYTITATNPFGTKVEHVKVTVLDVPGPPGPVEISNVSAEKATLTWTPPLEDGGSPIKSYILEKRETSRLLWTVVSEDIQSCRHVATKLIQGNEYIFRVSAVNHYGKGEPVQSEPVKMVDRFGPPGPPEKPEVSNVTKNTATVSWKRPVDDGGSEITGYHVERREKKSLRWVRAIKTPVSDLRCKVTGLQEGSTYEFRVSAENRAGIGPPSEASDSVLMKDAAYPPGPPSNPHVTDTTKKSASLAWGKPHYDGGLEITGYVVEHQKVGDEAWIKDTTGTALRITQFVVPDLQTKEKYNFRISAINDAGVGEPAVIPDVEIVEREMAPDFELDAELRRTLVVRAGLSIRIFVPIKGRPAPEVTWTKDNINLKNRANIENTESFTLLIIPECNRYDTGKFVMTIENPAGKKSGFVNVRVLDTPGPVLNLRPTDITKDSVTLHWDLPLIDGGSRITNYIVEKREATRKSYSTATTKCHKCTYKVTGLSEGCEYFFRVMAENEYGIGEPTETTEPVKASEAPSPPDSLNIMDITKSTVSLAWPKPKHDGGSKITGYVIEAQRKGSDQWTHITTVKGLECVVRNLTEGEEYTFQVMAVNSAGRSAPRESRPVIVKEQTMLPELDLRGIYQKLVIAKAGDNIKVEIPVLGRPKPTVTWKKGDQILKQTQRVNFETTATSTILNINECVRSDSGPYPLTARNIVGEVGDVITIQVHDIPGPPTGPIKFDEVSSDFVTFSWDPPENDGGVPISNYVVEMRQTDSTTWVELATTVIRTTYKATRLTTGLEYQFRVKAQNRYGVGPGITSACIVANYPFKVPGPPGTPQVTAVTKDSMTISWHEPLSDGGSPILGYHVERKERNGILWQTVSKALVPGNIFKSSGLTDGIAYEFRVIAENMAGKSKPSKPSEPMLALDPIDPPGKPVPLNITRHTVTLKWAKPEYTGGFKITSYIVEKRDLPNGRWLKANFSNILENEFTVSGLTEDAAYEFRVIAKNAAGAISPPSEPSDAITCRDDVEAPKIKVDVKFKDTVILKAGEAFRLEADVSGRPPPTMEWSKDGKELEGTAKLEIKIADFSTNLVNKDSTRRDSGAYTLTATNPGGFAKHIFNVKVLDRPGPPEGPLAVTEVTSEKCVLSWFPPLDDGGAKIDHYIVQKRETSRLAWTNVASEVQVTKLKVTKLLKGNEYIFRVMAVNKYGVGEPLESEPVLAVNPYGPPDPPKNPEVTTITKDSMVVCWGHPDSDGGSEIINYIVERRDKAGQRWIKCNKKTLTDLRYKVSGLTEGHEYEFRIMAENAAGISAPSPTSPFYKACDTVFKPGPPGNPRVLDTSRSSISIAWNKPIYDGGSEITGYMVEIALPEEDEWQIVTPPAGLKATSYTITGLTENQEYKIRIYAMNSEGLGEPALVPGTPKAEDRMLPPEIELDADLRKVVTIRACCTLRLFVPIKGRPAPEVKWARDHGESLDKASIESTSSYTLLIVGNVNRFDSGKYILTVENSSGSKSAFVNVRVLDTPGPPQDLKVKEVTKTSVTLTWDPPLLDGGSKIKNYIVEKRESTRKAYSTVATNCHKTSWKVDQLQEGCSYYFRVLAENEYGIGLPAETAESVKASERPLPPGKITLMDVTRNSVSLSWEKPEHDGGSRILGYIVEMQTKGSDKWATCATVKVTEATITGLIQGEEYSFRVSAQNEKGISDPRQLSVPVIAKDLVIPPAFKLLFNTFTVLAGEDLKVDVPFIGRPTPAVTWHKDNVPLKQTTRVNAESTENNSLLTIKDACREDVGHYVVKLTNSAGEAIETLNVIVLDKPGPPTGPVKMDEVTADSITLSWGPPKYDGGSSINNYIVEKRDTSTTTWQIVSATVARTTIKACRLKTGCEYQFRIAAENRYGKSTYLNSEPTVAQYPFKVPGPPGTPVVTLSSRDSMEVQWNEPISDGGSRVIGYHLERKERNSILWVKLNKTPIPQTKFKTTGLEEGVEYEFRVSAENIVGIGKPSKVSECYVARDPCDPPGRPEAIIVTRNSVTLQWKKPTYDGGSKITGYIVEKKELPEGRWMKASFTNIIDTHFEVTGLVEDHRYEFRVIARNAAGVFSEPSESTGAITARDEVDPPRISMDPKYKDTIVVHAGESFKVDADIYGKPIPTIQWIKGDQELSNTARLEIKSTDFATSLSVKDAVRVDSGNYILKAKNVAGERSVTVNVKVLDRPGPPEGPVVISGVTAEKCTLAWKPPLQDGGSDIINYIVERRETSRLVWTVVDANVQTLSCKVTKLLEGNEYTFRIMAVNKYGVGEPLESEPVVAKNPFVVPDAPKAPEVTTVTKDSMIVVWERPASDGGSEILGYVLEKRDKEGIRWTRCHKRLIGELRLRVTGLIENHDYEFRVSAENAAGLSEPSPPSAYQKACDPIYKPGPPNNPKVIDITRSSVFLSWSKPIYDGGCEIQGYIVEKCDVSVGEWTMCTPPTGINKTNIEVEKLLEKHEYNFRICAINKAGVGEHADVPGPIIVEEKLEAPDIDLDLELRKIINIRAGGSLRLFVPIKGRPTPEVKWGKVDGEIRDAAIIDVTSSFTSLVLDNVNRYDSGKYTLTLENSSGTKSAFVTVRVLDTPSPPVNLKVTEITKDSVSITWEPPLLDGGSKIKNYIVEKREATRKSYAAVVTNCHKNSWKIDQLQEGCSYYFRVTAENEYGIGLPAQTADPIKVAEVPQPPGKITVDDVTRNSVSLSWTKPEHDGGSKIIQYIVEMQAKHSEKWSECARVKSLQAVITNLTQGEEYLFRVVAVNEKGRSDPRSLAVPIVAKDLVIEPDVKPAFSSYSVQVGQDLKIEVPISGRPKPTITWTKDGLPLKQTTRINVTDSLDLTTLSIKETHKDDGGQYGITVANVVGQKTASIEIVTLDKPDPPKGPVKFDDVSAESITLSWNPPLYTGGCQITNYIVQKRDTTTTVWDVVSATVARTTLKVTKLKTGTEYQFRIFAENRYGQSFALESDPIVAQYPYKEPGPPGTPFATAISKDSMVIQWHEPVNNGGSPVIGYHLERKERNSILWTKVNKTIIHDTQFKAQNLEEGIEYEFRVYAENIVGVGKASKNSECYVARDPCDPPGTPEPIMVKRNEITLQWTKPVYDGGSMITGYIVEKRDLPDGRWMKASFTNVIETQFTVSGLTEDQRYEFRVIAKNAAGAISKPSDSTGPITAKDEVELPRISMDPKFRDTIVVNAGETFRLEADVHGKPLPTIEWLRGDKEIEESARCEIKNTDFKALLIVKDAIRIDGGQYILRASNVAGSKSFPVNVKVLDRPGPPEGPVQVTGVTSEKCSLTWSPPLQDGGSDISHYVVEKRETSRLAWTVVASEVVTNSLKVTKLLEGNEYVFRIMAVNKYGVGEPLESAPVLMKNPFVLPGPPKSLEVTNIAKDSMTVCWNRPDSDGGSEIIGYIVEKRDRSGIRWIKCNKRRITDLRLRVTGLTEDHEYEFRVSAENAAGVGEPSPATVYYKACDPVFKPGPPTNAHIVDTTKNSITLAWGKPIYDGGSEILGYVVEICKADEEEWQIVTPQTGLRVTRFEISKLTEHQEYKIRVCALNKVGLGEATSVPGTVKPEDKLEAPELDLDSELRKGIVVRAGGSARIHIPFKGRPTPEITWSREEGEFTDKVQIEKGVNYTQLSIDNCDRNDAGKYILKLENSSGSKSAFVTVKVLDTPGPPQNLAVKEVRKDSAFLVWEPPIIDGGAKVKNYVIDKRESTRKAYANVSSKCSKTSFKVENLTEGAIYYFRVMAENEFGVGVPVETVDAVKAAEPPSPPGKVTLTDVSQTSASLMWEKPEHDGGSRVLGYVVEMQPKGTEKWSIVAESKVCNAVVTGLSSGQEYQFRVKAYNEKGKSDPRVLGVPVIAKDLTIQPSLKLPFNTYSIQAGEDLKIEIPVIGRPRPNISWVKDGEPLKQTTRVNVEETATSTVLHIKEGNKDDFGKYTVTATNSAGTATENLSVIVLEKPGPPVGPVRFDEVSADFVVISWEPPAYTGGCQISNYIVEKRDTTTTTWHMVSATVARTTIKITKLKTGTEYQFRIFAENRYGKSAPLDSKAVIVQYPFKEPGPPGTPFVTSISKDQMLVQWHEPVNDGGTKIIGYHLEQKEKNSILWVKLNKTPIQDTKFKTTGLDEGLEYEFKVSAENIVGIGKPSKVSECFVARDPCDPPGRPEAIVITRNNVTLKWKKPAYDGGSKITGYIVEKKDLPDGRWMKASFTNVLETEFTVSGLVEDQRYEFRVIARNAAGNFSEPSDSSGAITARDEIDAPNASLDPKYKDVIVVHAGETFVLEADIRGKPIPDVVWSKDGKELEETAARMEIKSTIQKTTLVVKDCIRTDGGQYILKLSNVGGTKSIPITVKVLDRPGPPEGPLKVTGVTAEKCYLAWNPPLQDGGANISHYIIEKRETSRLSWTQVSTEVQALNYKVTKLLPGNEYIFRVMAVNKYGIGEPLESGPVTACNPYKPPGPPSTPEVSAITKDSMVVTWARPVDDGGTEIEGYILEKRDKEGVRWTKCNKKTLTDLRLRVTGLTEGHSYEFRVAAENAAGVGEPSEPSVFYRACDALYPPGPPSNPKVTDTSRSSVSLAWSKPIYDGGAPVKGYVVEVKEAAADEWTTCTPPTGLQGKQFTVTKLKENTEYNFRICAINSEGVGEPATLPGSVVAQERIEPPEIELDADLRKVVVLRASATLRLFVTIKGRPEPEVKWEKAEGILTDRAQIEVTSSFTMLVIDNVTRFDSGRYNLTLENNSGSKTAFVNVRVLDSPSAPVNLTIREVKKDSVTLSWEPPLIDGGAKITNYIVEKRETTRKAYATITNNCTKTTFRIENLQEGCSYYFRVLASNEYGIGLPAETTEPVKVSEPPLPPGRVTLVDVTRNTATIKWEKPESDGGSKITGYVVEMQTKGSEKWSTCTQVKTLEATISGLTAGEEYVFRVAAVNEKGRSDPRQLGVPVIARDIEIKPSVELPFHTFNVKAREQLKIDVPFKGRPQATVNWRKDGQTLKETTRVNVSSSKTVTSLSIKEASKEDVGTYELCVSNSAGSITVPITIIVLDRPGPPGPIRIDEVSCDSITISWNPPEYDGGCQISNYIVEKKETTSTTWHIVSQAVARTSIKIVRLTTGSEYQFRVCAENRYGKSSYSESSAVVAEYPFSPPGPPGTPKVVHATKSTMLVTWQVPVNDGGSRVIGYHLEYKERSSILWSKANKILIADTQMKVSGLDEGLMYEYRVYAENIAGIGKCSKSCEPVPARDPCDPPGQPEVTNITRKSVSLKWSKPHYDGGAKITGYIVERRELPDGRWLKCNYTNIQETYFEVTELTEDQRYEFRVFARNAADSVSEPSESTGPIIVKDDVEPPRVMMDVKFRDVIVVKAGEVLKINADIAGRPLPVISWAKDGIEIEERARTEIISTDNHTLLTVKDCIRRDTGQYVLTLKNVAGTRSVAVNCKVLDKPGPPAGPLEINGLTAEKCSLSWGRPQEDGGADIDYYIVEKRETSHLAWTICEGELQMTSCKVTKLLKGNEYIFRVTGVNKYGVGEPLESVAIKALDPFTVPSPPTSLEITSVTKESMTLCWSRPESDGGSEISGYIIERREKNSLRWVRVNKKPVYDLRVKSTGLREGCEYEYRVYAENAAGLSLPSETSPLIRAEDPVFLPSPPSKPKIVDSGKTTITIAWVKPLFDGGAPITGYTVEYKKSDDTDWKTSIQSLRGTEYTISGLTTGAEYVFRVKSVNKVGASDPSDSSDPQIAKEREEEPLFDIDSEMRKTLIVKAGASFTMTVPFRGRPVPNVLWSKPDTDLRTRAYVDTTDSRTSLTIENANRNDSGKYTLTIQNVLSAASLTLVVKVLDTPGPPTNITVQDVTKESAVLSWDVPENDGGAPVKNYHIEKREASKKAWVSVTNNCNRLSYKVTNLQEGAIYYFRVSGENEFGVGIPAETKEGVKITEKPSPPEKLGVTSISKDSVSLTWLKPEHDGGSRIVHYVVEALEKGQKNWVKCAVAKSTHHVVSGLRENSEYFFRVFAENQAGLSDPRELLLPVLIKEQLEPPEIDMKNFPSHTVYVRAGSNLKVDIPISGKPLPKVTLSRDGVPLKATMRFNTEITAENLTINLKESVTADAGRYEITAANSSGTTKAFINIVVLDRPGPPTGPVVISDITEESVTLKWEPPKYDGGSQVTNYILLKRETSTAVWTEVSATVARTMMKVMKLTTGEEYQFRIKAENRFGISDHIDSACVTVKLPYTTPGPPSTPWVTNVTRESITVGWHEPVSNGGSAVVGYHLEMKDRNSILWQKANKLVIRTTHFKVTTISAGLIYEFRVYAENAAGVGKPSHPSEPVLAIDACEPPRNVRITDISKNSVSLSWQQPAFDGGSKITGYIVERRDLPDGRWTKASFTNVTETQFIISGLTQNSQYEFRVFARNAVGSISNPSEVVGPITCIDSYGGPVIDLPLEYTEVVKYRAGTSVKLRAGISGKPAPTIEWYKDDKELQTNALVCVENTTDLASILIKDADRLNSGCYELKLRNAMGSASATIRVQILDKPGPPGGPIEFKTVTAEKITLLWRPPADDGGAKITHYIVEKRETSRVVWSMVSEHLEECIITTTKIIKGNEYIFRVRAVNKYGIGEPLESDSVVAKNAFVTPGPPGIPEVTKITKNSMTVVWSRPIADGGSDISGYFLEKRDKKSLGWFKVLKETIRDTRQKVTGLTENSDYQYRVCAVNAAGQGPFSEPSEFYKAADPIDPPGPPAKIRIADSTKSSITLGWSKPVYDGGSAVTGYVVEIRQGEEEEWTTVSTKGEVRTTEYVVSNLKPGVNYYFRVSAVNCAGQGEPIEMNEPVQAKDILEAPEIDLDVALRTSVIAKAGEDVQVLIPFKGRPPPTVTWRKDEKNLGSDARYSIENTDSSSLLTIPQVTRNDTGKYILTIENGVGEPKSSTVSVKVLDTPAACQKLQVKHVSRGTVTLLWDPPLIDGGSPIINYVIEKRDATKRTWSVVSHKCSSTSFKLIDLSEKTPFFFRVLAENEIGIGEPCETTEPVKAAEVPAPIRDLSMKDSTKTSVILSWTKPDFDGGSVITEYVVERKGKGEQTWSHAGISKTCEIEVSQLKEQSVLEFRVFAKNEKGLSDPVTIGPITVKELIITPEVDLSDIPGAQVTVRIGHNVHLELPYKGKPKPSISWLKDGLPLKESEFVRFSKTENKITLSIKNAKKEHGGKYTVILDNAVCRIAVPITVITLGPPSKPKGPIRFDEIKADSVILSWDVPEDNGGGEITCYSIEKRETSQTNWKMVCSSVARTTFKVPNLVKDAEYQFRVRAENRYGVSQPLVSSIIVAKHQFRIPGPPGKPVIYNVTSDGMSLTWDAPVYDGGSEVTGFHVEKKERNSILWQKVNTSPISGREYRATGLVEGLDYQFRVYAENSAGLSSPSDPSKFTLAVSPVDPPGTPDYIDVTRETITLKWNPPLRDGGSKIVGYSIEKRQGNERWVRCNFTDVSECQYTVTGLSPGDRYEFRIIARNAVGTISPPSQSSGIIMTRDENVPPIVEFGPEYFDGLIIKSGESLRIKALVQGRPVPRVTWFKDGVEIEKRMNMEITDVLGSTSLFVRDATRDHRGVYTVEAKNASGSAKAEIKVKVQDTPGKVVGPIRFTNITGEKMTLWWDAPLNDGCAPITHYIIEKRETSRLAWALIEDKCEAQSYTAIKLINGNEYQFRVSAVNKFGVGRPLDSDPVVAQIQYTVPDAPGIPEPSNITGNSITLTWARPESDGGSEIQQYILERREKKSTRWVKVISKRPISETRFKVTGLTEGNEYEFHVMAENAAGVGPASGISRLIKCREPVNPPGPPTVVKVTDTSKTTVSLEWSKPVFDGGMEIIGYIIEMCKADLGDWHKVNAEACVKTRYTVTDLQAGEEYKFRVSAINGAGKGDSCEVTGTIKAVDRLTAPELDIDANFKQTHVVRAGASIRLFIAYQGRPTPTAVWSKPDSNLSLRADIHTTDSFSTLTVENCNRNDAGKYTLTVENNSGSKSITFTVKVLDTPGPPGPITFKDVTRGSATLMWDAPLLDGGARIHHYVVEKREASRRSWQVISEKCTRQIFKVNDLAEGVPYYFRVSAVNEYGVGEPYEMPEPIVATEQPAPPRRLDVVDTSKSSAVLAWLKPDHDGGSRITGYLLEMRQKGSDFWVEAGHTKQLTFTVERLVEKTEYEFRVKAKNDAGYSEPREAFSSVIIKEPQIEPTADLTGITNQLITCKAGSPFTIDVPISGRPAPKVTWKLEEMRLKETDRVSITTTKDRTTLTVKDSMRGDSGRYFLTLENTAGVKTFSVTVVVIGRPGPVTGPIEVSSVSAESCVLSWGEPKDGGGTEITNYIVEKRESGTTAWQLVNSSVKRTQIKVTHLTKYMEYSFRVSSENRFGVSKPLESAPIIAEHPFVPPSAPTRPEVYHVSANAMSIRWEEPYHDGGSKIIGYWVEKKERNTILWVKENKVPCLECNYKVTGLVEGLEYQFRTYALNAAGVSKASEASRPIMAQNPVDAPGRPEVTDVTRSTVSLIWSAPAYDGGSKVVGYIIERKPVSEVGDGRWLKCNYTIVSDNFFTVTALSEGDTYEFRVLAKNAAGVISKGSESTGPVTCRDEYAPPKAELDARLHGDLVTIRAGSDLVLDAAVGGKPEPKIIWTKGDKELDLCEKVSLQYTGKRATAVIKFCDRSDSGKYTLTVKNASGTKAVSVMVKVLDSPGPCGKLTVSRVTQEKCTLAWSLPQEDGGAEITHYIVERRETSRLNWVIVEGECPTLSYVVTRLIKNNEYIFRVRAVNKYGPGVPVESEPIVARNSFTIPSPPGIPEEVGTGKEHIIIQWTKPESDGGNEISNYLVDKREKKSLRWTRVNKDYVVYDTRLKVTSLMEGCDYQFRVTAVNAAGNSEPSEASNFISCREPSYTPGPPSAPRVVDTTKHSISLAWTKPMYDGGTDIVGYVLEMQEKDTDQWYRVHTNATIRNTEFTVPDLKMGQKYSFRVAAVNVKGMSEYSESIAEIEPVERIEIPDLELADDLKKTVTIRAGASLRLMVSVSGRPPPVITWSKQGIDLASRAIIDTTESYSLLIVDKVNRYDAGKYTIEAENQSGKKSATVLVKVYDTPGPCPSVKVKEVSRDSVTITWEIPTIDGGAPVNNYIVEKREAAMRAFKTVTTKCSKTLYRISGLVEGTMYYFRVLPENIYGIGEPCETSDAVLVSEVPLVPAKLEVVDVTKSTVTLAWEKPLYDGGSRLTGYVLEACKAGTERWMKVVTLKPTVLEHTVTSLNEGEQYLFRIRAQNEKGVSEPRETVTAVTVQDLRVLPTIDLSTMPQKTIHVPAGRPVELVIPIAGRPPPAASWFFAGSKLRESERVTVETHTKVAKLTIRETTIRDTGEYTLELKNVTGTTSETIKVIILDKPGPPTGPIKIDEIDATSITISWEPPELDGGAPLSGYVVEQRDAHRPGWLPVSESVTRSTFKFTRLTEGNEYVFRVAATNRFGIGSYLQSEVIECRSSIRIPGPPETLQIFDVSRDGMTLTWYPPEDDGGSQVTGYIVERKEVRADRWVRVNKVPVTMTRYRSTGLTEGLEYEHRVTAINARGSGKPSRPSKPIVAMDPIAPPGKPQNPRVTDTTRTSVSLAWSVPEDEGGSKVTGYLIEMQKVDQHEWTKCNTTPTKIREYTLTHLPQGAEYRFRVLACNAGGPGEPAEVPGTVKVTEMLEYPDYELDERYQEGIFVRQGGVIRLTIPIKGKPFPICKWTKEGQDISKRAMIATSETHTELVIKEADRGDSGTYDLVLENKCGKKAVYIKVRVIGSPNSPEGPLEYDDIQVRSVRVSWRPPADDGGADILGYILERREVPKAAWYTIDSRVRGTSLVVKGLKENVEYHFRVSAENQFGISKPLKSEEPVTPKTPLNPPEPPSNPPEVLDVTKSSVSLSWSRPKDDGGSRVTGYYIERKETSTDKWVRHNKTQITTTMYTVTGLVPDAEYQFRIIAQNDVGLSETSPASEPVVCKDPFDKPSQPGELEILSISKDSVTLQWEKPECDGGKEILGYWVEYRQSGDSAWKKSNKERIKDKQFTIGGLLEATEYEFRVFAENETGLSRPRRTAMSIKTKLTSGEAPGIRKEMKDVTTKLGEAAQLSCQIVGRPLPDIKWYRFGKELIQSRKYKMSSDGRTHTLTVMTEEQEDEGVYTCIATNEVGEVETSSKLLLQATPQFHPGYPLKEKYYGAVGSTLRLHVMYIGRPVPAMTWFHGQKLLQNSENITIENTEHYTHLVMKNVQRKTHAGKYKVQLSNVFGTVDAILDVEIQDKPDKPTGPIVIEALLKNSAVISWKPPADDGGSWITNYVVEKCEAKEGAEWQLVSSAISVTTCRIVNLTENAGYYFRVSAQNTFGISDPLEVSSVVIIKSPFEKPGAPGKPTITAVTKDSCVVAWKPPASDGGAKIRNYYLEKREKKQNKWISVTTEEIRETVFSVKNLIEGLEYEFRVKCENLGGESEWSEISEPITPKSDVPIQAPHFKEELRNLNVRYQSNATLVCKVTGHPKPIVKWYRQGKEIIADGLKYRIQEFKGGYHQLIIASVTDDDATVYQVRATNQGGSVSGTASLEVEVPAKIHLPKTLEGMGAVHALRGEVVSIKIPFSGKPDPVITWQKGQDLIDNNGHYQVIVTRSFTSLVFPNGVERKDAGFYVVCAKNRFGIDQKTVELDVADVPDPPRGVKVSDVSRDSVNLTWTEPASDGGSKITNYIVEKCATTAERWLRVGQARETRYTVINLFGKTSYQFRVIAENKFGLSKPSEPSEPTITKEDKTRAMNYDEEVDETREVSMTKASHSSTKELYEKYMIAEDLGRGEFGIVHRCVETSSKKTYMAKFVKVKGTDQVLVKKEISILNIARHRNILHLHESFESMEELVMIFEFISGLDIFERINTSAFELNEREIVSYVHQVCEALQFLHSHNIGHFDIRPENIIYQTRRSSTIKIIEFGQARQLKPGDNFRLLFTAPEYYAPEVHQHDVVSTATDMWSLGTLVYVLLSGINPFLAETNQQIIENIMNAEYTFDEEAFKEISIEAMDFVDRLLVKERKSRMTASEALQHPWLKQKIERVSTKVIRTLKHRRYYHTLIKKDLNMVVSAARISCGGAIRSQKGVSVAKVKVASIEIGPVSGQIMHAVGEEGGHVKYVCKIENYDQSTQVTWYFGVRQLENSEKYEITYEDGVAILYVKDITKLDDGTYRCKVVNDYGEDSSYAELFVKGVREVYDYYCRRTMKKIKRRTDTMRLLERPPEFTLPLYNKTAYVGENVRFGVTITVHPEPHVTWYKSGQKIKPGDNDKKYTFESDKGLYQLTINSVTTDDDAEYTVVARNKYGEDSCKAKLTVTLHPPPTDSTLRPMFKRLLANAECQEGQSVCFEIRVSGIPPPTLKWEKDGQPLSLGPNIEIIHEGLDYYALHIRDTLPEDTGYYRVTATNTAGSTSCQAHLQVERLRYKKQEFKSKEEHERHVQKQIDKTLRMAEILSGTESVPLTQVAKEALREAAVLYKPAVSTKTVKGEFRLEIEEKKEERKLRMPYDVPEPRKYKQTTIEEDQRIKQFVPMSDMKWYKKIRDQYEMPGKLDRVVQKRPKRIRLSRWEQFYVMPLPRITDQYRPKWRIPKLSQDDLEIVRPARRRTPSPDYDFYYRPRRRSLGDISDEELLLPIDDYLAMKRTEEERLRLEEELELGFSASPPSRSPPHFELSSLRYSSPQAHVKVEETRKDFRYSTYHIPTKAEASTSYAELRERHAQAAYRQPKQRQRIMAEREDEELLRPVTTTQHLSEYKSELDFMSKEEKSRKKSRRQREVTEITEIEEEYEISKHAQRESSSSASRLLRRRRSLSPTYIELMRPVSELIRSRPQPAEEYEDDTERRSPTPERTRPRSPSPVSSERSLSRFERSARFDIFSRYESMKAALKTQKTSERKYEVLSQQPFTLDHAPRITLRMRSHRVPCGQNTRFILNVQSKPTAEVKWYHNGVELQESSKIHYTNTSGVLTLEILDCHTDDSGTYRAVCTNYKGEASDYATLDVTGGDYTTYASQRRDEEVPRSVFPELTRTEAYAVSSFKKTSEMEASSSVREVKSQMTETRESLSSYEHSASAEMKSAALEEKSLEEKSTTRKIKTTLAARILTKPRSMTVYEGESARFSCDTDGEPVPTVTWLRKGQVLSTSARHQVTTTKYKSTFEISSVQASDEGNYSVVVENSEGKQEAEFTLTIQKARVTEKAVTSPPRVKSPEPRVKSPEAVKSPKRVKSPEPSHPKAVSPTETKPTPTEKVQHLPVSAPPKITQFLKAEASKEIAKLTCVVESSVLRAKEVTWYKDGKKLKENGHFQFHYSADGTYELKINNLTESDQGEYVCEISGEGGTSKTNLQFMGQAFKSIHEKVSKISETKKSDQKTTESTVTRKTEPKAPEPISSKPVIVTGLQDTTVSSDSVAKFAVKATGEPRPTAIWTKDGKAITQGGKYKLSEDKGGFFLEIHKTDTSDSGLYTCTVKNSAGSVSSSCKLTIKAIKDTEAQKVSTQKTSEITPQKKAVVQEEISQKALRSEEIKMSEAKSQEKLALKEEASKVLISEEVKKSAATSLEKSIVHEEITKTSQASEEVRTHAEIKAFSTQMSINEGQRLVLKANIAGATDVKWVLNGVELTNSEEYRYGVSGSDQTLTIKQASHRDEGILTCISKTKEGIVKCQYDLTLSKELSDAPAFISQPRSQNINEGQNVLFTCEISGEPSPEIEWFKNNLPISISSNVSISRSRNVYSLEIRNASVSDSGKYTIKAKNFRGQCSATASLMVLPLVEEPSREVVLRTSGDTSLQGSFSSQSVQMSASKQEASFSSFSSSSASSMTEMKFASMSAQSMSSMQESFVEMSSSSFMGISNMTQLESSTSKMLKAGIRGIPPKIEALPSDISIDEGKVLTVACAFTGEPTPEVTWSCGGRKIHSQEQGRFHIENTDDLTTLIIMDVQKQDGGLYTLSLGNEFGSDSATVNIHIRSI

SEQ ID NO: 7374 - protein, 34475 aa, Homo sapiens
MTTQAPTFTQPLQSVVVLEGSTATFEAHISGFPVPEVSWFRDGQVISTSTLPGVQISFSDGRAKLTIPAVTKANSGRYSLKATNGSGQATSTAELLVKAETAPPNFVQRLQSMTVRQGSQVRLQVRVTGIPTPVVKFYRDGAEIQSSLDFQISQEGDLYSLLIAEAYPEDSGTYSVNATNSVGRATSTAELLVQGEEEVPAKKTKTIVSTAQISESRQTRIEKKIEAHFDARSIATVEMVIDGAAGQQLPHKTPPRIPPKPKSRSPTPPSIAAKAQLARQQSPSPIRHSPSPVRHVRAPTPSPVRSVSPAARISTSPIRSVRSPLLMRKTQASTVATGPEVPPPWKQEGYVASSSEAEMRETTLTTSTQIRTEERWEGRYGVQEQVTISGAAGAAASVSASASYAAEAVATGAKEVKQDADKSAAVATVVAAVDMARVREPVISAVEQTAQRTTTTAVHIQPAQEQVRKEAEKTAVTKVVVAADKAKEQELKSRTKEVITTKQEQMHVTHEQIRKETEKTFVPKVVISAAKAKEQETRISEEITKKQKQVTQEAIRQETEITAASMVVVATAKSTKLETVPGAQEETTTQQDQMHLSYEKIMKETRKTVVPKVIVATPKVKEQDLVSRGREGITTKREQVQITQEKMRKEAEKTALSTIAVATAKAKEQETILRTRETMATRQEQIQVTHGKVDVGKKAEAVATVVAAVDQARVREPREPGHLEESYAQQTTLEYGYKERISAAKVAEPPQRPASEPHVVPKAVKPRVIQAPSETHIKTTDQKGMHISSQIKKTTDLTTERLVHVDKRPRTASPHFTVSKISVPKTEHGYEASIAGSAIATLQKELSATSSAQKITKSVKAPTVKPSETRVRAEPTPLPQFPFADTPDTYKSEAGVEVKKEVGVSITGTTVREERFEVLHGREAKVTETARVPAPVEIPVTPPTLVSGLKNVTVIEGESVTLECHISGYPSPTVTWYREDYQIESSIDFQITFQSGIARLMIREAFAEDSGRFTCSAVNEAGTVSTSCYLAVQVSEEFEKETTAVTEKFTTEEKRFVESRDVVMTDTSLTEEQAGPGEPAAPYFITKPVVQKLVEGGSVVFGCQVGGNPKPHVYWKKSGVPLTTGYRYKVSYNKQTGECKLVISMTFADDAGEYTIVVRNKHGETSASASLLEEADYELLMKSQQEMLYQTQVTAFVQEPKVGETAPGFVYSEYEKEYEKEQALIRKKMAKDTVVVRTYVEDQEFHISSFEERLIKEIEYRIIKTTLEELLEEDGEEKMAVDISESEAVESGFDSRIKNYRILEGMGVTFHCKMSGYPLPKIAWYKDGKRIKHGERYQMDFLQDGRASLRIPVVLPEDEGIYTAFASNIKGNAICSGKLYVEPAAPLGAPTYIPTLEPVSRIRSLSPRSVSRSPIRMSPARMSPARMSPARMSPARMSPGRRLEETDESQLERLYKPVFVLKPVSFKCLEGQTARFDLKVVGRPMPETFWFHDGQQIVNDYTHKVVIKEDGTQSLIIVPATPSDSGEWTVVAQNRAGRSSISVILTVEAVEHQVKPMFVEKLKNVNIKEGSRLEMKVRATGNPNPDIVWLKNSDIIVPHKYPKIRIEGTKGEAALKIDSTVSQDSAWYTATAINKAGRDTTRCKVNVEVEFAEPEPERKLIIPRGTYRAKEIAAPELEPLHLRYGQEQWEEGDLYDKEKQQKPFFKKKLTSLRLKRFGPAHFECRLTPIGDPTMVVEWLHDGKPLEAANRLRMINEFGYCSLDYGVAYSRDSGIITCRATNKYGTDHTSATLIVKDEKSLVEESQLPEGRKGLQRIEELERMAHEGALTGVTTDQKEKQKPDIVLYPEPVRVLEGETARFRCRVTGYPQPKVNWYLNGQLIRKSKRFRVRYDGIHYLDIVDCKSYDTGEVKVTAENPEGVIEHKVKLEIQQREDFRSVLRRAPEPRPEFHVHEPGKLQFEVQKVDRPVDTTETKEVVKLKRAERITHEKVPEESEELRSKFKRRTEEGYYEAITAVELKSRKKDESYEELLRKTKDELLHWTKELTEEEKKALAEEGKITIPTFKPDKIELSPSMEAPKIFERIQSQTVGQGSDAHFRVRVVGKPDPECEWYKNGVKIERSDRIYWYWPEDNVCELVIRDVTAEDSASIMVKAINIAGETSSHAFLLVQAKQLITFTQELQDVVAKEKDTMATFECETSEPFVKVKWYKDGMEVHEGDKYRMHSDRKVHFLSILTIDTSDAEDYSCVLVEDENVKTTAKLIVEGAVVEFVKELQDIEVPESYSGELECIVSPENIEGKWYHNDVELKSNGKYTITSRRGRQNLTVKDVTKEDQGEYSFVIDGKKTTCKLKMKPRPIAILQGLSDQKVCEGDIVQLEVKVSLESVEGVWMKDGQEVQPSDRVHIVIDKQSHMLLIEDMTKEDAGNYSFTIPALGLSTSGRVSVYSVDVITPLKDVNVIEGTKAVLECKVSVPDVTSVKWYLNDEQIKPDDRVQAIVKGTKQRLVINRTHASDEGPYKLIVGRVETNCNLSVEKIKIIRGLRDLTCTETQNVVFEVELSHSGIDVLWNFKDKEIKPSSKYKIEAHGKIYKLTVLNMMKDDEGKYTFYAGENMTSGKLTVAGGAISKPLTDQTVAESQEAVFECEVANPDSKGEWLRDGKHLPLTNNIRSESDGHKRRLIIAATKLDDIGEYTYKVATSKTSAKLKVEAVKIKKTLKNLTVTETQDAVFTVELTHPNVKGVQWIKNGVVLESNEKYAISVKGTIYSLRIKNCAIVDESVYGFRLGRLGASARLHVETVKIIKKPKDVTALENATVAFEVSVSHDTVPVKWFHKSVEIKPSDKHRLVSERKVHKLMLQNISPSDAGEYTAVVGQLECKAKLFVETLHITKTMKNIEVPETKTASFECEVSHFNVPSMWLKNGVEIEMSEKFKIVVQGKLHQLIIMNTSTEDSAEYTFVCGNDQVSATLTVTPIMITSMLKDINAEEKDTITFEVTVNYEGISYKWLKNGVEIKSTDKCQMRTKKLTHSLNIRNVHFGDAADYTFVAGKATSTATLYVEARHIEFRKHIKDIKVLEKKRAMFECEVSEPDITVQWMKDDQELQITDRIKIQKEKYVHRLLIPSTRMSDAGKYTVVAGGNVSTAKLFVEGRDVRIRSIKKEVQVIEKQRAVVEFEVNEDDVDAHWYKDGIEINFQVQERHKYVVERRIHRMFISETRQSDAGEYTFVAGRNRSSVTLYVNAPEPPQVLQELQPVTVQSGKPARFCAVISGRPQPKISWYKEEQLLSTGFKCKFLHDGQEYTLLLIEAFPEDAAVYTCEAKNDYGVATTSASLSVEVPEVVSPDQEMPVYPPAIITPLQDTVTSEGQPARFQCRVSGTDLKVSWYSKDKKIKPSRFFRMTQFEDTYQLEIAEAYPEDEGTYTFVASNAVGQVSSTANLSLEGFSKFEENTSNSQWHVSLSVSFKKEPLGQKPSFIQPLSSLRVHNGETVRFHARVSGIPKPEIQWFHNQQLILPTKDVVFHFEESTGMALMLIVDAYSEHAGQYSCKAANSAGEATCAATLTVTPKAPESILHERIEQEIEMEMKEFSSSFLSAEEEGLHSAELQLSKINETLELLSESPVYPTKFDSEKEGTGPIFIKEVSNADISMGDVATLSVTVIGIPKPKIQWFFNGVLLTPSADYKFVFDGDDHSLIILFTKLEDEGEYTCMASNDYGKTICSAYLKINSKGEGHKDTETESAVAKSLEKLGGPCPPHFLKELKPIRCAQGLPAIFEYTVVGEPAPTVTWFKENKQLCTSVYYTIIHNPNGSGTFIVNDPQREDSGLYICKAENMLGESTCAAELLVLLEDTDMTDTPCKAKSTPEAPEDFPQTPLKGPAVEALDSEQEIATFVKDTILKAALITEENQQLSYEHIAKANELSSQLPLGAQELQSILEQDKLTPESTREFLCINGSIHFQPLKEPSPNLQLQIVQSQKTFSKEGILMPEEPETQAVLSDTEKIFPSAMSIEQINSLTVEPLKTLLAEPEGNYPQSSIEPPMHSYLTSVAEEVLSPKEKTVSDTNREQRVTLQKQEAQSALILSQSLAEGHVESLQSPDVMISQVNYEPLVPSEHSCTEGGKILIESANPLENAGQDSAVRIEEGKSLRFPLALEEKQVLLKEEHSDNVVMPPDQIIESKREPVAIKKVQEVQGRDLLSKESLLSGIPEEQRLNLKIQICRALQAAVASEQPGLFSEWLRNIEKVEVEAVNITQEPRHIMCMYLVTSAKSVTEEVTIIIEDVDPQMANLKMELRDALCAIIYEEIDILTAEGPRIQQGAKTSLQEEMDSFSGSQKVEPITEPEVESKYLISTEEVSYFNVQSRVKYLDATPVTKGVASAVVSDEKQDESLKPSEEKEESSSESGTEEVATVKIQEAEGGLIKEDGPMIHTPLVDTVSEEGDIVHLTTSITNAKEVNWYFENKLVPSDEKFKCLQDQNTYTLVIDKVNTEDHQGEYVCEALNDSGKTATSAKLTVVKRAAPVIKRKIEPLEVALGHLAKFTCEIQSAPNVRFQWFKAGREIYESDKCSIRSSKYISSLEILRTQVVDCGEYTCKASNEYGSVSCTATLTVTEAYPPTFLSRPKSLTTFVGKAAKFICTVTGTPVIETIWQKDGAALSPSPNWRISDAENKHILELSNLTIQDRGVYSCKASNKFGADICQAELIIIDKPHFIKELEPVQSAINKKVHLECQVDEDRKVTVTWSKDGQKLPPGKDYKICFEDKIATLEIPLAKLKDSGTYVCTASNEAGSSSCSATVTVREPPSFVKKVDPSYLMLPGESARLHCKLKGSPVIQVTWFKNNKELSESNTVRMYFVNSEAILDITDVKVEDSGSYSCEAVNDVGSDSCSTEIVIKEPPSFIKTLEPADIVRGTNALLQCEVSGTGPFEISWFKDKKQIRSSKKYRLFSQKSLVCLEIFSFNSADVGEYECVVANEVGKCGCMATHLLKEPPTFVKKVDDLIALGGQTVTLQAAVRGSEPISVTWMKGQEVIREDGKIKMSFSNGVAVLIIPDVQISFGGKYTCLAENEAGSQTSVGELIVKEPAKIIERAELIQVTAGDPATLEYTVAGTPELKPKWYKDGRPLVASKKYRISFKNNVAQLKFYSAELHDSGQYTFEISNEVGSSSCETTFTVLDRDIAPFFTKPLRNVDSVVNGTCRLDCKIAGSLPMRVSWFKDGKEIAASDRYRIAFVEGTASLEIIRVDMNDAGNFTCRATNSVGSKDSSGALIVQEPPSFVTKPGSKDVLPGSAVCLKSTFQGSTPLTIRWFKGNKELVSGGSCYITKEALESSLELYLVKTSDSGTYTCKVSNVAGGVECSANLFVKEPATFVEKLEPSQLLKKGDATQLACKVTGTPPIKITWFANDREIKESSKHRMSFVESTAVLRLTDVGIEDSGEYMCEAQNEAGSDHCSSIVIVKESPYFTKEFKPIEVLKEYDVMLLAEVAGTPPFEITWFKDNTILRSGRKYKTFIQDHLVSLQILKFVAADAGEYQCRVTNEVGSSICSARVTLREPPSFIKKIESTSSLRGGTAAFQATLKGSLPITVTWLKDSDEITEDDNIRMTFENNVASLYLSGIEVKHDGKYVCQAKNDAGIQRCSALLSVKEPATITEEAVSIDVTQGDPATLQVKFSGTKEITAKWFKDGQELTLGSKYKISVTDTVSILKIISTEKKDSGEYTFEVQNDVGRSSCKARINVLDLIIPPSFTKKLKKMDSIKGSFIDLECIVAGSHPISIQWFKDDQEISASEKYKFSFHDNTAFLEISQLEGTDSGTYTCSATNKAGHNQCSGHLTVKEPPYFVEKPQSQDVNPNTRVQLKALVGGTAPMTIKWFKDNKELHSGAARSVWKDDTSTSLELFAAKATDSGTYICQLSNDVGTATSKATLFVKEPPQFIKKPSPVLVLRNGQSTTFECQITGTPKIRVSWYLDGNEITAIQKHGISFIDGLATFQISGARVENSGTYVCEARNDAGTASCSIELKVKEPPTFIRELKPVEVVKYSDVELECEVTGTPPFEVTWLKNNREIRSSKKYTLTDRVSVFNLHITKCDPSDTGEYQCIVSNEGGSCSCSTRVALKEPPSFIKKIENTTTVLKSSATFQSTVAGSPPISITWLKDDQILDEDDNVYISFVDSVATLQIRSVDNGHSGRYTCQAKNESGVERCYAFLLVQEPAQIVEKAKSVDVTEKDPMTLECVVAGTPELKVKWLKDGKQIVPSRYFSMSFENNVASFRIQSVMKQDSGQYTFKVENDFGSSSCDAYLRVLDQNIPPSFTKKLTKMDKVLGSSIHMECKVSGSLPISAQWFKDGKEISTSAKYRLVCHERSVSLEVNNLELEDTANYTCKVSNVAGDDACSGILTVKEPPSFLVKPGRQQAIPDSTVEFKAILKGTPPFKIKWFKDDVELVSGPKCFIGLEGSTSFLNLYSVDASKTGQYTCHVTNDVGSDSCTTMLLVTEPPKFVKKLEASKIVKAGDSSRLECKIAGSPEIRVVWFRNEHELPASDKYRMTFIDSVAVIQMNNLSTEDSGDFICEAQNPAGSTSCSTKVIVKEPPVFSSFPPIVETLKNAEVSLECELSGTPPFEVVWYKDKRQLRSSKKYKIASKNFHTSIHILNVDTSDIGEYHCKAQNEVGSDTCVCTVKLKEPPRFVSKLNSLTVVAGEPAELQASIEGAQPIFVQWLKEKEEVIRESENIRITFVENVATLQFAKAEPANAGKYICQIKNDGGMRENMATLMVLEPAVIVEKAGPMTVTVGETCTLECKVAGTPELSVEWYKDGKLLTSSQKHKFSFYNKISSLRILSVERQDAGTYTFQVQNNVGKSSCTAVVDVSDRAVPPSFTRRLKNTGGVLGASCILECKVAGSSPISVAWFHEKTKIVSGAKYQTTFSDNVCTLQLNSLDSSDMGNYTCVAANVAGSDECRAVLTVQEPPSFVKEPEPLEVLPGKNVTFTSVIRGTPPFKVNWFRGARELVKGDRCNIYFEDTVAELELFNIDISQSGEYTCVVSNNAGQASCTTRLFVKEPAAFLKRLSDHSVEPGKSIILESTYTGTLPISVTWKKDGFNITTSEKCNIVTTEKTCILEILNSTKRDAGQYSCEIENEAGRDVCGALVSTLEPPYFVTELEPLEAAVGDSVSLQCQVAGTPEITVSWYKGDTKLRPTPEYRTYFTNNVATLVFNKVNINDSGEYTCKAENSIGTASSKTVFRIQERQLPPSFARQLKDIEQTVGLPVTLTCRLNGSAPIQVCWYRDGVLLRDDENLQTSFVDNVATLKILQTDLSHSGQYSCSASNPLGTASSSARLTAREPKKSPFFDIKPVSIDVIAGESADFECHVTGAQPMRITWSKDNKEIRPGGNYTITCVGNTPHLRILKVGKGDSGQYTCQATNDVGKDMCSAQLSVKEPPKFVKKLEASKVAKQGESIQLECKISGSPEIKVSWFRNDSELHESWKYNMSFINSVALLTINEASAEDSGDYICEAHNGVGDASCSTALTVKAPPVFTQKPSPVGALKGSDVILQCEISGTPPFEVVWVKDRKQVRNSKKFKITSKHFDTSLHILNLEASDVGEYHCKATNEVGSDTCSCSVKFKEPPRFVKKLSDTSTLIGDAVELRAIVEGFQPISVVWLKDRGEVIRESENTRISFIDNIATLQLGSPEASNSGKYICQIKNDAGMRECSAVLTVLEPARIIEKPEPMTVTTGNPFALECVVTGTPELSAKWFKDGRELSADSKHHITFINKVASLKIPCAEMSDKGLYSFEVKNSVGKSNCTVSVHVSDRIVPPSFIRKLKDVNAILGASVVLECRVSGSAPISVGWFQDGNEIVSGPKCQSSFSENVCTLNLSLLEPSDTGIYTCVAANVAGSDECSAVLTVQEPPSFEQTPDSVEVLPGMSLTFTSVIRGTPPFKVKWFKGSRELVPGESCNISLEDFVTELELFEVQPLESGDYSCLVTNDAGSASCTTHLFVKEPATFVKRLADFSVETGSPIVLEATYTGTPPISVSWIKDEYLISQSERCSITMTEKSTILEILESTIEDYAQYSCLIENEAGQDICEALVSVLEPPYFIEPLEHVEAVIGEPATLQCKVDGTPEIRISWYKEHTKLRSAPAYKMQFKNNVASLVINKVDHSDVGEYSCKADNSVGAVASSAVLVIKARKLPPFFARKLKDVHETLGFPVAFECRINGSEPLQVSWYKDGVLLKDDANLQTSFVHNVATLQILQTDQSHIGQYNCSASNPLGTASSSAKLILSEHEVPPFFDLKPVSVDLALGESGTFKCHVTGTAPIKITWAKDNREIRPGGNYKMTLVENTATLTVLKVGKGDAGQYTCYASNIAGKDSCSAQLGVQEPPRFIKKLEPSRIVKQDEFTRYECKIGGSPEIKVLWYKDETEIQESSKFRMSFVDSVAVLEMHNLSVEDSGDYTCEAHNAAGSASSSTSLKVKEPPIFRKKPHPIETLKGADVHLECELQGTPPFHVSWYKDKRELRSGKKYKIMSENFLTSIHILNVDAADIGEYQCKATNDVGSDTCVGSIALKAPPRFVKKLSDISTVVGKEVQLQTTIEGAEPISVVWFKDKGEIVRESDNIWISYSENIATLQFSRVEPANAGKYTCQIKNDAGMQECFATLSVLEPATIVEKPESIKVTTGDTCTLECTVAGTPELSTKWFKDGKELTSDNKYKISFFNKVSGLKIINVAPSDSGVYSFEVQNPVGKDSCTASLQVSDRTVPPSFTRKLKETNGLSGSSVVMECKVYGSPPISVSWFHEGNEISSGRKYQTTLTDNTCALTVNMLEESDSGDYTCIATNMAGSDECSAPLTVREPPSFVQKPDPMDVLTGTNVTFTSIVKGTPPFSVSWFKGSSELVPGDRCNVSLEDSVAELELFDVDTSQSGEYTCIVSNEAGKASCTTHLYIKAPAKFVKRLNDYSIEKGKPLILEGTFTGTPPISVTWKKNGINVTPSQRCNITTTEKSAILEIPSSTVEDAGQYNCYIENASGKDSCSAQILILEPPYFVKQLEPVKVSVGDSASLQCQLAGTPEIGVSWYKGDTKLRPTTTYKMHFRNNVATLVFNQVDINDSGEYICKAENSVGEVSASTFLTVQEQKLPPSFSRQLRDVQETVGLPVVFDCAISGSEPISVSWYKDGKPLKDSPNVQTSFLDNTATLNIFKTDRSLAGQYSCTATNPIGSASSSARLILTEGKNPPFFDIRLAPVDAVVGESADFECHVTGTQPIKVSWAKDSREIRSGGKYQISYLENSAHLTVLKVDKGDSGQYTCYAVNEVGKDSCTAQLNIKERLIPPSFTKRLSETVEETEGNSFKLEGRVAGSQPITVAWYKNNIEIQPTSNCEITFKNNTLVLQVRKAGMNDAGLYTCKVSNDAGSALCTSSIVIKEPKKPPVFDQHLTPVTVSEGEYVQLSCHVQGSEPIRIQWLKAGREIKPSDRCSFSFASGTAVLELRDVAKADSGDYVCKASNVAGSDTTKSKVTIKDKPAVAPATKKAAVDGRLFFVSEPQSIRVVEKTTATFIAKVGGDPIPNVKWTKGKWRQLNQGGRVFIHQKGDEAKLEIRDTTKTDSGLYRCVAFNEHGEIESNVNLQVDERKKQEKIEGDLRAMLKKTPILKKGAGEEEEIDIMELLKNVDPKEYEKYARMYGITDFRGLLQAFELLKQSQEEETHRLEIEEIERSERDEKEFEELVSFIQQRLSQTEPVTLIKDIENQTVLKDNDAVFEIDIKINYPEIKLSWYKGTEKLEPSDKFEISIDGDRHTLRVKNCQLKDQGNYRLVCGPHIASAKLTVIEPAWERHLQDVTLKEGQTCTMTCQFSVPNVKSEWFRNGRILKPQGRHKTEVEHKVHKLTIADVRAEDQGQYTCKYEDLETSAELRIEAEPIQFTKRIQNIVVSEHQSATFECEVSFDDAIVTWYKGPTELTESQKYNFRNDGRCHYMTIHNVTPDDEGVYSVIARLEPRGEARSTAELYLTTKEIKLELKPPDIPDSRVPIPTMPIRAVPPEEIPPVVAPPIPLLLPTPEEKKPPPKRIEVTKKAVKKDAKKVVAKPKEMTPREEIVKKPPPPTTLIPAKAPEIIDVSSKAEEVKIMTITRKKEVQKEKEAVYEKKQAVHKEKRVFIESFEEPYDELEVEPYTEPFEQPYYEEPDEDYEEIKVEAKKEVHEEWEEDFEEGQEYYEREEGYDEGEEEWEEAYQEREVIQVQKEVYEESHERKVPAKVPEKKAPPPPKVIKKPVIEKIEKTSRRMEEEKVQVTKVPEVSKKIVPQKPSRTPVQEEVIEVKVPAVHTKKMVISEEKMFFASHTEEEVSVTVPEVQKEIVTEEKIHVAISKRVEPPPKVPELPEKPAPEEVAPVPIPKKVEPPAPKVPEVPKKPVPEEKKPVPVPKKEPAAPPKVPEVPKKPVPEEKIPVPVAKKKEAPPAKVPEVQKGVVTEEKITIVTQREESPPPAVPEIPKKKVPEERKPVPRKEEEVPPPPKVPALPKKPVPEEKVAVPVPVAKKAPPPRAEVSKKTVVEEKRFVAEEKLSFAVPQRVEVTRHEVSAEEEWSYSEEEEGVSISVYREEEREEEEEAEVTEYEVMEEPEEYVVEEKLHIISKRVEAEPAEVTERQEKKIVLKPKIPAKIEEPPPAKVPEAPKKIVPEKKVPAPVPKKEKVPPPKVPEEPKKPVPEKKVPPKVIKMEEPLPAKVTERHMQITQEEKVLVAVTKKEAPPKARVPEEPKRAVPEEKVLKLKPKREEEPPAKVTEFRKRVVKEEKVSIEAPKREPQPIKEVTIMEEKERAYTLEEEAVSVQREEEYEEYEEYDYKEFEEYEPTEEYDQYEEYEEREYERYEEHEEYITEPEKPIPVKPVPEEPVPTKPKAPPAKVLKKAVPEEKVPVPIPKKLKPPPPKVPEEPKKVFEEKIRISITKREKEQVTEPAAKVPMKPKRVVAEEKVPVPRKEVAPPVRVPEVPKELEPEEVAFEEEVVTHVEEYLVEEEEEYIHEEEEFITEEEVVPVIPVKVPEVPRKPVPEEKKPVPVPKKKEAPPAKVPEVPKKPEEKVPVLIPKKEKPPPAKVPEVPKKPVPEEKVPVPVPKKVEAPPAKVPEVPKKPVPEKKVPVPAPKKVEAPPAKVPEVPKKLIPEEKKPTPVPKKVEAPPPKVPKKREPVPVPVALPQEEEVLFEEEIVPEEEVLPEEEEVLPEEEEVLPEEEEVLPEEEEIPPEEEEVPPEEEYVPEEEEFVPEEEVLPEVKPKVPVPAPVPEIKKKVTEKKVVIPKKEEAPPAKVPEVPKKVEEKRIILPKEEEVLPVEVTEEPEEEPISEEEIPEEPPSIEEVEEVAPPRVPEVIKKAVPEAPTPVPKKVEAPPAKVSKKIPEEKVPVPVQKKEAPPAKVPEVPKKVPEKKVLVPKKEAVPPAKGRTVLEEKVSVAFRQEVVVKERLELEVVEAEVEEIPEEEEFHEVEEYFEEGEFHEVEEFIKLEQHRVEEEHRVEKVHRVIEVFEAEEVEVFEKPKAPPKGPEISEKIIPPKKPPTKVVPRKEPPAKVPEVPKKIVVEEKVRVPEEPRVPPTKVPEVLPPKEVVPEKKVPVPPAKKPEAPPPKVPEAPKEVVPEKKVPVPPPKKPEVPPTKVPEVPKAAVPEKKVPEAIPPKPESPPPEVPEAPKEVVPEKKVPAAPPKKPEVTPVKVPEAPKEVVPEKKVPVPPPKKPEVPPTKVPEVPKVAVPEKKVPEAIPPKPESPPPEVFEEPEEVALEEPPAEVVEEPEPAAPPQVTVPPKKPVPEKKAPAVVAKKPELPPVKVPEVPKEVVPEKKVPLVVPKKPEAPPAKVPEVPKEVVPEKKVAVPKKPEVPPAKVPEVPKKPVLEEKPAVPVPERAESPPPEVYEEPEEIAPEEEIAPEEEKPVPVAEEEEPEVPPPAVPEEPKKIIPEKKVPVIKKPEAPPPKEPEPEKVIEKPKLKPRPPPPPPAPPKEDVKEKIFQLKAIPKKKVPEKPQVPEKVELTPLKVPGGEKKVRKLLPERKPEPKEEVVLKSVLRKRPEEEEPKVEPKKLEKVKKPAVPEPPPPKPVEEVEVPTVTKRERKIPEPTKVPEIKPAIPLPAPEPKPKPEAEVKTIKPPPVEPEPTPIAAPVTVPVVGKKAEAKAPKEEAAKPKGPIKGVPKKTPSPIEAERRKLRPGSGGEKPPDEAPFTYQLKAVPLKFVKEIKDIILTESEFVGSSAIFECLVSPSTAITTWMKDGSNIRESPKHRFIADGKDRKLHIIDVQLSDAGEYTCVLRLGNKEKTSTAKLVVEELPVRFVKTLEEEVTVVKGQPLYLSCELNKERDVVWRKDGKIVVEKPGRIVPGVIGLMRALTINDADDTDAGTYTVTVENANNLECSSCVKVVEVIRDWLVKPIRDQHVKPKGTAIFACDIAKDTPNIKWFKGYDEIPAEPNDKTEILRDGNHLYLKIKNAMPEDIAEYAVEIEGKRYPAKLTLGEREVELLKPIEDVTIYEKESASFDAEISEADIPGQWKLKGELLRPSPTCEIKAEGGKRFLTLHKVKLDQAGEVLYQALNAITTAILTVKEIELDFAVPLKDVTVPERRQARFECVLTREANVIWSKGPDIIKSSDKFDIIADGKKHILVINDSQFDDEGVYTAEVEGKKTSARLFVTGIRLKFMSPLEDQTVKEGETATFVCELSHEKMHVVWFKNDAKLHTSRTVLISSEGKTHKLEMKEVTLDDISQIKAQVKELSSTAQLKVLEADPYFTVKLHDKTAVEKDEITLKCEVSKDVPVKWFKDGEEIVPSPKYSIKADGLRRILKIKKADLKDKGEYVCDCGTDKTKANVTVEARLIKVEKPLYGVEVFVGETAHFEIELSEPDVHGQWKLKGQPLTASPDCEIIEDGKKHILILHNCQLGMTGEVSFQAANAKSAANLKVKELPLIFITPLSDVKVFEKDEAKFECEVSREPKTFRWLKGTQEITGDDRFELIKDGTKHSMVIKSAAFEDEAKYMFEAEDKHTSGKLIIEGIRLKFLTPLKDVTAKEKESAVFTVELSHDNIRVKWFKNDQRLHTTRSVSMQDEGKTHSITFKDLSIDDTSQIRVEAMGMSSEAKLTVLEGDPYFTGKLQDYTGVEKDEVILQCEISKADAPVKWFKDGKEIKPSKNAVIKADGKKRMLILKKALKSDIGQYTCDCGTDKTSGKLDIEDREIKLVRPLHSVEVMETETARFETEISEDDIHANWKLKGEALLQTPDCEIKEEGKIHSLVLHNCRLDQTGGVDFQAANVKSSAHLRVKPRVIGLLRPLKDVTVTAGETATFDCELSYEDIPVEWYLKGKKLEPSDKVVPRSEGKVHTLTLRDVKLEDAGEVQLTAKDFKTHANLFVKEPPVEFTKPLEDQTVEEGATAVLECEVSRENAKVKWFKNGTEILKSKKYEIVADGRVRKLVIHDCTPEDIKTYTCDAKDFKTSCNLNVVPPHVEFLRPLTDLQVREKEMARFECELSRENAKVKWFKDGAEIKKGKKYDIISKGAVRILVINKCLLDDEAEYSCEVRTARTSGMLTVLEEEAVFTKNLANIEVSETDTIKLVCEVSKPGAEVIWYKGDEEIIETGRYEILTEGRKRILVIQNAHLEDAGNYNCRLPSSRTDGKVKVHELAAEFISKPQNLEILEGEKAEFVCSISKESFPVQWKRDDKTLESGDKYDVIADGKKRVLVVKDATLQDMGTYVVMVGAARAAAHLTVIEKLRIVVPLKDTRVKEQQEVVFNCEVNTEGAKAKWFRNEEAIFDSSKYIILQKDLVYTLRIRDAHLDDQANYNVSLTNHRGENVKSAANLIVEEEDLRIVEPLKDIETMEKKSVTFWCKVNRLNVTLKWTKNGEEVPFDNRVSYRVDKYKHMLTIKDCGFPDEGEYIVTAGQDKSVAELLIIEAPTEFVEHLEDQTVTEFDDAVFSCQLSREKANVKWYRNGREIKEGKKYKFEKDGSIHRLIIKDCRLDDECEYACGVEDRKSRARLFVEEIPVEIIRPPQDILEAPGADVVFLAELNKDKVEVQWLRNNMVVVQGDKHQMMSEGKIHRLQICDIKPRDQGEYRFIAKDKEARAKLELAAAPKIKTADQDLVVDVGKPLTMVVPYDAYPKAEAEWFKENEPLSTKTIDTTAEQTSFRILEAKKGDKGRYKIVLQNKHGKAEGFINLKVIDVPGPVRNLEVTETFDGEVSLAWEEPLTDGGSKIIGYVVERRDIKRKTWVLATDRAESCEFTVTGLQKGGVEYLFRVSARNRVGTGEPVETDNPVEARSKYDVPGPPLNVTITDVNRFGVSLTWEPPEYDGGAEITNYVIELRDKTSIRWDTAMTVRAEDLSATVTDVVEGQEYSFRVRAQNRIGVGKPSAATPFVKVADPIERPSPPVNLTSSDQTQSSVQLKWEPPLKDGGSPILGYIIERCEEGKDNWIRCNMKLVPELTYKVTGLEKGNKYLYRVSAENKAGVSDPSEILGPLTADDAFVEPTMDLSAFKDGLEVIVPNPITILVPSTGYPRPTATWCFGDKVLETGDRVKMKTLSAYAELVISPSERSDKGIYTLKLENRVKTISGEIDVNVIARPSAPKELKFGDITKDSVHLTWEPPDDDGGSPLTGYVVEKREVSRKTWTKVMDFVTDLEFTVPDLVQGKEYLFKVCARNKCGPGEPAYVDEPVNMSTPATVPDPPENVKWRDRTANSIFLTWDPPKNDGGSRIKGYIVERCPRGSDKWVACGEPVAETKMEVTGLEEGKWYAYRVKALNRQGASKPSRPTEEIQAVDTQEAPEIFLDVKLLAGLTVKAGTKIELPATVTGKPEPKITWTKADMILKQDKRITIENVPKKSTVTIVDSKRSDTGTYIIEAVNVCGRATAVVEVNVLDKPGPPAAFDITDVTNESCLLTWNPPRDDGGSKITNYVVERRATDSEVWHKLSSTVKDTNFKATKLIPNKEYIFRVAAENMYGVGEPVQASPITAKYQFDPPGPPTRLEPSDITKDAVTLTWCEPDDDGGSPITGYWVERLDPDTDKWVRCNKMPVKDTTYRVKGLTNKKKYRFRVLAENLAGPGKPSKSTEPILIKDPIDPPWPPGKPTVKDVGKTSVRLNWTKPEHDGGAKIESYVIEMLKTGTDEWVRVAEGVPTTQHLLPGLMEGQEYSFRVRAVNKAGESEPSEPSDPVLCREKLYPPSPPRWLEVINITKNTADLKWTVPEKDGGSPITNYIVEKRDVRRKGWQTVDTTVKDTKCTVTPLTEGSLYVFRVAAENAIGQSDYTEIEDSVLAKDTFTTPGPPYALAVVDVTKRHVDLKWEPPKNDGGRPIQRYVIEKKERLGTRWVKAGKTAGPDCNFRVTDVIEGTEVQFQVRAENEAGVGHPSEPTEILSIEDPTSPPSPPLDLHVTDAGRKHIAIAWKPPEKNGGSPIIGYHVEMCPVGTEKWMRVNSRPIKDLKFKVEEGVVPDKEYVLRVRAVNAIGVSEPSEISENVVAKDPDCKPTIDLETHDIIVIEGEKLSIPVPFRAVPVPTVSWHKDGKEVKASDRLTMKNDHISAHLEVPKSVRADAGIYTITLENKLGSATASINVKVIGLPGPCKDIKASDITKSSCKLTWEPPEFDGGTPILHYVLERREAGRRTYIPVMSGENKLSWTVKDLIPNGEYFFRVKAVNKVGGGEYIELKNPVIAQDPKQPPDPPVDVEVHNPTAEAMTITWKPPLYDGGSKIMGYIIEKIAKGEERWKRCNEHLVPILTYTAKGLEEGKEYQFRVRAENAAGISEPSRATPPTKAVDPIDAPKVILRTSLEVKRGDEIALDASISGSPYPTITWIKDENVIVPEEIKKRAAPLVRRRKGEVQEEEPFVLPLTQRLSIDNSKKGESQLRVRDSLRPDHGLYMIKVENDHGIAKAPCTVSVLDTPGPPINFVFEDIRKTSVLCKWEPPLDDGGSEIINYTLEKKDKTKPDSEWIVVTSTLRHCKYSVTKLIEGKEYLFRVRAENRFGPGPPCVSKPLVAKDPFGPPDAPDKPIVEDVTSNSMLVKWNEPKDNGSPILGYWLEKREVNSTHWSRVNKSLLNALKANVDGLLEGLTYVFRVCAENAAGPGKFSPPSDPKTAHDPISPPGPPIPRVTDTSSTTIELEWEPPAFNGGGEIVGYFVDKQLVGTNEWSRCTEKMIKVRQYTVKEIREGADYKLRVSAVNAAGEGPPGETQPVTVAEPQEPPAVELDVSVKGGIQIMAGKTLRIPAVVTGRPVPTKVWTKEEGELDKDRVVIDNVGTKSELIIKDALRKDHGRYVITATNSCGSKFAAARVEVFDVPGPVLDLKPVVTNRKMCLLNWSDPEDDGGSEITGFIIERKDAKMHTWRQPIETERSKCDITGLLEGQEYKFRVIAKNKFGCGPPVEIGPILAVDPLGPPTSPERLTYTERTKSTITLDWKEPRSNGGSPIQGYIIEKRRHDKPDFERVNKRLCPTTSFLVENLDEHQMYEFRVKAVNEIGESEPSLPLNVVIQDDEVPPTIKLRLSVRGDTIKVKAGEPVHIPADVTGLPMPKIEWSKNETVIEKPTDALQITKEEVSRSEAKTELSIPKAVREDKGTYTVTASNRLGSVFRNVHVEVYDRPSPPRNLAVTDIKAESCYLTWDAPLDNGGSEITHYVIDKRDASRKKAEWEEVTNTAVEKRYGIWKLIPNGQYEFRVRAVNKYGISDECKSDKVVIQDPYRLPGPPGKPKVLARTKGSMLVSWTPPLDNGGSPITGYWLEKREEGSPYWSRVSRAPITKVGLKGVEFNVPRLLEGVKYQFRAMAINAAGIGPPSEPSDPEVAGDPIFPPGPPSCPEVKDKTKSSISLGWKPPAKDGGSPIKGYIVEMQEEGTTDWKRVNEPDKLITTCECVVPNLKELRKYRFRVKAVNEAGESEPSDTTGEIPATDIQEEPEVFIDIGAQDCLVCKAGSQIRIPAVIKGRPTPKSSWEFDGKAKKAMKDGVHDIPEDAQLETAENSSVIIIPECKRSHTGKYSITAKNKAGQKTANCRVKVMDVPGPPKDLKVSDITRGSCRLSWKMPDDDGGDRIKGYVIEKRTIDGKAWTKVNPDCGSTTFVVPDLLSEQQYFFRVRAENRFGIGPPVETIQRTTARDPIYPPDPPIKLKIGLITKNTVHLSWKPPKNDGGSPVTHYIVECLAWDPTGTKKEAWRQCNKRDVEELQFTVEDLVEGGEYEFRVKAVNAAGVSKPSATVGPVTVKDQTCPPSIDLKEFMEVEEGTNVNIVAKIKGVPFPTLTWFKAPPKKPDNKEPVLYDTHVNKLVVDDTCTLVIPQSRRSDTGLYTITAVNNLGTASKEMRLNVLGRPGPPVGPIKFESVSADQMTLSWFPPKDDGGSKITNYVIEKREANRKTWVHVSSEPKECTYTIPKLLEGHEYVFRIMAQNKYGIGEPLDSEPETARNLFSVPGAPDKPTVSSVTRNSMTVNWEEPEYDGGSPVTGYWLEMKDTTSKRWKRVNRDPIKAMTLGVSYKVTGLIEGSDYQFRVYAINAAGVGPASLPSDPATARDPIAPPGPPFPKVTDWTKSSADLEWSPPLKDGGSKVTGYIVEYKEEGKEEWEKGKDKEVRGTKLVVTGLKEGAFYKFRVRAVNIAGIGEPGEVTDVIEMKDRLVSPDLQLDASVRDRIVVHAGGVIRIIAYVSGKPPPTVTWNMNERTLPQEATIETTAISSSMVIKNCQRSHQGVYSLLAKNEAGERKKTIIVDVLDVPGPVGTPFLAHNLTNESCKLTWFSPEDDGGSPITNYVIEKRESDRRAWTPVTYTVTRQNATVQGLIQGKAYFFRIAAENSIGMGPFVETSEALVIREPITVPERPEDLEVKEVTKNTVTLTWNPPKYDGGSEIINYVLESRLIGTEKFHKVTNDNLLSRKYTVKGLKEGDTYEYRVSAVNIVGQGKPSFCTKPITCKDELAPPTLHLDFRDKLTIRVGEAFALTGRYSGKPKPKVSWFKDEADVLEDDRTHIKTTPATLALEKIKAKRSDSGKYCVVVENSTGSRKGFCQVNVVDRPGPPVGPVSFDEVTKDYMVISWKPPLDDGGSKITNYIIEKKEVGKDVWMPVTSASAKTTCKVSKLLEGKDYIFRIHAENLYGISDPLVSDSMKAKDRFRVPDAPDQPIVTEVTKDSALVTWNKPHDGGKPITNYILEKRETMSKRWARVTKDPIHPYTKFRVPDLLEGCQYEFRVSAENEIGIGDPSPPSKPVFAKDPIAKPSPPVNPEAIDTTCNSVDLTWQPPRHDGGSKILGYIVEYQKVGDEEWRRANHTPESCPETKYKVTGLRDGQTYKFRVLAVNAAGESDPAHVPEPVLVKDRLEPPELILDANMAREQHIKVGDTLRLSAIIKGVPFPKVTWKKEDRDAPTKARIDVTPVGSKLEIRNAAHEDGGIYSLTVENPAGSKTVSVKVLVLDKPGPPRDLEVSEIRKDSCYLTWKEPLDDGGSVITNYVVERRDVASAQWSPLSATSKKKSHFAKHLNEGNQYLFRVAAENQYGRGPFVETPKPIKALDPLHPPGPPKDLHHVDVDKTEVSLVWNKPDRDGGSPITGYLVEYQEEGTQDWIKFKTVTNLECVVTGLQQGKTYRFRVKAENIVGLGLPDTTIPIECQEKLVPPSVELDVKLIEGLVVKAGTTVRFPAIIRGVPVPTAKWTTDGSEIKTDEHYTVETDNFSSVLTIKNCLRRDTGEYQITVSNAAGSKTVAVHLTVLDVPGPPTGPINILDVTPEHMTISWQPPKDDGGSPVINYIVEKQDTRKDTWGVVSSGSSKTKLKIPHLQKGCEYVFRVRAENKIGVGPPLDSTPTVAKHKFSPPSPPGKPVVTDITENAATVSWTLPKSDGGSPITGYYMERREVTGKWVRVNKTPIADLKFRVTGLYEGNTYEFRVFAENLAGLSKPSPSSDPIKACRPIKPPGPPINPKLKDKSRETADLVWTKPLSDGGSPILGYVVECQKPGTAQWNRINKDELIRQCAFRVPGLIEGNEYRFRIKAANIVGEGEPRELAESVIAKDILHPPEVELDVTCRDVITVRVGQTIRILARVKGRPEPDITWTKEGKVLVREKRVDLIQDLPRVELQIKEAVRADHGKYIISAKNSSGHAQGSAIVNVLDRPGPCQNLKVTNVTKENCTISWENPLDNGGSEITNFIVEYRKPNQKGWSIVASDVTKRLIKANLLANNEYYFRVCAENKVGVGPTIETKTPILAINPIDRPGEPENLHIADKGKTFVYLKWRRPDYDGGSPNLSYHVERRLKGSDDWERVHKGSIKETHYMVDRCVENQIYEFRVQTKNEGGESDWVKTEEVVVKEDLQKPVLDLKLSGVLTVKAGDTIRLEAGVRGKPFPEVAWTKDKDATDLTRSPRVKIDTRADSSKFSLTKAKRSDGGKYVVTATNTAGSFVAYATVNVLDKPGPVRNLKIVDVSSDRCTVCWDPPEDDGGCEIQNYILEKCETKRMVWSTYSATVLTPGTTVTRLIEGNEYIFRVRAENKIGTGPPTESKPVIAKTKYDKPGRPDPPEVTKVSKEEMTVVWNPPEYDGGKSITGYFLEKKEKHSTRWVPVNKSAIPERRMKVQNLLPDHEYQFRVKAENEIGIGEPSLPSRPVVAKDPIEPPGPPTNFRVVDTTKHSITLGWGKPVYDGGAPIIGYVVEMRPKIADASPDEGWKRCNAAAQLVRKEFTVTSLDENQEYEFRVCAQNQVGIGRPAELKEAIKPKEILEPPEIDLDASMRKLVIVRAGCPIRLFAIVRGRPAPKVTWRKVGIDNVVRKGQVDLVDTMAFLVIPNSTRDDSGKYSLTLVNPAGEKAVFVNVRVLDTPGPVSDLKVSDVTKTSCHVSWAPPENDGGSQVTHYIVEKREADRKTWSTVTPEVKKTSFHVTNLVPGNEYYFRVTAVNEYGPGVPTDVPKPVLASDPLSEPDPPRKLEVTEMTKNSATLAWLPPLRDGGAKIDGYITSYREEEQPADRWTEYSVVKDLSLVVTGLKEGKKYKFRVAARNAVGVSLPREAEGVYEAKEQLLPPKILMPEQITIKAGKKLRIEAHVYGKPHPTCKWKKGEDEVVTSSHLAVHKADSSSILIIKDVTRKDSGYYSLTAENSSGTDTQKIKVVVMDAPGPPQPPFDISDIDADACSLSWHIPLEDGGSNITNYIVEKCDVSRGDWVTALASVTKTSCRVGKLIPGQEYIFRVRAENRFGISEPLTSPKMVAQFPFGVPSEPKNARVTKVNKDCIFVAWDRPDSDGGSPIIGYLIERKERNSLLWVKANDTLVRSTEYPCAGLVEGLEYSFRIYALNKAGSSPPSKPTEYVTARMPVDPPGKPEVIDVTKSTVSLIWARPKHDGGSKIIGYFVEACKLPGDKWVRCNTAPHQIPQEEYTATGLEEKAQYQFRAIARTAVNISPPSEPSDPVTILAENVPPRIDLSVAMKSLLTVKAGTNVCLDATVFGKPMPTVSWKKDGTLLKPAEGIKMAMQRNLCTLELFSVNRKDSGDYTITAENSSGSKSATIKLKVLDKPGPPASVKINKMYSDRAMLSWEPPLEDGGSEITNYIVDKRETSRPNWAQVSATVPITSCSVEKLIEGHEYQFRICAENKYGVGDPVFTEPAIAKNPYDPPGRCDPPVISNITKDHMTVSWKPPADDGGSPITGYLLEKRETQAVNWTKVNRKPIIERTLKATGLQEGTEYEFRVTAINKAGPGKPSDASKAAYARDPQYPPGPPAFPKVYDTTRSSVSLSWGKPAYDGGSPIIGYLVEVKRADSDNWVRCNLPQNLQKTRFEVTGLMEDTQYQFRVYAVNKIGYSDPSDVPDKHYPKDILIPPEGELDADLRKTLILRAGVTMRLYVPVKGRPPPKITWSKPNVNLRDRIGLDIKSTDFDTFLRCENVNKYDAGKYILTLENSCGKKEYTIVVKVLDTPGPPVNVTVKEISKDSAYVTWEPPIIDGGSPIINYVVQKRDAERKSWSTVTTECSKTSFRVANLEEGKSYFFRVFAENEYGIGDPGETRDAVKASQTPGPVVDLKVRSVSKSSCSIGWKKPHSDGGSRIIGYVVDFLTEENKWQRVMKSLSLQYSAKDLTEGKEYTFRVSAENENGEGTPSEITVVARDDVVAPDLDLKGLPDLCYLAKENSNFRLKIPIKGKPAPSVSWKKGEDPLATDTRVSVESSAVNTTLIVYDCQKSDAGKYTITLKNVAGTKEGTISIKVVGKPGIPTGPIKFDEVTAEAMTLKWAPPKDDGGSEITNYILEKRDSVNNKWVTCASAVQKTTFRVTRLHEGMEYTFRVSAENKYGVGEGLKSEPIVARHPFDVPDAPPPPNIVDVRHDSVSLTWTDPKKTGGSPITGYHLEFKERNSLLWKRANKTPIRMRDFKVTGLTEGLEYEFRVMAINLAGVGKPSLPSEPVVALDPIDPPGKPEVINITRNSVTLIWTEPKYDGGHKLTGYIVEKRDLPSKSWMKANHVNVPECAFTVTDLVEGGKYEFRIRAKNTAGAISAPSESTETIICKDEYEAPTIVLDPTIKDGLTIKAGDTIVLNAISILGKPLPKSSWSKAGKDIRPSDITQITSTPTSSMLTIKYATRKDAGEYTITATNPFGTKVEHVKVTVLDVPGPPGPVEISNVSAEKATLTWTPPLEDGGSPIKSYILEKRETSRLLWTVVSEDIQSCRHVATKLIQGNEYIFRVSAVNHYGKGEPVQSEPVKMVDRFGPPGPPEKPEVSNVTKNTATVSWKRPVDDGGSEITGYHVERREKKSLRWVRAIKTPVSDLRCKVTGLQEGSTYEFRVSAENRAGIGPPSEASDSVLMKDAAYPPGPPSNPHVTDTTKKSASLAWGKPHYDGGLEITGYVVEHQKVGDEAWIKDTTGTALRITQFVVPDLQTKEKYNFRISAINDAGVGEPAVIPDVEIVEREMAPDFELDAELRRTLVVRAGLSIRIFVPIKGRPAPEVTWTKDNINLKNRANIENTESFTLLIIPECNRYDTGKFVMTIENPAGKKSGFVNVRVLDTPGPVLNLRPTDITKDSVTLHWDLPLIDGGSRITNYIVEKREATRKSYSTATTKCHKCTYKVTGLSEGCEYFFRVMAENEYGIGEPTETTEPVKASEAPSPPDSLNIMDITKSTVSLAWPKPKHDGGSKITGYVIEAQRKGSDQWTHITTVKGLECVVRNLTEGEEYTFQVMAVNSAGRSAPRESRPVIVKEQTMLPELDLRGIYQKLVIAKAGDNIKVEIPVLGRPKPTVTWKKGDQILKQTQRVNFETTATSTILNINECVRSDSGPYPLTARNIVGEVGDVITIQVHDIPGPPTGPIKFDEVSSDFVTFSWDPPENDGGVPISNYVVEMRQTDSTTWVELATTVIRTTYKATRLTTGLEYQFRVKAQNRYGVGPGITSACIVANYPFKVPGPPGTPQVTAVTKDSMTISWHEPLSDGGSPILGYHVERKERNGILWQTVSKALVPGNIFKSSGLTDGIAYEFRVIAENMAGKSKPSKPSEPMLALDPIDPPGKPVPLNITRHTVTLKWAKPEYTGGFKITSYIVEKRDLPNGRWLKANFSNILENEFTVSGLTEDAAYEFRVIAKNAAGAISPPSEPSDAITCRDDVEAPKIKVDVKFKDTVILKAGEAFRLEADVSGRPPPTMEWSKDGKELEGTAKLEIKIADFSTNLVNKDSTRRDSGAYTLTATNPGGFAKHIFNVKVLDRPGPPEGPLAVTEVTSEKCVLSWFPPLDDGGAKIDHYIVQKRETSRLAWTNVASEVQVTKLKVTKLLKGNEYIFRVMAVNKYGVGEPLESEPVLAVNPYGPPDPPKNPEVTTITKDSMVVCWGHPDSDGGSEIINYIVERRDKAGQRWIKCNKKTLTDLRYKVSGLTEGHEYEFRIMAENAAGISAPSPTSPFYKACDTVFKPGPPGNPRVLDTSRSSISIAWNKPIYDGGSEITGYMVEIALPEEDEWQIVTPPAGLKATSYTITGLTENQEYKIRIYAMNSEGLGEPALVPGTPKAEDRMLPPEIELDADLRKVVTIRACCTLRLFVPIKGRPAPEVKWARDHGESLDKASIESTSSYTLLIVGNVNRFDSGKYILTVENSSGSKSAFVNVRVLDTPGPPQDLKVKEVTKTSVTLTWDPPLLDGGSKIKNYIVEKRESTRKAYSTVATNCHKTSWKVDQLQEGCSYYFRVLAENEYGIGLPAETAESVKASERPLPPGKITLMDVTRNSVSLSWEKPEHDGGSRILGYIVEMQTKGSDKWATCATVKVTEATITGLIQGEEYSFRVSAQNEKGISDPRQLSVPVIAKDLVIPPAFKLLFNTFTVLAGEDLKVDVPFIGRPTPAVTWHKDNVPLKQTTRVNAESTENNSLLTIKDACREDVGHYVVKLTNSAGEAIETLNVIVLDKPGPPTGPVKMDEVTADSITLSWGPPKYDGGSSINNYIVEKRDTSTTTWQIVSATVARTTIKACRLKTGCEYQFRIAAENRYGKSTYLNSEPTVAQYPFKVPGPPGTPVVTLSSRDSMEVQWNEPISDGGSRVIGYHLERKERNSILWVKLNKTPIPQTKFKTTGLEEGVEYEFRVSAENIVGIGKPSKVSECYVARDPCDPPGRPEAIIVTRNSVTLQWKKPTYDGGSKITGYIVEKKELPEGRWMKASFTNIIDTHFEVTGLVEDHRYEFRVIARNAAGVFSEPSESTGAITARDEVDPPRISMDPKYKDTIVVHAGESFKVDADIYGKPIPTIQWIKGDQELSNTARLEIKSTDFATSLSVKDAVRVDSGNYILKAKNVAGERSVTVNVKVLDRPGPPEGPVVISGVTAEKCTLAWKPPLQDGGSDIINYIVERRETSRLVWTVVDANVQTLSCKVTKLLEGNEYTFRIMAVNKYGVGEPLESEPVVAKNPFVVPDAPKAPEVTTVTKDSMIVVWERPASDGGSEILGYVLEKRDKEGIRWTRCHKRLIGELRLRVTGLIENHDYEFRVSAENAAGLSEPSPPSAYQKACDPIYKPGPPNNPKVIDITRSSVFLSWSKPIYDGGCEIQGYIVEKCDVSVGEWTMCTPPTGINKTNIEVEKLLEKHEYNFRICAINKAGVGEHADVPGPIIVEEKLEAPDIDLDLELRKIINIRAGGSLRLFVPIKGRPTPEVKWGKVDGEIRDAAIIDVTSSFTSLVLDNVNRYDSGKYTLTLENSSGTKSAFVTVRVLDTPSPPVNLKVTEITKDSVSITWEPPLLDGGSKIKNYIVEKREATRKSYAAVVTNCHKNSWKIDQLQEGCSYYFRVTAENEYGIGLPAQTADPIKVAEVPQPPGKITVDDVTRNSVSLSWTKPEHDGGSKIIQYIVEMQAKHSEKWSECARVKSLQAVITNLTQGEEYLFRVVAVNEKGRSDPRSLAVPIVAKDLVIEPDVKPAFSSYSVQVGQDLKIEVPISGRPKPTITWTKDGLPLKQTTRINVTDSLDLTTLSIKETHKDDGGQYGITVANVVGQKTASIEIVTLDKPDPPKGPVKFDDVSAESITLSWNPPLYTGGCQITNYIVQKRDTTTTVWDVVSATVARTTLKVTKLKTGTEYQFRIFAENRYGQSFALESDPIVAQYPYKEPGPPGTPFATAISKDSMVIQWHEPVNNGGSPVIGYHLERKERNSILWTKVNKTIIHDTQFKAQNLEEGIEYEFRVYAENIVGVGKASKNSECYVARDPCDPPGTPEPIMVKRNEITLQWTKPVYDGGSMITGYIVEKRDLPDGRWMKASFTNVIETQFTVSGLTEDQRYEFRVIAKNAAGAISKPSDSTGPITAKDEVELPRISMDPKFRDTIVVNAGETFRLEADVHGKPLPTIEWLRGDKEIEESARCEIKNTDFKALLIVKDAIRIDGGQYILRASNVAGSKSFPVNVKVLDRPGPPEGPVQVTGVTSEKCSLTWSPPLQDGGSDISHYVVEKRETSRLAWTVVASEVVTNSLKVTKLLEGNEYVFRIMAVNKYGVGEPLESAPVLMKNPFVLPGPPKSLEVTNIAKDSMTVCWNRPDSDGGSEIIGYIVEKRDRSGIRWIKCNKRRITDLRLRVTGLTEDHEYEFRVSAENAAGVGEPSPATVYYKACDPVFKPGPPTNAHIVDTTKNSITLAWGKPIYDGGSEILGYVVEICKADEEEWQIVTPQTGLRVTRFEISKLTEHQEYKIRVCALNKVGLGEATSVPGTVKPEDKLEAPELDLDSELRKGIVVRAGGSARIHIPFKGRPTPEITWSREEGEFTDKVQIEKGVNYTQLSIDNCDRNDAGKYILKLENSSGSKSAFVTVKVLDTPGPPQNLAVKEVRKDSAFLVWEPPIIDGGAKVKNYVIDKRESTRKAYANVSSKCSKTSFKVENLTEGAIYYFRVMAENEFGVGVPVETVDAVKAAEPPSPPGKVTLTDVSQTSASLMWEKPEHDGGSRVLGYVVEMQPKGTEKWSIVAESKVCNAVVTGLSSGQEYQFRVKAYNEKGKSDPRVLGVPVIAKDLTIQPSLKLPFNTYSIQAGEDLKIEIPVIGRPRPNISWVKDGEPLKQTTRVNVEETATSTVLHIKEGNKDDFGKYTVTATNSAGTATENLSVIVLEKPGPPVGPVRFDEVSADFVVISWEPPAYTGGCQISNYIVEKRDTTTTTWHMVSATVARTTIKITKLKTGTEYQFRIFAENRYGKSAPLDSKAVIVQYPFKEPGPPGTPFVTSISKDQMLVQWHEPVNDGGTKIIGYHLEQKEKNSILWVKLNKTPIQDTKFKTTGLDEGLEYEFKVSAENIVGIGKPSKVSECFVARDPCDPPGRPEAIVITRNNVTLKWKKPAYDGGSKITGYIVEKKDLPDGRWMKASFTNVLETEFTVSGLVEDQRYEFRVIARNAAGNFSEPSDSSGAITARDEIDAPNASLDPKYKDVIVVHAGETFVLEADIRGKPIPDVVWSKDGKELEETAARMEIKSTIQKTTLVVKDCIRTDGGQYILKLSNVGGTKSIPITVKVLDRPGPPEGPLKVTGVTAEKCYLAWNPPLQDGGANISHYIIEKRETSRLSWTQVSTEVQALNYKVTKLLPGNEYIFRVMAVNKYGIGEPLESGPVTACNPYKPPGPPSTPEVSAITKDSMVVTWARPVDDGGTEIEGYILEKRDKEGVRWTKCNKKTLTDLRLRVTGLTEGHSYEFRVAAENAAGVGEPSEPSVFYRACDALYPPGPPSNPKVTDTSRSSVSLAWSKPIYDGGAPVKGYVVEVKEAAADEWTTCTPPTGLQGKQFTVTKLKENTEYNFRICAINSEGVGEPATLPGSVVAQERIEPPEIELDADLRKVVVLRASATLRLFVTIKGRPEPEVKWEKAEGILTDRAQIEVTSSFTMLVIDNVTRFDSGRYNLTLENNSGSKTAFVNVRVLDSPSAPVNLTIREVKKDSVTLSWEPPLIDGGAKITNYIVEKRETTRKAYATITNNCTKTTFRIENLQEGCSYYFRVLASNEYGIGLPAETTEPVKVSEPPLPPGRVTLVDVTRNTATIKWEKPESDGGSKITGYVVEMQTKGSEKWSTCTQVKTLEATISGLTAGEEYVFRVAAVNEKGRSDPRQLGVPVIARDIEIKPSVELPFHTFNVKAREQLKIDVPFKGRPQATVNWRKDGQTLKETTRVNVSSSKTVTSLSIKEASKEDVGTYELCVSNSAGSITVPITIIVLDRPGPPGPIRIDEVSCDSITISWNPPEYDGGCQISNYIVEKKETTSTTWHIVSQAVARTSIKIVRLTTGSEYQFRVCAENRYGKSSYSESSAVVAEYPFSPPGPPGTPKVVHATKSTMLVTWQVPVNDGGSRVIGYHLEYKERSSILWSKANKILIADTQMKVSGLDEGLMYEYRVYAENIAGIGKCSKSCEPVPARDPCDPPGQPEVTNITRKSVSLKWSKPHYDGGAKITGYIVERRELPDGRWLKCNYTNIQETYFEVTELTEDQRYEFRVFARNAADSVSEPSESTGPIIVKDDVEPPRVMMDVKFRDVIVVKAGEVLKINADIAGRPLPVISWAKDGIEIEERARTEIISTDNHTLLTVKDCIRRDTGQYVLTLKNVAGTRSVAVNCKVLDKPGPPAGPLEINGLTAEKCSLSWGRPQEDGGADIDYYIVEKRETSHLAWTICEGELQMTSCKVTKLLKGNEYIFRVTGVNKYGVGEPLESVAIKALDPFTVPSPPTSLEITSVTKESMTLCWSRPESDGGSEISGYIIERREKNSLRWVRVNKKPVYDLRVKSTGLREGCEYEYRVYAENAAGLSLPSETSPLIRAEDPVFLPSPPSKPKIVDSGKTTITIAWVKPLFDGGAPITGYTVEYKKSDDTDWKTSIQSLRGTEYTISGLTTGAEYVFRVKSVNKVGASDPSDSSDPQIAKEREEEPLFDIDSEMRKTLIVKAGASFTMTVPFRGRPVPNVLWSKPDTDLRTRAYVDTTDSRTSLTIENANRNDSGKYTLTIQNVLSAASLTLVVKVLDTPGPPTNITVQDVTKESAVLSWDVPENDGGAPVKNYHIEKREASKKAWVSVTNNCNRLSYKVTNLQEGAIYYFRVSGENEFGVGIPAETKEGVKITEKPSPPEKLGVTSISKDSVSLTWLKPEHDGGSRIVHYVVEALEKGQKNWVKCAVAKSTHHVVSGLRENSEYFFRVFAENQAGLSDPRELLLPVLIKEQLEPPEIDMKNFPSHTVYVRAGSNLKVDIPISGKPLPKVTLSRDGVPLKATMRFNTEITAENLTINLKESVTADAGRYEITAANSSGTTKAFINIVVLDRPGPPTGPVVISDITEESVTLKWEPPKYDGGSQVTNYILLKRETSTAVWTEVSATVARTMMKVMKLTTGEEYQFRIKAENRFGISDHIDSACVTVKLPYTTPGPPSTPWVTNVTRESITVGWHEPVSNGGSAVVGYHLEMKDRNSILWQKANKLVIRTTHFKVTTISAGLIYEFRVYAENAAGVGKPSHPSEPVLAIDACEPPRNVRITDISKNSVSLSWQQPAFDGGSKITGYIVERRDLPDGRWTKASFTNVTETQFIISGLTQNSQYEFRVFARNAVGSISNPSEVVGPITCIDSYGGPVIDLPLEYTEVVKYRAGTSVKLRAGISGKPAPTIEWYKDDKELQTNALVCVENTTDLASILIKDADRLNSGCYELKLRNAMGSASATIRVQILDKPGPPGGPIEFKTVTAEKITLLWRPPADDGGAKITHYIVEKRETSRVVWSMVSEHLEECIITTTKIIKGNEYIFRVRAVNKYGIGEPLESDSVVAKNAFVTPGPPGIPEVTKITKNSMTVVWSRPIADGGSDISGYFLEKRDKKSLGWFKVLKETIRDTRQKVTGLTENSDYQYRVCAVNAAGQGPFSEPSEFYKAADPIDPPGPPAKIRIADSTKSSITLGWSKPVYDGGSAVTGYVVEIRQGEEEEWTTVSTKGEVRTTEYVVSNLKPGVNYYFRVSAVNCAGQGEPIEMNEPVQAKDILEAPEIDLDVALRTSVIAKAGEDVQVLIPFKGRPPPTVTWRKDEKNLGSDARYSIENTDSSSLLTIPQVTRNDTGKYILTIENGVGEPKSSTVSVKVLDTPAACQKLQVKHVSRGTVTLLWDPPLIDGGSPIINYVIEKRDATKRTWSVVSHKCSSTSFKLIDLSEKTPFFFRVLAENEIGIGEPCETTEPVKAAEVPAPIRDLSMKDSTKTSVILSWTKPDFDGGSVITEYVVERKGKGEQTWSHAGISKTCEIEVSQLKEQSVLEFRVFAKNEKGLSDPVTIGPITVKELIITPEVDLSDIPGAQVTVRIGHNVHLELPYKGKPKPSISWLKDGLPLKESEFVRFSKTENKITLSIKNAKKEHGGKYTVILDNAVCRIAVPITVITLGPPSKPKGPIRFDEIKADSVILSWDVPEDNGGGEITCYSIEKRETSQTNWKMVCSSVARTTFKVPNLVKDAEYQFRVRAENRYGVSQPLVSSIIVAKHQFRIPGPPGKPVIYNVTSDGMSLTWDAPVYDGGSEVTGFHVEKKERNSILWQKVNTSPISGREYRATGLVEGLDYQFRVYAENSAGLSSPSDPSKFTLAVSPVDPPGTPDYIDVTRETITLKWNPPLRDGGSKIVGYSIEKRQGNERWVRCNFTDVSECQYTVTGLSPGDRYEFRIIARNAVGTISPPSQSSGIIMTRDENVPPIVEFGPEYFDGLIIKSGESLRIKALVQGRPVPRVTWFKDGVEIEKRMNMEITDVLGSTSLFVRDATRDHRGVYTVEAKNASGSAKAEIKVKVQDTPGKVVGPIRFTNITGEKMTLWWDAPLNDGCAPITHYIIEKRETSRLAWALIEDKCEAQSYTAIKLINGNEYQFRVSAVNKFGVGRPLDSDPVVAQIQYTVPDAPGIPEPSNITGNSITLTWARPESDGGSEIQQYILERREKKSTRWVKVISKRPISETRFKVTGLTEGNEYEFHVMAENAAGVGPASGISRLIKCREPVNPPGPPTVVKVTDTSKTTVSLEWSKPVFDGGMEIIGYIIEMCKADLGDWHKVNAEACVKTRYTVTDLQAGEEYKFRVSAINGAGKGDSCEVTGTIKAVDRLTAPELDIDANFKQTHVVRAGASIRLFIAYQGRPTPTAVWSKPDSNLSLRADIHTTDSFSTLTVENCNRNDAGKYTLTVENNSGSKSITFTVKVLDTPGPPGPITFKDVTRGSATLMWDAPLLDGGARIHHYVVEKREASRRSWQVISEKCTRQIFKVNDLAEGVPYYFRVSAVNEYGVGEPYEMPEPIVATEQPAPPRRLDVVDTSKSSAVLAWLKPDHDGGSRITGYLLEMRQKGSDFWVEAGHTKQLTFTVERLVEKTEYEFRVKAKNDAGYSEPREAFSSVIIKEPQIEPTADLTGITNQLITCKAGSPFTIDVPISGRPAPKVTWKLEEMRLKETDRVSITTTKDRTTLTVKDSMRGDSGRYFLTLENTAGVKTFSVTVVVIGRPGPVTGPIEVSSVSAESCVLSWGEPKDGGGTEITNYIVEKRESGTTAWQLVNSSVKRTQIKVTHLTKYMEYSFRVSSENRFGVSKPLESAPIIAEHPFVPPSAPTRPEVYHVSANAMSIRWEEPYHDGGSKIIGYWVEKKERNTILWVKENKVPCLECNYKVTGLVEGLEYQFRTYALNAAGVSKASEASRPIMAQNPVDAPGRPEVTDVTRSTVSLIWSAPAYDGGSKVVGYIIERKPVSEVGDGRWLKCNYTIVSDNFFTVTALSEGDTYEFRVLAKNAAGVISKGSESTGPVTCRDEYAPPKAELDARLHGDLVTIRAGSDLVLDAAVGGKPEPKIIWTKGDKELDLCEKVSLQYTGKRATAVIKFCDRSDSGKYTLTVKNASGTKAVSVMVKVLDSPGPCGKLTVSRVTQEKCTLAWSLPQEDGGAEITHYIVERRETSRLNWVIVEGECPTLSYVVTRLIKNNEYIFRVRAVNKYGPGVPVESEPIVARNSFTIPSPPGIPEEVGTGKEHIIIQWTKPESDGGNEISNYLVDKREKKSLRWTRVNKDYVVYDTRLKVTSLMEGCDYQFRVTAVNAAGNSEPSEASNFISCREPSYTPGPPSAPRVVDTTKHSISLAWTKPMYDGGTDIVGYVLEMQEKDTDQWYRVHTNATIRNTEFTVPDLKMGQKYSFRVAAVNVKGMSEYSESIAEIEPVERIEIPDLELADDLKKTVTIRAGASLRLMVSVSGRPPPVITWSKQGIDLASRAIIDTTESYSLLIVDKVNRYDAGKYTIEAENQSGKKSATVLVKVYDTPGPCPSVKVKEVSRDSVTITWEIPTIDGGAPVNNYIVEKREAAMRAFKTVTTKCSKTLYRISGLVEGTMYYFRVLPENIYGIGEPCETSDAVLVSEVPLVPAKLEVVDVTKSTVTLAWEKPLYDGGSRLTGYVLEACKAGTERWMKVVTLKPTVLEHTVTSLNEGEQYLFRIRAQNEKGVSEPRETVTAVTVQDLRVLPTIDLSTMPQKTIHVPAGRPVELVIPIAGRPPPAASWFFAGSKLRESERVTVETHTKVAKLTIRETTIRDTGEYTLELKNVTGTTSETIKVIILDKPGPPTGPIKIDEIDATSITISWEPPELDGGAPLSGYVVEQRDAHRPGWLPVSESVTRSTFKFTRLTEGNEYVFRVAATNRFGIGSYLQSEVIECRSSIRIPGPPETLQIFDVSRDGMTLTWYPPEDDGGSQVTGYIVERKEVRADRWVRVNKVPVTMTRYRSTGLTEGLEYEHRVTAINARGSGKPSRPSKPIVAMDPIAPPGKPQNPRVTDTTRTSVSLAWSVPEDEGGSKVTGYLIEMQKVDQHEWTKCNTTPTKIREYTLTHLPQGAEYRFRVLACNAGGPGEPAEVPGTVKVTEMLEYPDYELDERYQEGIFVRQGGVIRLTIPIKGKPFPICKWTKEGQDISKRAMIATSETHTELVIKEADRGDSGTYDLVLENKCGKKAVYIKVRVIGSPNSPEGPLEYDDIQVRSVRVSWRPPADDGGADILGYILERREVPKAAWYTIDSRVRGTSLVVKGLKENVEYHFRVSAENQFGISKPLKSEEPVTPKTPLNPPEPPSNPPEVLDVTKSSVSLSWSRPKDDGGSRVTGYYIERKETSTDKWVRHNKTQITTTMYTVTGLVPDAEYQFRIIAQNDVGLSETSPASEPVVCKDPFDKPSQPGELEILSISKDSVTLQWEKPECDGGKEILGYWVEYRQSGDSAWKKSNKERIKDKQFTIGGLLEATEYEFRVFAENETGLSRPRRTAMSIKTKLTSGEAPGIRKEMKDVTTKLGEAAQLSCQIVGRPLPDIKWYRFGKELIQSRKYKMSSDGRTHTLTVMTEEQEDEGVYTCIATNEVGEVETSSKLLLQATPQFHPGYPLKEKYYGAVGSTLRLHVMYIGRPVPAMTWFHGQKLLQNSENITIENTEHYTHLVMKNVQRKTHAGKYKVQLSNVFGTVDAILDVEIQDKPDKPTGPIVIEALLKNSAVISWKPPADDGGSWITNYVVEKCEAKEGAEWQLVSSAISVTTCRIVNLTENAGYYFRVSAQNTFGISDPLEVSSVVIIKSPFEKPGAPGKPTITAVTKDSCVVAWKPPASDGGAKIRNYYLEKREKKQNKWISVTTEEIRETVFSVKNLIEGLEYEFRVKCENLGGESEWSEISEPITPKSDVPIQAPHFKEELRNLNVRYQSNATLVCKVTGHPKPIVKWYRQGKEIIADGLKYRIQEFKGGYHQLIIASVTDDDATVYQVRATNQGGSVSGTASLEVEVPAKIHLPKTLEGMGAVHALRGEVVSIKIPFSGKPDPVITWQKGQDLIDNNGHYQVIVTRSFTSLVFPNGVERKDAGFYVVCAKNRFGIDQKTVELDVADVPDPPRGVKVSDVSRDSVNLTWTEPASDGGSKITNYIVEKCATTAERWLRVGQARETRYTVINLFGKTSYQFRVIAENKFGLSKPSEPSEPTITKEDKTRAMNYDEEVDETREVSMTKASHSSTKELYEKYMIAEDLGRGEFGIVHRCVETSSKKTYMAKFVKVKGTDQVLVKKEISILNIARHRNILHLHESFESMEELVMIFEFISGLDIFERINTSAFELNEREIVSYVHQVCEALQFLHSHNIGHFDIRPENIIYQTRRSSTIKIIEFGQARQLKPGDNFRLLFTAPEYYAPEVHQHDVVSTATDMWSLGTLVYVLLSGINPFLAETNQQIIENIMNAEYTFDEEAFKEISIEAMDFVDRLLVKERKSRMTASEALQHPWLKQKIERVSTKVIRTLKHRRYYHTLIKKDLNMVVSAARISCGGAIRSQKGVSVAKVKVASIEIGPVSGQIMHAVGEEGGHVKYVCKIENYDQSTQVTWYFGVRQLENSEKYEITYEDGVAILYVKDITKLDDGTYRCKVVNDYGEDSSYAELFVKGVREVYDYYCRRTMKKIKRRTDTMRLLERPPEFTLPLYNKTAYVGENVRFGVTITVHPEPHVTWYKSGQKIKPGDNDKKYTFESDKGLYQLTINSVTTDDDAEYTVVARNKYGEDSCKAKLTVTLHPPPTDSTLRPMFKRLLANAECQEGQSVCFEIRVSGIPPPTLKWEKDGQPLSLGPNIEIIHEGLDYYALHIRDTLPEDTGYYRVTATNTAGSTSCQAHLQVERLRYKKQEFKSKEEHERHVQKQIDKTLRMAEILSGTESVPLTQVAKEALREAAVLYKPAVSTKTVKGEFRLEIEEKKEERKLRMPYDVPEPRKYKQTTIEEDQRIKQFVPMSDMKWYKKIRDQYEMPGKLDRVVQKRPKRIRLSRWEQFYVMPLPRITDQYRPKWRIPKLSQDDLEIVRPARRRTPSPDYDFYYRPRRRSLGDISDEELLLPIDDYLAMKRTEEERLRLEEELELGFSASPPSRSPPHFELSSLRYSSPQAHVKVEETRKDFRYSTYHIPTKAEASTSYAELRERHAQAAYRQPKQRQRIMAEREDEELLRPVTTTQHLSEYKSELDFMSKEEKSRKKSRRQREVTEITEIEEEYEISKHAQRESSSSASRLLRRRRSLSPTYIELMRPVSELIRSRPQPAEEYEDDTERRSPTPERTRPRSPSPVSSERSLSRFERSARFDIFSRYESMKAALKTQKTSERKYEVLSQQPFTLDHAPRITLRMRSHRVPCGQNTRFILNVQSKPTAEVKWYHNGVELQESSKIHYTNTSGVLTLEILDCHTDDSGTYRAVCTNYKGEASDYATLDVTGGDYTTYASQRRDEEVPRSVFPELTRTEAYAVSSFKKTSEMEASSSVREVKSQMTETRESLSSYEHSASAEMKSAALEEKSLEEKSTTRKIKTTLAARILTKPRSMTVYEGESARFSCDTDGEPVPTVTWLRKGQVLSTSARHQVTTTKYKSTFEISSVQASDEGNYSVVVENSEGKQEAEFTLTIQKARVTEKAVTSPPRVKSPEPRVKSPEAVKSPKRVKSPEPSHPKAVSPTETKPTPTEKVQHLPVSAPPKITQFLKAEASKEIAKLTCVVESSVLRAKEVTWYKDGKKLKENGHFQFHYSADGTYELKINNLTESDQGEYVCEISGEGGTSKTNLQFMGQAFKSIHEKVSKISETKKSDQKTTESTVTRKTEPKAPEPISSKPVIVTGLQDTTVSSDSVAKFAVKATGEPRPTAIWTKDGKAITQGGKYKLSEDKGGFFLEIHKTDTSDSGLYTCTVKNSAGSVSSSCKLTIKAIKDTEAQKVSTQKTSEITPQKKAVVQEEISQKALRSEEIKMSEAKSQEKLALKEEASKVLISEEVKKSAATSLEKSIVHEEITKTSQASEEVRTHAEIKAFSTQMSINEGQRLVLKANIAGATDVKWVLNGVELTNSEEYRYGVSGSDQTLTIKQASHRDEGILTCISKTKEGIVKCQYDLTLSKELSDAPAFISQPRSQNINEGQNVLFTCEISGEPSPEIEWFKNNLPISISSNVSISRSRNVYSLEIRNASVSDSGKYTIKAKNFRGQCSATASLMVLPLVEEPSREVVLRTSGDTSLQGSFSSQSVQMSASKQEASFSSFSSSSASSMTEMKFASMSAQSMSSMQESFVEMSSSSFMGISNMTQLESSTSKMLKAGIRGIPPKIEALPSDISIDEGKVLTVACAFTGEPTPEVTWSCGGRKIHSQEQGRFHIENTDDLTTLIIMDVQKQDGGLYTLSLGNEFGSDSATVNIHIRSI

SEQ ID NO: 7375 - protein, 27118 aa, Homo sapiens
MTTQAPTFTQPLQSVVVLEGSTATFEAHISGFPVPEVSWFRDGQVISTSTLPGVQISFSDGRAKLTIPAVTKANSGRYSLKATNGSGQATSTAELLVKAETAPPNFVQRLQSMTVRQGSQVRLQVRVTGIPTPVVKFYRDGAEIQSSLDFQISQEGDLYSLLIAEAYPEDSGTYSVNATNSVGRATSTAELLVQGEEEVPAKKTKTIVSTAQISESRQTRIEKKIEAHFDARSIATVEMVIDGAAGQQLPHKTPPRIPPKPKSRSPTPPSIAAKAQLARQQSPSPIRHSPSPVRHVRAPTPSPVRSVSPAARISTSPIRSVRSPLLMRKTQASTVATGPEVPPPWKQEGYVASSSEAEMRETTLTTSTQIRTEERWEGRYGVQEQVTISGAAGAAASVSASASYAAEAVATGAKEVKQDADKSAAVATVVAAVDMARVREPVISAVEQTAQRTTTTAVHIQPAQEQVRKEAEKTAVTKVVVAADKAKEQELKSRTKEVITTKQEQMHVTHEQIRKETEKTFVPKVVISAAKAKEQETRISEEITKKQKQVTQEAIMKETRKTVVPKVIVATPKVKEQDLVSRGREGITTKREQVQITQEKMRKEAEKTALSTIAVATAKAKEQETILRTRETMATRQEQIQVTHGKVDVGKKAEAVATVVAAVDQARVREPREPGHLEESYAQQTTLEYGYKERISAAKVAEPPQRPASEPHVVPKAVKPRVIQAPSETHIKTTDQKGMHISSQIKKTTDLTTERLVHVDKRPRTASPHFTVSKISVPKTEHGYEASIAGSAIATLQKELSATSSAQKITKSVKAPTVKPSETRVRAEPTPLPQFPFADTPDTYKSEAGVEVKKEVGVSITGTTVREERFEVLHGREAKVTETARVPAPVEIPVTPPTLVSGLKNVTVIEGESVTLECHISGYPSPTVTWYREDYQIESSIDFQITFQSGIARLMIREAFAEDSGRFTCSAVNEAGTVSTSCYLAVQVSEEFEKETTAVTEKFTTEEKRFVESRDVVMTDTSLTEEQAGPGEPAAPYFITKPVVQKLVEGGSVVFGCQVGGNPKPHVYWKKSGVPLTTGYRYKVSYNKQTGECKLVISMTFADDAGEYTIVVRNKHGETSASASLLEEADYELLMKSQQEMLYQTQVTAFVQEPKVGETAPGFVYSEYEKEYEKEQALIRKKMAKDTVVVRTYVEDQEFHISSFEERLIKEIEYRIIKTTLEELLEEDGEEKMAVDISESEAVESGFDSRIKNYRILEGMGVTFHCKMSGYPLPKIAWYKDGKRIKHGERYQMDFLQDGRASLRIPVVLPEDEGIYTAFASNIKGNAICSGKLYVEPAAPLGAPTYIPTLEPVSRIRSLSPRSVSRSPIRMSPARMSPARMSPARMSPARMSPGRRLEETDESQLERLYKPVFVLKPVSFKCLEGQTARFDLKVVGRPMPETFWFHDGQQIVNDYTHKVVIKEDGTQSLIIVPATPSDSGEWTVVAQNRAGRSSISVILTVEAVEHQVKPMFVEKLKNVNIKEGSRLEMKVRATGNPNPDIVWLKNSDIIVPHKYPKIRIEGTKGEAALKIDSTVSQDSAWYTATAINKAGRDTTRCKVNVEVEFAEPEPERKLIIPRGTYRAKEIAAPELEPLHLRYGQEQWEEGDLYDKEKQQKPFFKKKLTSLRLKRFGPAHFECRLTPIGDPTMVVEWLHDGKPLEAANRLRMINEFGYCSLDYGVAYSRDSGIITCRATNKYGTDHTSATLIVKDEKSLVEESQLPEGRKGLQRIEELERMAHEGALTGVTTDQKEKQKPDIVLYPEPVRVLEGETARFRCRVTGYPQPKVNWYLNGQLIRKSKRFRVRYDGIHYLDIVDCKSYDTGEVKVTAENPEGVIEHKVKLEIQQREDFRSVLRRAPEPRPEFHVHEPGKLQFEVQKVDRPVDTTETKEVVKLKRAERITHEKVPEESEELRSKFKRRTEEGYYEAITAVELKSRKKDESYEELLRKTKDELLHWTKELTEEEKKALAEEGKITIPTFKPDKIELSPSMEAPKIFERIQSQTVGQGSDAHFRVRVVGKPDPECEWYKNGVKIERSDRIYWYWPEDNVCELVIRDVTAEDSASIMVKAINIAGETSSHAFLLVQAKQLITFTQELQDVVAKEKDTMATFECETSEPFVKVKWYKDGMEVHEGDKYRMHSDRKVHFLSILTIDTSDAEDYSCVLVEDENVKTTAKLIVEGAVVEFVKELQDIEVPESYSGELECIVSPENIEGKWYHNDVELKSNGKYTITSRRGRQNLTVKDVTKEDQGEYSFVIDGKKTTCKLKMKPRPIAILQGLSDQKVCEGDIVQLEVKVSLESVEGVWMKDGQEVQPSDRVHIVIDKQSHMLLIEDMTKEDAGNYSFTIPALGLSTSGRVSVYSVDVITPLKDVNVIEGTKAVLECKVSVPDVTSVKWYLNDEQIKPDDRVQAIVKGTKQRLVINRTHASDEGPYKLIVGRVETNCNLSVEKIKIIRGLRDLTCTETQNVVFEVELSHSGIDVLWNFKDKEIKPSSKYKIEAHGKIYKLTVLNMMKDDEGKYTFYAGENMTSGKLTVAGGAISKPLTDQTVAESQEAVFECEVANPDSKGEWLRDGKHLPLTNNIRSESDGHKRRLIIAATKLDDIGEYTYKVATSKTSAKLKVEAVKIKKTLKNLTVTETQDAVFTVELTHPNVKGVQWIKNGVVLESNEKYAISVKGTIYSLRIKNCAIVDESVYGFRLGRLGASARLHVETVKIIKKPKDVTALENATVAFEVSVSHDTVPVKWFHKSVEIKPSDKHRLVSERKVHKLMLQNISPSDAGEYTAVVGQLECKAKLFVETLHITKTMKNIEVPETKTASFECEVSHFNVPSMWLKNGVEIEMSEKFKIVVQGKLHQLIIMNTSTEDSAEYTFVCGNDQVSATLTVTPIMITSMLKDINAEEKDTITFEVTVNYEGISYKWLKNGVEIKSTDKCQMRTKKLTHSLNIRNVHFGDAADYTFVAGKATSTATLYVEARHIEFRKHIKDIKVLEKKRAMFECEVSEPDITVQWMKDDQELQITDRIKIQKEKYVHRLLIPSTRMSDAGKYTVVAGGNVSTAKLFVEGRDVRIRSIKKEVQVIEKQRAVVEFEVNEDDVDAHWYKDGIEINFQVQERHKYVVERRIHRMFISETRQSDAGEYTFVAGRNRSSVTLYVNAPEPPQVLQELQPVTVQSGKPARFCAVISGRPQPKISWYKEEQLLSTGFKCKFLHDGQEYTLLLIEAFPEDAAVYTCEAKNDYGVATTSASLSVEVPEVVSPDQEMPVYPPAIITPLQDTVTSEGQPARFQCRVSGTDLKVSWYSKDKKIKPSRFFRMTQFEDTYQLEIAEAYPEDEGTYTFVASNAVGQVSSTANLSLEVQALDRQSSGKDVRESAKSQAVADSSFTKEESKISQKEIKSFQGSSYEYEVQVFESVSQSSIHTAASVQDTQLCHTASLSQIAESTELSKECAKESTGEAPKIFLHLQDVTVKCGDTAQFLCVLKDDSFIDVTWTHEGAKIEESERLKQSQNGNIQFLTICNVQLVDQGLYSCIVHNDCGERTTSAVLSVEGAPESILHERIEQEIEMEMKEFSSSFLSAEEEGLHSAELQLSKINETLELLSESPVYPTKFDSEKEGTGPIFIKEVSNADISMGDVATLSVTVIGIPKPKIQWFFNGVLLTPSADYKFVFDGDDHSLIILFTKLEDEGEYTCMASNDYGKTICSAYLKINSKGEGHKDTETESAVAKSLEKLGGPCPPHFLKELKPIRCAQGLPAIFEYTVVGEPAPTVTWFKENKQLCTSVYYTIIHNPNGSGTFIVNDPQREDSGLYICKAENMLGESTCAAELLVLLEDTDMTDTPCKAKSTPEAPEDFPQTPLKGPAVEALDSEQEIATFVKDTILKAALITEENQQLSYEHIAKANELSSQLPLGAQELQSILEQDKLTPESTREFLCINGSIHFQPLKEPSPNLQLQIVQSQKTFSKEGILMPEEPETQAVLSDTEKIFPSAMSIEQINSLTVEPLKTLLAEPEGNYPQSSIEPPMHSYLTSVAEEVLSPKEKTVSDTNREQRVTLQKQEAQSALILSQSLAEGHVESLQSPDVMISQVNYEPLVPSEHSCTEGGKILIESANPLENAGQDSAVRIEEGKSLRFPLALEEKQVLLKEEHSDNVVMPPDQIIESKREPVAIKKVQEVQGRDLLSKESLLSGIPEEQRLNLKIQICRALQAAVASEQPGLFSEWLRNIEKVEVEAVNITQEPRHIMCMYLVTSAKSVTEEVTIIIEDVDPQMANLKMELRDALCAIIYEEIDILTAEGPRIQQGAKTSLQEEMDSFSGSQKVEPITEPEVESKYLISTEEVSYFNVQSRVKYLDATPVTKGVASAVVSDEKQDESLKPSEEKEESSSESGTEEVATVKIQEAEGGLIKEDGPMIHTPLVDTVSEEGDIVHLTTSITNAKEVNWYFENKLVPSDEKFKCLQDQNTYTLVIDKVNTEDHQGEYVCEALNDSGKTATSAKLTVVKRAAPVIKRKIEPLEVALGHLAKFTCEIQSAPNVRFQWFKAGREIYESDKCSIRSSKYISSLEILRTQVVDCGEYTCKASNEYGSVSCTATLTVTVPGGEKKVRKLLPERKPEPKEEVVLKSVLRKRPEEEEPKVEPKKLEKVKKPAVPEPPPPKPVEEVEVPTVTKRERKIPEPTKVPEIKPAIPLPAPEPKPKPEAEVKTIKPPPVEPEPTPIAAPVTVPVVGKKAEAKAPKEEAAKPKGPIKGVPKKTPSPIEAERRKLRPGSGGEKPPDEAPFTYQLKAVPLKFVKEIKDIILTESEFVGSSAIFECLVSPSTAITTWMKDGSNIRESPKHRFIADGKDRKLHIIDVQLSDAGEYTCVLRLGNKEKTSTAKLVVEELPVRFVKTLEEEVTVVKGQPLYLSCELNKERDVVWRKDGKIVVEKPGRIVPGVIGLMRALTINDADDTDAGTYTVTVENANNLECSSCVKVVEVIRDWLVKPIRDQHVKPKGTAIFACDIAKDTPNIKWFKGYDEIPAEPNDKTEILRDGNHLYLKIKNAMPEDIAEYAVEIEGKRYPAKLTLGEREVELLKPIEDVTIYEKESASFDAEISEADIPGQWKLKGELLRPSPTCEIKAEGGKRFLTLHKVKLDQAGEVLYQALNAITTAILTVKEIELDFAVPLKDVTVPERRQARFECVLTREANVIWSKGPDIIKSSDKFDIIADGKKHILVINDSQFDDEGVYTAEVEGKKTSARLFVTGIRLKFMSPLEDQTVKEGETATFVCELSHEKMHVVWFKNDAKLHTSRTVLISSEGKTHKLEMKEVTLDDISQIKAQVKELSSTAQLKVLEADPYFTVKLHDKTAVEKDEITLKCEVSKDVPVKWFKDGEEIVPSPKYSIKADGLRRILKIKKADLKDKGEYVCDCGTDKTKANVTVEARLIKVEKPLYGVEVFVGETAHFEIELSEPDVHGQWKLKGQPLTASPDCEIIEDGKKHILILHNCQLGMTGEVSFQAANAKSAANLKVKELPLIFITPLSDVKVFEKDEAKFECEVSREPKTFRWLKGTQEITGDDRFELIKDGTKHSMVIKSAAFEDEAKYMFEAEDKHTSGKLIIEGIRLKFLTPLKDVTAKEKESAVFTVELSHDNIRVKWFKNDQRLHTTRSVSMQDEGKTHSITFKDLSIDDTSQIRVEAMGMSSEAKLTVLEGDPYFTGKLQDYTGVEKDEVILQCEISKADAPVKWFKDGKEIKPSKNAVIKADGKKRMLILKKALKSDIGQYTCDCGTDKTSGKLDIEDREIKLVRPLHSVEVMETETARFETEISEDDIHANWKLKGEALLQTPDCEIKEEGKIHSLVLHNCRLDQTGGVDFQAANVKSSAHLRVKPRVIGLLRPLKDVTVTAGETATFDCELSYEDIPVEWYLKGKKLEPSDKVVPRSEGKVHTLTLRDVKLEDAGEVQLTAKDFKTHANLFVKEPPVEFTKPLEDQTVEEGATAVLECEVSRENAKVKWFKNGTEILKSKKYEIVADGRVRKLVIHDCTPEDIKTYTCDAKDFKTSCNLNVVPPHVEFLRPLTDLQVREKEMARFECELSRENAKVKWFKDGAEIKKGKKYDIISKGAVRILVINKCLLDDEAEYSCEVRTARTSGMLTVLEEEAVFTKNLANIEVSETDTIKLVCEVSKPGAEVIWYKGDEEIIETGRYEILTEGRKRILVIQNAHLEDAGNYNCRLPSSRTDGKVKVHELAAEFISKPQNLEILEGEKAEFVCSISKESFPVQWKRDDKTLESGDKYDVIADGKKRVLVVKDATLQDMGTYVVMVGAARAAAHLTVIEKLRIVVPLKDTRVKEQQEVVFNCEVNTEGAKAKWFRNEEAIFDSSKYIILQKDLVYTLRIRDAHLDDQANYNVSLTNHRGENVKSAANLIVEEEDLRIVEPLKDIETMEKKSVTFWCKVNRLNVTLKWTKNGEEVPFDNRVSYRVDKYKHMLTIKDCGFPDEGEYIVTAGQDKSVAELLIIEAPTEFVEHLEDQTVTEFDDAVFSCQLSREKANVKWYRNGREIKEGKKYKFEKDGSIHRLIIKDCRLDDECEYACGVEDRKSRARLFVEEIPVEIIRPPQDILEAPGADVVFLAELNKDKVEVQWLRNNMVVVQGDKHQMMSEGKIHRLQICDIKPRDQGEYRFIAKDKEARAKLELAAAPKIKTADQDLVVDVGKPLTMVVPYDAYPKAEAEWFKENEPLSTKTIDTTAEQTSFRILEAKKGDKGRYKIVLQNKHGKAEGFINLKVIDVPGPVRNLEVTETFDGEVSLAWEEPLTDGGSKIIGYVVERRDIKRKTWVLATDRAESCEFTVTGLQKGGVEYLFRVSARNRVGTGEPVETDNPVEARSKYDVPGPPLNVTITDVNRFGVSLTWEPPEYDGGAEITNYVIELRDKTSIRWDTAMTVRAEDLSATVTDVVEGQEYSFRVRAQNRIGVGKPSAATPFVKVADPIERPSPPVNLTSSDQTQSSVQLKWEPPLKDGGSPILGYIIERCEEGKDNWIRCNMKLVPELTYKVTGLEKGNKYLYRVSAENKAGVSDPSEILGPLTADDAFVEPTMDLSAFKDGLEVIVPNPITILVPSTGYPRPTATWCFGDKVLETGDRVKMKTLSAYAELVISPSERSDKGIYTLKLENRVKTISGEIDVNVIARPSAPKELKFGDITKDSVHLTWEPPDDDGGSPLTGYVVEKREVSRKTWTKVMDFVTDLEFTVPDLVQGKEYLFKVCARNKCGPGEPAYVDEPVNMSTPATVPDPPENVKWRDRTANSIFLTWDPPKNDGGSRIKGYIVERCPRGSDKWVACGEPVAETKMEVTGLEEGKWYAYRVKALNRQGASKPSRPTEEIQAVDTQEAPEIFLDVKLLAGLTVKAGTKIELPATVTGKPEPKITWTKADMILKQDKRITIENVPKKSTVTIVDSKRSDTGTYIIEAVNVCGRATAVVEVNVLDKPGPPAAFDITDVTNESCLLTWNPPRDDGGSKITNYVVERRATDSEVWHKLSSTVKDTNFKATKLIPNKEYIFRVAAENMYGVGEPVQASPITAKYQFDPPGPPTRLEPSDITKDAVTLTWCEPDDDGGSPITGYWVERLDPDTDKWVRCNKMPVKDTTYRVKGLTNKKKYRFRVLAENLAGPGKPSKSTEPILIKDPIDPPWPPGKPTVKDVGKTSVRLNWTKPEHDGGAKIESYVIEMLKTGTDEWVRVAEGVPTTQHLLPGLMEGQEYSFRVRAVNKAGESEPSEPSDPVLCREKLYPPSPPRWLEVINITKNTADLKWTVPEKDGGSPITNYIVEKRDVRRKGWQTVDTTVKDTKCTVTPLTEGSLYVFRVAAENAIGQSDYTEIEDSVLAKDTFTTPGPPYALAVVDVTKRHVDLKWEPPKNDGGRPIQRYVIEKKERLGTRWVKAGKTAGPDCNFRVTDVIEGTEVQFQVRAENEAGVGHPSEPTEILSIEDPTSPPSPPLDLHVTDAGRKHIAIAWKPPEKNGGSPIIGYHVEMCPVGTEKWMRVNSRPIKDLKFKVEEGVVPDKEYVLRVRAVNAIGVSEPSEISENVVAKDPDCKPTIDLETHDIIVIEGEKLSIPVPFRAVPVPTVSWHKDGKEVKASDRLTMKNDHISAHLEVPKSVRADAGIYTITLENKLGSATASINVKVIGLPGPCKDIKASDITKSSCKLTWEPPEFDGGTPILHYVLERREAGRRTYIPVMSGENKLSWTVKDLIPNGEYFFRVKAVNKVGGGEYIELKNPVIAQDPKQPPDPPVDVEVHNPTAEAMTITWKPPLYDGGSKIMGYIIEKIAKGEERWKRCNEHLVPILTYTAKGLEEGKEYQFRVRAENAAGISEPSRATPPTKAVDPIDAPKVILRTSLEVKRGDEIALDASISGSPYPTITWIKDENVIVPEEIKKRAAPLVRRRKGEVQEEEPFVLPLTQRLSIDNSKKGESQLRVRDSLRPDHGLYMIKVENDHGIAKAPCTVSVLDTPGPPINFVFEDIRKTSVLCKWEPPLDDGGSEIINYTLEKKDKTKPDSEWIVVTSTLRHCKYSVTKLIEGKEYLFRVRAENRFGPGPPCVSKPLVAKDPFGPPDAPDKPIVEDVTSNSMLVKWNEPKDNGSPILGYWLEKREVNSTHWSRVNKSLLNALKANVDGLLEGLTYVFRVCAENAAGPGKFSPPSDPKTAHDPISPPGPPIPRVTDTSSTTIELEWEPPAFNGGGEIVGYFVDKQLVGTNEWSRCTEKMIKVRQYTVKEIREGADYKLRVSAVNAAGEGPPGETQPVTVAEPQEPPAVELDVSVKGGIQIMAGKTLRIPAVVTGRPVPTKVWTKEEGELDKDRVVIDNVGTKSELIIKDALRKDHGRYVITATNSCGSKFAAARVEVFDVPGPVLDLKPVVTNRKMCLLNWSDPEDDGGSEITGFIIERKDAKMHTWRQPIETERSKCDITGLLEGQEYKFRVIAKNKFGCGPPVEIGPILAVDPLGPPTSPERLTYTERTKSTITLDWKEPRSNGGSPIQGYIIEKRRHDKPDFERVNKRLCPTTSFLVENLDEHQMYEFRVKAVNEIGESEPSLPLNVVIQDDEVPPTIKLRLSVRGDTIKVKAGEPVHIPADVTGLPMPKIEWSKNETVIEKPTDALQITKEEVSRSEAKTELSIPKAVREDKGTYTVTASNRLGSVFRNVHVEVYDRPSPPRNLAVTDIKAESCYLTWDAPLDNGGSEITHYVIDKRDASRKKAEWEEVTNTAVEKRYGIWKLIPNGQYEFRVRAVNKYGISDECKSDKVVIQDPYRLPGPPGKPKVLARTKGSMLVSWTPPLDNGGSPITGYWLEKREEGSPYWSRVSRAPITKVGLKGVEFNVPRLLEGVKYQFRAMAINAAGIGPPSEPSDPEVAGDPIFPPGPPSCPEVKDKTKSSISLGWKPPAKDGGSPIKGYIVEMQEEGTTDWKRVNEPDKLITTCECVVPNLKELRKYRFRVKAVNEAGESEPSDTTGEIPATDIQEEPEVFIDIGAQDCLVCKAGSQIRIPAVIKGRPTPKSSWEFDGKAKKAMKDGVHDIPEDAQLETAENSSVIIIPECKRSHTGKYSITAKNKAGQKTANCRVKVMDVPGPPKDLKVSDITRGSCRLSWKMPDDDGGDRIKGYVIEKRTIDGKAWTKVNPDCGSTTFVVPDLLSEQQYFFRVRAENRFGIGPPVETIQRTTARDPIYPPDPPIKLKIGLITKNTVHLSWKPPKNDGGSPVTHYIVECLAWDPTGTKKEAWRQCNKRDVEELQFTVEDLVEGGEYEFRVKAVNAAGVSKPSATVGPVTVKDQTCPPSIDLKEFMEVEEGTNVNIVAKIKGVPFPTLTWFKAPPKKPDNKEPVLYDTHVNKLVVDDTCTLVIPQSRRSDTGLYTITAVNNLGTASKEMRLNVLGRPGPPVGPIKFESVSADQMTLSWFPPKDDGGSKITNYVIEKREANRKTWVHVSSEPKECTYTIPKLLEGHEYVFRIMAQNKYGIGEPLDSEPETARNLFSVPGAPDKPTVSSVTRNSMTVNWEEPEYDGGSPVTGYWLEMKDTTSKRWKRVNRDPIKAMTLGVSYKVTGLIEGSDYQFRVYAINAAGVGPASLPSDPATARDPIAPPGPPFPKVTDWTKSSADLEWSPPLKDGGSKVTGYIVEYKEEGKEEWEKGKDKEVRGTKLVVTGLKEGAFYKFRVRAVNIAGIGEPGEVTDVIEMKDRLVSPDLQLDASVRDRIVVHAGGVIRIIAYVSGKPPPTVTWNMNERTLPQEATIETTAISSSMVIKNCQRSHQGVYSLLAKNEAGERKKTIIVDVLDVPGPVGTPFLAHNLTNESCKLTWFSPEDDGGSPITNYVIEKRESDRRAWTPVTYTVTRQNATVQGLIQGKAYFFRIAAENSIGMGPFVETSEALVIREPITVPERPEDLEVKEVTKNTVTLTWNPPKYDGGSEIINYVLESRLIGTEKFHKVTNDNLLSRKYTVKGLKEGDTYEYRVSAVNIVGQGKPSFCTKPITCKDELAPPTLHLDFRDKLTIRVGEAFALTGRYSGKPKPKVSWFKDEADVLEDDRTHIKTTPATLALEKIKAKRSDSGKYCVVVENSTGSRKGFCQVNVVDRPGPPVGPVSFDEVTKDYMVISWKPPLDDGGSKITNYIIEKKEVGKDVWMPVTSASAKTTCKVSKLLEGKDYIFRIHAENLYGISDPLVSDSMKAKDRFRVPDAPDQPIVTEVTKDSALVTWNKPHDGGKPITNYILEKRETMSKRWARVTKDPIHPYTKFRVPDLLEGCQYEFRVSAENEIGIGDPSPPSKPVFAKDPIAKPSPPVNPEAIDTTCNSVDLTWQPPRHDGGSKILGYIVEYQKVGDEEWRRANHTPESCPETKYKVTGLRDGQTYKFRVLAVNAAGESDPAHVPEPVLVKDRLEPPELILDANMAREQHIKVGDTLRLSAIIKGVPFPKVTWKKEDRDAPTKARIDVTPVGSKLEIRNAAHEDGGIYSLTVENPAGSKTVSVKVLVLDKPGPPRDLEVSEIRKDSCYLTWKEPLDDGGSVITNYVVERRDVASAQWSPLSATSKKKSHFAKHLNEGNQYLFRVAAENQYGRGPFVETPKPIKALDPLHPPGPPKDLHHVDVDKTEVSLVWNKPDRDGGSPITGYLVEYQEEGTQDWIKFKTVTNLECVVTGLQQGKTYRFRVKAENIVGLGLPDTTIPIECQEKLVPPSVELDVKLIEGLVVKAGTTVRFPAIIRGVPVPTAKWTTDGSEIKTDEHYTVETDNFSSVLTIKNCLRRDTGEYQITVSNAAGSKTVAVHLTVLDVPGPPTGPINILDVTPEHMTISWQPPKDDGGSPVINYIVEKQDTRKDTWGVVSSGSSKTKLKIPHLQKGCEYVFRVRAENKIGVGPPLDSTPTVAKHKFSPPSPPGKPVVTDITENAATVSWTLPKSDGGSPITGYYMERREVTGKWVRVNKTPIADLKFRVTGLYEGNTYEFRVFAENLAGLSKPSPSSDPIKACRPIKPPGPPINPKLKDKSRETADLVWTKPLSDGGSPILGYVVECQKPGTAQWNRINKDELIRQCAFRVPGLIEGNEYRFRIKAANIVGEGEPRELAESVIAKDILHPPEVELDVTCRDVITVRVGQTIRILARVKGRPEPDITWTKEGKVLVREKRVDLIQDLPRVELQIKEAVRADHGKYIISAKNSSGHAQGSAIVNVLDRPGPCQNLKVTNVTKENCTISWENPLDNGGSEITNFIVEYRKPNQKGWSIVASDVTKRLIKANLLANNEYYFRVCAENKVGVGPTIETKTPILAINPIDRPGEPENLHIADKGKTFVYLKWRRPDYDGGSPNLSYHVERRLKGSDDWERVHKGSIKETHYMVDRCVENQIYEFRVQTKNEGGESDWVKTEEVVVKEDLQKPVLDLKLSGVLTVKAGDTIRLEAGVRGKPFPEVAWTKDKDATDLTRSPRVKIDTRADSSKFSLTKAKRSDGGKYVVTATNTAGSFVAYATVNVLDKPGPVRNLKIVDVSSDRCTVCWDPPEDDGGCEIQNYILEKCETKRMVWSTYSATVLTPGTTVTRLIEGNEYIFRVRAENKIGTGPPTESKPVIAKTKYDKPGRPDPPEVTKVSKEEMTVVWNPPEYDGGKSITGYFLEKKEKHSTRWVPVNKSAIPERRMKVQNLLPDHEYQFRVKAENEIGIGEPSLPSRPVVAKDPIEPPGPPTNFRVVDTTKHSITLGWGKPVYDGGAPIIGYVVEMRPKIADASPDEGWKRCNAAAQLVRKEFTVTSLDENQEYEFRVCAQNQVGIGRPAELKEAIKPKEILEPPEIDLDASMRKLVIVRAGCPIRLFAIVRGRPAPKVTWRKVGIDNVVRKGQVDLVDTMAFLVIPNSTRDDSGKYSLTLVNPAGEKAVFVNVRVLDTPGPVSDLKVSDVTKTSCHVSWAPPENDGGSQVTHYIVEKREADRKTWSTVTPEVKKTSFHVTNLVPGNEYYFRVTAVNEYGPGVPTDVPKPVLASDPLSEPDPPRKLEVTEMTKNSATLAWLPPLRDGGAKIDGYITSYREEEQPADRWTEYSVVKDLSLVVTGLKEGKKYKFRVAARNAVGVSLPREAEGVYEAKEQLLPPKILMPEQITIKAGKKLRIEAHVYGKPHPTCKWKKGEDEVVTSSHLAVHKADSSSILIIKDVTRKDSGYYSLTAENSSGTDTQKIKVVVMDAPGPPQPPFDISDIDADACSLSWHIPLEDGGSNITNYIVEKCDVSRGDWVTALASVTKTSCRVGKLIPGQEYIFRVRAENRFGISEPLTSPKMVAQFPFGVPSEPKNARVTKVNKDCIFVAWDRPDSDGGSPIIGYLIERKERNSLLWVKANDTLVRSTEYPCAGLVEGLEYSFRIYALNKAGSSPPSKPTEYVTARMPVDPPGKPEVIDVTKSTVSLIWARPKHDGGSKIIGYFVEACKLPGDKWVRCNTAPHQIPQEEYTATGLEEKAQYQFRAIARTAVNISPPSEPSDPVTILAENVPPRIDLSVAMKSLLTVKAGTNVCLDATVFGKPMPTVSWKKDGTLLKPAEGIKMAMQRNLCTLELFSVNRKDSGDYTITAENSSGSKSATIKLKVLDKPGPPASVKINKMYSDRAMLSWEPPLEDGGSEITNYIVDKRETSRPNWAQVSATVPITSCSVEKLIEGHEYQFRICAENKYGVGDPVFTEPAIAKNPYDPPGRCDPPVISNITKDHMTVSWKPPADDGGSPITGYLLEKRETQAVNWTKVNRKPIIERTLKATGLQEGTEYEFRVTAINKAGPGKPSDASKAAYARDPQYPPGPPAFPKVYDTTRSSVSLSWGKPAYDGGSPIIGYLVEVKRADSDNWVRCNLPQNLQKTRFEVTGLMEDTQYQFRVYAVNKIGYSDPSDVPDKHYPKDILIPPEGELDADLRKTLILRAGVTMRLYVPVKGRPPPKITWSKPNVNLRDRIGLDIKSTDFDTFLRCENVNKYDAGKYILTLENSCGKKEYTIVVKVLDTPGPPVNVTVKEISKDSAYVTWEPPIIDGGSPIINYVVQKRDAERKSWSTVTTECSKTSFRVANLEEGKSYFFRVFAENEYGIGDPGETRDAVKASQTPGPVVDLKVRSVSKSSCSIGWKKPHSDGGSRIIGYVVDFLTEENKWQRVMKSLSLQYSAKDLTEGKEYTFRVSAENENGEGTPSEITVVARDDVVAPDLDLKGLPDLCYLAKENSNFRLKIPIKGKPAPSVSWKKGEDPLATDTRVSVESSAVNTTLIVYDCQKSDAGKYTITLKNVAGTKEGTISIKVVGKPGIPTGPIKFDEVTAEAMTLKWAPPKDDGGSEITNYILEKRDSVNNKWVTCASAVQKTTFRVTRLHEGMEYTFRVSAENKYGVGEGLKSEPIVARHPFDVPDAPPPPNIVDVRHDSVSLTWTDPKKTGGSPITGYHLEFKERNSLLWKRANKTPIRMRDFKVTGLTEGLEYEFRVMAINLAGVGKPSLPSEPVVALDPIDPPGKPEVINITRNSVTLIWTEPKYDGGHKLTGYIVEKRDLPSKSWMKANHVNVPECAFTVTDLVEGGKYEFRIRAKNTAGAISAPSESTETIICKDEYEAPTIVLDPTIKDGLTIKAGDTIVLNAISILGKPLPKSSWSKAGKDIRPSDITQITSTPTSSMLTIKYATRKDAGEYTITATNPFGTKVEHVKVTVLDVPGPPGPVEISNVSAEKATLTWTPPLEDGGSPIKSYILEKRETSRLLWTVVSEDIQSCRHVATKLIQGNEYIFRVSAVNHYGKGEPVQSEPVKMVDRFGPPGPPEKPEVSNVTKNTATVSWKRPVDDGGSEITGYHVERREKKSLRWVRAIKTPVSDLRCKVTGLQEGSTYEFRVSAENRAGIGPPSEASDSVLMKDAAYPPGPPSNPHVTDTTKKSASLAWGKPHYDGGLEITGYVVEHQKVGDEAWIKDTTGTALRITQFVVPDLQTKEKYNFRISAINDAGVGEPAVIPDVEIVEREMAPDFELDAELRRTLVVRAGLSIRIFVPIKGRPAPEVTWTKDNINLKNRANIENTESFTLLIIPECNRYDTGKFVMTIENPAGKKSGFVNVRVLDTPGPVLNLRPTDITKDSVTLHWDLPLIDGGSRITNYIVEKREATRKSYSTATTKCHKCTYKVTGLSEGCEYFFRVMAENEYGIGEPTETTEPVKASEAPSPPDSLNIMDITKSTVSLAWPKPKHDGGSKITGYVIEAQRKGSDQWTHITTVKGLECVVRNLTEGEEYTFQVMAVNSAGRSAPRESRPVIVKEQTMLPELDLRGIYQKLVIAKAGDNIKVEIPVLGRPKPTVTWKKGDQILKQTQRVNFETTATSTILNINECVRSDSGPYPLTARNIVGEVGDVITIQVHDIPGPPTGPIKFDEVSSDFVTFSWDPPENDGGVPISNYVVEMRQTDSTTWVELATTVIRTTYKATRLTTGLEYQFRVKAQNRYGVGPGITSACIVANYPFKVPGPPGTPQVTAVTKDSMTISWHEPLSDGGSPILGYHVERKERNGILWQTVSKALVPGNIFKSSGLTDGIAYEFRVIAENMAGKSKPSKPSEPMLALDPIDPPGKPVPLNITRHTVTLKWAKPEYTGGFKITSYIVEKRDLPNGRWLKANFSNILENEFTVSGLTEDAAYEFRVIAKNAAGAISPPSEPSDAITCRDDVEAPKIKVDVKFKDTVILKAGEAFRLEADVSGRPPPTMEWSKDGKELEGTAKLEIKIADFSTNLVNKDSTRRDSGAYTLTATNPGGFAKHIFNVKVLDRPGPPEGPLAVTEVTSEKCVLSWFPPLDDGGAKIDHYIVQKRETSRLAWTNVASEVQVTKLKVTKLLKGNEYIFRVMAVNKYGVGEPLESEPVLAVNPYGPPDPPKNPEVTTITKDSMVVCWGHPDSDGGSEIINYIVERRDKAGQRWIKCNKKTLTDLRYKVSGLTEGHEYEFRIMAENAAGISAPSPTSPFYKACDTVFKPGPPGNPRVLDTSRSSISIAWNKPIYDGGSEITGYMVEIALPEEDEWQIVTPPAGLKATSYTITGLTENQEYKIRIYAMNSEGLGEPALVPGTPKAEDRMLPPEIELDADLRKVVTIRACCTLRLFVPIKGRPAPEVKWARDHGESLDKASIESTSSYTLLIVGNVNRFDSGKYILTVENSSGSKSAFVNVRVLDTPGPPQDLKVKEVTKTSVTLTWDPPLLDGGSKIKNYIVEKRESTRKAYSTVATNCHKTSWKVDQLQEGCSYYFRVLAENEYGIGLPAETAESVKASERPLPPGKITLMDVTRNSVSLSWEKPEHDGGSRILGYIVEMQTKGSDKWATCATVKVTEATITGLIQGEEYSFRVSAQNEKGISDPRQLSVPVIAKDLVIPPAFKLLFNTFTVLAGEDLKVDVPFIGRPTPAVTWHKDNVPLKQTTRVNAESTENNSLLTIKDACREDVGHYVVKLTNSAGEAIETLNVIVLDKPGPPTGPVKMDEVTADSITLSWGPPKYDGGSSINNYIVEKRDTSTTTWQIVSATVARTTIKACRLKTGCEYQFRIAAENRYGKSTYLNSEPTVAQYPFKVPGPPGTPVVTLSSRDSMEVQWNEPISDGGSRVIGYHLERKERNSILWVKLNKTPIPQTKFKTTGLEEGVEYEFRVSAENIVGIGKPSKVSECYVARDPCDPPGRPEAIIVTRNSVTLQWKKPTYDGGSKITGYIVEKKELPEGRWMKASFTNIIDTHFEVTGLVEDHRYEFRVIARNAAGVFSEPSESTGAITARDEVDPPRISMDPKYKDTIVVHAGESFKVDADIYGKPIPTIQWIKGDQELSNTARLEIKSTDFATSLSVKDAVRVDSGNYILKAKNVAGERSVTVNVKVLDRPGPPEGPVVISGVTAEKCTLAWKPPLQDGGSDIINYIVERRETSRLVWTVVDANVQTLSCKVTKLLEGNEYTFRIMAVNKYGVGEPLESEPVVAKNPFVVPDAPKAPEVTTVTKDSMIVVWERPASDGGSEILGYVLEKRDKEGIRWTRCHKRLIGELRLRVTGLIENHDYEFRVSAENAAGLSEPSPPSAYQKACDPIYKPGPPNNPKVIDITRSSVFLSWSKPIYDGGCEIQGYIVEKCDVSVGEWTMCTPPTGINKTNIEVEKLLEKHEYNFRICAINKAGVGEHADVPGPIIVEEKLEAPDIDLDLELRKIINIRAGGSLRLFVPIKGRPTPEVKWGKVDGEIRDAAIIDVTSSFTSLVLDNVNRYDSGKYTLTLENSSGTKSAFVTVRVLDTPSPPVNLKVTEITKDSVSITWEPPLLDGGSKIKNYIVEKREATRKSYAAVVTNCHKNSWKIDQLQEGCSYYFRVTAENEYGIGLPAQTADPIKVAEVPQPPGKITVDDVTRNSVSLSWTKPEHDGGSKIIQYIVEMQAKHSEKWSECARVKSLQAVITNLTQGEEYLFRVVAVNEKGRSDPRSLAVPIVAKDLVIEPDVKPAFSSYSVQVGQDLKIEVPISGRPKPTITWTKDGLPLKQTTRINVTDSLDLTTLSIKETHKDDGGQYGITVANVVGQKTASIEIVTLDKPDPPKGPVKFDDVSAESITLSWNPPLYTGGCQITNYIVQKRDTTTTVWDVVSATVARTTLKVTKLKTGTEYQFRIFAENRYGQSFALESDPIVAQYPYKEPGPPGTPFATAISKDSMVIQWHEPVNNGGSPVIGYHLERKERNSILWTKVNKTIIHDTQFKAQNLEEGIEYEFRVYAENIVGVGKASKNSECYVARDPCDPPGTPEPIMVKRNEITLQWTKPVYDGGSMITGYIVEKRDLPDGRWMKASFTNVIETQFTVSGLTEDQRYEFRVIAKNAAGAISKPSDSTGPITAKDEVELPRISMDPKFRDTIVVNAGETFRLEADVHGKPLPTIEWLRGDKEIEESARCEIKNTDFKALLIVKDAIRIDGGQYILRASNVAGSKSFPVNVKVLDRPGPPEGPVQVTGVTSEKCSLTWSPPLQDGGSDISHYVVEKRETSRLAWTVVASEVVTNSLKVTKLLEGNEYVFRIMAVNKYGVGEPLESAPVLMKNPFVLPGPPKSLEVTNIAKDSMTVCWNRPDSDGGSEIIGYIVEKRDRSGIRWIKCNKRRITDLRLRVTGLTEDHEYEFRVSAENAAGVGEPSPATVYYKACDPVFKPGPPTNAHIVDTTKNSITLAWGKPIYDGGSEILGYVVEICKADEEEWQIVTPQTGLRVTRFEISKLTEHQEYKIRVCALNKVGLGEATSVPGTVKPEDKLEAPELDLDSELRKGIVVRAGGSARIHIPFKGRPTPEITWSREEGEFTDKVQIEKGVNYTQLSIDNCDRNDAGKYILKLENSSGSKSAFVTVKVLDTPGPPQNLAVKEVRKDSAFLVWEPPIIDGGAKVKNYVIDKRESTRKAYANVSSKCSKTSFKVENLTEGAIYYFRVMAENEFGVGVPVETVDAVKAAEPPSPPGKVTLTDVSQTSASLMWEKPEHDGGSRVLGYVVEMQPKGTEKWSIVAESKVCNAVVTGLSSGQEYQFRVKAYNEKGKSDPRVLGVPVIAKDLTIQPSLKLPFNTYSIQAGEDLKIEIPVIGRPRPNISWVKDGEPLKQTTRVNVEETATSTVLHIKEGNKDDFGKYTVTATNSAGTATENLSVIVLEKPGPPVGPVRFDEVSADFVVISWEPPAYTGGCQISNYIVEKRDTTTTTWHMVSATVARTTIKITKLKTGTEYQFRIFAENRYGKSAPLDSKAVIVQYPFKEPGPPGTPFVTSISKDQMLVQWHEPVNDGGTKIIGYHLEQKEKNSILWVKLNKTPIQDTKFKTTGLDEGLEYEFKVSAENIVGIGKPSKVSECFVARDPCDPPGRPEAIVITRNNVTLKWKKPAYDGGSKITGYIVEKKDLPDGRWMKASFTNVLETEFTVSGLVEDQRYEFRVIARNAAGNFSEPSDSSGAITARDEIDAPNASLDPKYKDVIVVHAGETFVLEADIRGKPIPDVVWSKDGKELEETAARMEIKSTIQKTTLVVKDCIRTDGGQYILKLSNVGGTKSIPITVKVLDRPGPPEGPLKVTGVTAEKCYLAWNPPLQDGGANISHYIIEKRETSRLSWTQVSTEVQALNYKVTKLLPGNEYIFRVMAVNKYGIGEPLESGPVTACNPYKPPGPPSTPEVSAITKDSMVVTWARPVDDGGTEIEGYILEKRDKEGVRWTKCNKKTLTDLRLRVTGLTEGHSYEFRVAAENAAGVGEPSEPSVFYRACDALYPPGPPSNPKVTDTSRSSVSLAWSKPIYDGGAPVKGYVVEVKEAAADEWTTCTPPTGLQGKQFTVTKLKENTEYNFRICAINSEGVGEPATLPGSVVAQERIEPPEIELDADLRKVVVLRASATLRLFVTIKGRPEPEVKWEKAEGILTDRAQIEVTSSFTMLVIDNVTRFDSGRYNLTLENNSGSKTAFVNVRVLDSPSAPVNLTIREVKKDSVTLSWEPPLIDGGAKITNYIVEKRETTRKAYATITNNCTKTTFRIENLQEGCSYYFRVLASNEYGIGLPAETTEPVKVSEPPLPPGRVTLVDVTRNTATIKWEKPESDGGSKITGYVVEMQTKGSEKWSTCTQVKTLEATISGLTAGEEYVFRVAAVNEKGRSDPRQLGVPVIARDIEIKPSVELPFHTFNVKAREQLKIDVPFKGRPQATVNWRKDGQTLKETTRVNVSSSKTVTSLSIKEASKEDVGTYELCVSNSAGSITVPITIIVLDRPGPPGPIRIDEVSCDSITISWNPPEYDGGCQISNYIVEKKETTSTTWHIVSQAVARTSIKIVRLTTGSEYQFRVCAENRYGKSSYSESSAVVAEYPFSPPGPPGTPKVVHATKSTMLVTWQVPVNDGGSRVIGYHLEYKERSSILWSKANKILIADTQMKVSGLDEGLMYEYRVYAENIAGIGKCSKSCEPVPARDPCDPPGQPEVTNITRKSVSLKWSKPHYDGGAKITGYIVERRELPDGRWLKCNYTNIQETYFEVTELTEDQRYEFRVFARNAADSVSEPSESTGPIIVKDDVEPPRVMMDVKFRDVIVVKAGEVLKINADIAGRPLPVISWAKDGIEIEERARTEIISTDNHTLLTVKDCIRRDTGQYVLTLKNVAGTRSVAVNCKVLDKPGPPAGPLEINGLTAEKCSLSWGRPQEDGGADIDYYIVEKRETSHLAWTICEGELQMTSCKVTKLLKGNEYIFRVTGVNKYGVGEPLESVAIKALDPFTVPSPPTSLEITSVTKESMTLCWSRPESDGGSEISGYIIERREKNSLRWVRVNKKPVYDLRVKSTGLREGCEYEYRVYAENAAGLSLPSETSPLIRAEDPVFLPSPPSKPKIVDSGKTTITIAWVKPLFDGGAPITGYTVEYKKSDDTDWKTSIQSLRGTEYTISGLTTGAEYVFRVKSVNKVGASDPSDSSDPQIAKEREEEPLFDIDSEMRKTLIVKAGASFTMTVPFRGRPVPNVLWSKPDTDLRTRAYVDTTDSRTSLTIENANRNDSGKYTLTIQNVLSAASLTLVVKVLDTPGPPTNITVQDVTKESAVLSWDVPENDGGAPVKNYHIEKREASKKAWVSVTNNCNRLSYKVTNLQEGAIYYFRVSGENEFGVGIPAETKEGVKITEKPSPPEKLGVTSISKDSVSLTWLKPEHDGGSRIVHYVVEALEKGQKNWVKCAVAKSTHHVVSGLRENSEYFFRVFAENQAGLSDPRELLLPVLIKEQLEPPEIDMKNFPSHTVYVRAGSNLKVDIPISGKPLPKVTLSRDGVPLKATMRFNTEITAENLTINLKESVTADAGRYEITAANSSGTTKAFINIVVLDRPGPPTGPVVISDITEESVTLKWEPPKYDGGSQVTNYILLKRETSTAVWTEVSATVARTMMKVMKLTTGEEYQFRIKAENRFGISDHIDSACVTVKLPYTTPGPPSTPWVTNVTRESITVGWHEPVSNGGSAVVGYHLEMKDRNSILWQKANKLVIRTTHFKVTTISAGLIYEFRVYAENAAGVGKPSHPSEPVLAIDACEPPRNVRITDISKNSVSLSWQQPAFDGGSKITGYIVERRDLPDGRWTKASFTNVTETQFIISGLTQNSQYEFRVFARNAVGSISNPSEVVGPITCIDSYGGPVIDLPLEYTEVVKYRAGTSVKLRAGISGKPAPTIEWYKDDKELQTNALVCVENTTDLASILIKDADRLNSGCYELKLRNAMGSASATIRVQILDKPGPPGGPIEFKTVTAEKITLLWRPPADDGGAKITHYIVEKRETSRVVWSMVSEHLEECIITTTKIIKGNEYIFRVRAVNKYGIGEPLESDSVVAKNAFVTPGPPGIPEVTKITKNSMTVVWSRPIADGGSDISGYFLEKRDKKSLGWFKVLKETIRDTRQKVTGLTENSDYQYRVCAVNAAGQGPFSEPSEFYKAADPIDPPGPPAKIRIADSTKSSITLGWSKPVYDGGSAVTGYVVEIRQGEEEEWTTVSTKGEVRTTEYVVSNLKPGVNYYFRVSAVNCAGQGEPIEMNEPVQAKDILEAPEIDLDVALRTSVIAKAGEDVQVLIPFKGRPPPTVTWRKDEKNLGSDARYSIENTDSSSLLTIPQVTRNDTGKYILTIENGVGEPKSSTVSVKVLDTPAACQKLQVKHVSRGTVTLLWDPPLIDGGSPIINYVIEKRDATKRTWSVVSHKCSSTSFKLIDLSEKTPFFFRVLAENEIGIGEPCETTEPVKAAEVPAPIRDLSMKDSTKTSVILSWTKPDFDGGSVITEYVVERKGKGEQTWSHAGISKTCEIEVSQLKEQSVLEFRVFAKNEKGLSDPVTIGPITVKELIITPEVDLSDIPGAQVTVRIGHNVHLELPYKGKPKPSISWLKDGLPLKESEFVRFSKTENKITLSIKNAKKEHGGKYTVILDNAVCRIAVPITVITLGPPSKPKGPIRFDEIKADSVILSWDVPEDNGGGEITCYSIEKRETSQTNWKMVCSSVARTTFKVPNLVKDAEYQFRVRAENRYGVSQPLVSSIIVAKHQFRIPGPPGKPVIYNVTSDGMSLTWDAPVYDGGSEVTGFHVEKKERNSILWQKVNTSPISGREYRATGLVEGLDYQFRVYAENSAGLSSPSDPSKFTLAVSPVDPPGTPDYIDVTRETITLKWNPPLRDGGSKIVGYSIEKRQGNERWVRCNFTDVSECQYTVTGLSPGDRYEFRIIARNAVGTISPPSQSSGIIMTRDENVPPIVEFGPEYFDGLIIKSGESLRIKALVQGRPVPRVTWFKDGVEIEKRMNMEITDVLGSTSLFVRDATRDHRGVYTVEAKNASGSAKAEIKVKVQDTPGKVVGPIRFTNITGEKMTLWWDAPLNDGCAPITHYIIEKRETSRLAWALIEDKCEAQSYTAIKLINGNEYQFRVSAVNKFGVGRPLDSDPVVAQIQYTVPDAPGIPEPSNITGNSITLTWARPESDGGSEIQQYILERREKKSTRWVKVISKRPISETRFKVTGLTEGNEYEFHVMAENAAGVGPASGISRLIKCREPVNPPGPPTVVKVTDTSKTTVSLEWSKPVFDGGMEIIGYIIEMCKADLGDWHKVNAEACVKTRYTVTDLQAGEEYKFRVSAINGAGKGDSCEVTGTIKAVDRLTAPELDIDANFKQTHVVRAGASIRLFIAYQGRPTPTAVWSKPDSNLSLRADIHTTDSFSTLTVENCNRNDAGKYTLTVENNSGSKSITFTVKVLDTPGPPGPITFKDVTRGSATLMWDAPLLDGGARIHHYVVEKREASRRSWQVISEKCTRQIFKVNDLAEGVPYYFRVSAVNEYGVGEPYEMPEPIVATEQPAPPRRLDVVDTSKSSAVLAWLKPDHDGGSRITGYLLEMRQKGSDFWVEAGHTKQLTFTVERLVEKTEYEFRVKAKNDAGYSEPREAFSSVIIKEPQIEPTADLTGITNQLITCKAGSPFTIDVPISGRPAPKVTWKLEEMRLKETDRVSITTTKDRTTLTVKDSMRGDSGRYFLTLENTAGVKTFSVTVVVIGRPGPVTGPIEVSSVSAESCVLSWGEPKDGGGTEITNYIVEKRESGTTAWQLVNSSVKRTQIKVTHLTKYMEYSFRVSSENRFGVSKPLESAPIIAEHPFVPPSAPTRPEVYHVSANAMSIRWEEPYHDGGSKIIGYWVEKKERNTILWVKENKVPCLECNYKVTGLVEGLEYQFRTYALNAAGVSKASEASRPIMAQNPVDAPGRPEVTDVTRSTVSLIWSAPAYDGGSKVVGYIIERKPVSEVGDGRWLKCNYTIVSDNFFTVTALSEGDTYEFRVLAKNAAGVISKGSESTGPVTCRDEYAPPKAELDARLHGDLVTIRAGSDLVLDAAVGGKPEPKIIWTKGDKELDLCEKVSLQYTGKRATAVIKFCDRSDSGKYTLTVKNASGTKAVSVMVKVLDSPGPCGKLTVSRVTQEKCTLAWSLPQEDGGAEITHYIVERRETSRLNWVIVEGECPTLSYVVTRLIKNNEYIFRVRAVNKYGPGVPVESEPIVARNSFTIPSPPGIPEEVGTGKEHIIIQWTKPESDGGNEISNYLVDKREKKSLRWTRVNKDYVVYDTRLKVTSLMEGCDYQFRVTAVNAAGNSEPSEASNFISCREPSYTPGPPSAPRVVDTTKHSISLAWTKPMYDGGTDIVGYVLEMQEKDTDQWYRVHTNATIRNTEFTVPDLKMGQKYSFRVAAVNVKGMSEYSESIAEIEPVERIEIPDLELADDLKKTVTIRAGASLRLMVSVSGRPPPVITWSKQGIDLASRAIIDTTESYSLLIVDKVNRYDAGKYTIEAENQSGKKSATVLVKVYDTPGPCPSVKVKEVSRDSVTITWEIPTIDGGAPVNNYIVEKREAAMRAFKTVTTKCSKTLYRISGLVEGTMYYFRVLPENIYGIGEPCETSDAVLVSEVPLVPAKLEVVDVTKSTVTLAWEKPLYDGGSRLTGYVLEACKAGTERWMKVVTLKPTVLEHTVTSLNEGEQYLFRIRAQNEKGVSEPRETVTAVTVQDLRVLPTIDLSTMPQKTIHVPAGRPVELVIPIAGRPPPAASWFFAGSKLRESERVTVETHTKVAKLTIRETTIRDTGEYTLELKNVTGTTSETIKVIILDKPGPPTGPIKIDEIDATSITISWEPPELDGGAPLSGYVVEQRDAHRPGWLPVSESVTRSTFKFTRLTEGNEYVFRVAATNRFGIGSYLQSEVIECRSSIRIPGPPETLQIFDVSRDGMTLTWYPPEDDGGSQVTGYIVERKEVRADRWVRVNKVPVTMTRYRSTGLTEGLEYEHRVTAINARGSGKPSRPSKPIVAMDPIAPPGKPQNPRVTDTTRTSVSLAWSVPEDEGGSKVTGYLIEMQKVDQHEWTKCNTTPTKIREYTLTHLPQGAEYRFRVLACNAGGPGEPAEVPGTVKVTEMLEYPDYELDERYQEGIFVRQGGVIRLTIPIKGKPFPICKWTKEGQDISKRAMIATSETHTELVIKEADRGDSGTYDLVLENKCGKKAVYIKVRVIGSPNSPEGPLEYDDIQVRSVRVSWRPPADDGGADILGYILERREVPKAAWYTIDSRVRGTSLVVKGLKENVEYHFRVSAENQFGISKPLKSEEPVTPKTPLNPPEPPSNPPEVLDVTKSSVSLSWSRPKDDGGSRVTGYYIERKETSTDKWVRHNKTQITTTMYTVTGLVPDAEYQFRIIAQNDVGLSETSPASEPVVCKDPFDKPSQPGELEILSISKDSVTLQWEKPECDGGKEILGYWVEYRQSGDSAWKKSNKERIKDKQFTIGGLLEATEYEFRVFAENETGLSRPRRTAMSIKTKLTSGEAPGIRKEMKDVTTKLGEAAQLSCQIVGRPLPDIKWYRFGKELIQSRKYKMSSDGRTHTLTVMTEEQEDEGVYTCIATNEVGEVETSSKLLLQATPQFHPGYPLKEKYYGAVGSTLRLHVMYIGRPVPAMTWFHGQKLLQNSENITIENTEHYTHLVMKNVQRKTHAGKYKVQLSNVFGTVDAILDVEIQDKPDKPTGPIVIEALLKNSAVISWKPPADDGGSWITNYVVEKCEAKEGAEWQLVSSAISVTTCRIVNLTENAGYYFRVSAQNTFGISDPLEVSSVVIIKSPFEKPGAPGKPTITAVTKDSCVVAWKPPASDGGAKIRNYYLEKREKKQNKWISVTTEEIRETVFSVKNLIEGLEYEFRVKCENLGGESEWSEISEPITPKSDVPIQAPHFKEELRNLNVRYQSNATLVCKVTGHPKPIVKWYRQGKEIIADGLKYRIQEFKGGYHQLIIASVTDDDATVYQVRATNQGGSVSGTASLEVEVPAKIHLPKTLEGMGAVHALRGEVVSIKIPFSGKPDPVITWQKGQDLIDNNGHYQVIVTRSFTSLVFPNGVERKDAGFYVVCAKNRFGIDQKTVELDVADVPDPPRGVKVSDVSRDSVNLTWTEPASDGGSKITNYIVEKCATTAERWLRVGQARETRYTVINLFGKTSYQFRVIAENKFGLSKPSEPSEPTITKEDKTRAMNYDEEVDETREVSMTKASHSSTKELYEKYMIAEDLGRGEFGIVHRCVETSSKKTYMAKFVKVKGTDQVLVKKEISILNIARHRNILHLHESFESMEELVMIFEFISGLDIFERINTSAFELNEREIVSYVHQVCEALQFLHSHNIGHFDIRPENIIYQTRRSSTIKIIEFGQARQLKPGDNFRLLFTAPEYYAPEVHQHDVVSTATDMWSLGTLVYVLLSGINPFLAETNQQIIENIMNAEYTFDEEAFKEISIEAMDFVDRLLVKERKSRMTASEALQHPWLKQKIERVSTKVIRTLKHRRYYHTLIKKDLNMVVSAARISCGGAIRSQKGVSVAKVKVASIEIGPVSGQIMHAVGEEGGHVKYVCKIENYDQSTQVTWYFGVRQLENSEKYEITYEDGVAILYVKDITKLDDGTYRCKVVNDYGEDSSYAELFVKGVREVYDYYCRRTMKKIKRRTDTMRLLERPPEFTLPLYNKTAYVGENVRFGVTITVHPEPHVTWYKSGQKIKPGDNDKKYTFESDKGLYQLTINSVTTDDDAEYTVVARNKYGEDSCKAKLTVTLHPPPTDSTLRPMFKRLLANAECQEGQSVCFEIRVSGIPPPTLKWEKDGQPLSLGPNIEIIHEGLDYYALHIRDTLPEDTGYYRVTATNTAGSTSCQAHLQVERLRYKKQEFKSKEEHERHVQKQIDKTLRMAEILSGTESVPLTQVAKEALREAAVLYKPAVSTKTVKGEFRLEIEEKKEERKLRMPYDVPEPRKYKQTTIEEDQRIKQFVPMSDMKWYKKIRDQYEMPGKLDRVVQKRPKRIRLSRWEQFYVMPLPRITDQYRPKWRIPKLSQDDLEIVRPARRRTPSPDYDFYYRPRRRSLGDISDEELLLPIDDYLAMKRTEEERLRLEEELELGFSASPPSRSPPHFELSSLRYSSPQAHVKVEETRKDFRYSTYHIPTKAEASTSYAELRERHAQAAYRQPKQRQRIMAEREDEELLRPVTTTQHLSEYKSELDFMSKEEKSRKKSRRQREVTEITEIEEEYEISKHAQRESSSSASRLLRRRRSLSPTYIELMRPVSELIRSRPQPAEEYEDDTERRSPTPERTRPRSPSPVSSERSLSRFERSARFDIFSRYESMKAALKTQKTSERKYEVLSQQPFTLDHAPRITLRMRSHRVPCGQNTRFILNVQSKPTAEVKWYHNGVELQESSKIHYTNTSGVLTLEILDCHTDDSGTYRAVCTNYKGEASDYATLDVTGGDYTTYASQRRDEEVPRSVFPELTRTEAYAVSSFKKTSEMEASSSVREVKSQMTETRESLSSYEHSASAEMKSAALEEKSLEEKSTTRKIKTTLAARILTKPRSMTVYEGESARFSCDTDGEPVPTVTWLRKGQVLSTSARHQVTTTKYKSTFEISSVQASDEGNYSVVVENSEGKQEAEFTLTIQKARVTEKAVTSPPRVKSPEPRVKSPEAVKSPKRVKSPEPSHPKAVSPTETKPTPTEKVQHLPVSAPPKITQFLKAEASKEIAKLTCVVESSVLRAKEVTWYKDGKKLKENGHFQFHYSADGTYELKINNLTESDQGEYVCEISGEGGTSKTNLQFMGQAFKSIHEKVSKISETKKSDQKTTESTVTRKTEPKAPEPISSKPVIVTGLQDTTVSSDSVAKFAVKATGEPRPTAIWTKDGKAITQGGKYKLSEDKGGFFLEIHKTDTSDSGLYTCTVKNSAGSVSSSCKLTIKAIKDTEAQKVSTQKTSEITPQKKAVVQEEISQKALRSEEIKMSEAKSQEKLALKEEASKVLISEEVKKSAATSLEKSIVHEEITKTSQASEEVRTHAEIKAFSTQMSINEGQRLVLKANIAGATDVKWVLNGVELTNSEEYRYGVSGSDQTLTIKQASHRDEGILTCISKTKEGIVKCQYDLTLSKELSDAPAFISQPRSQNINEGQNVLFTCEISGEPSPEIEWFKNNLPISISSNVSISRSRNVYSLEIRNASVSDSGKYTIKAKNFRGQCSATASLMVLPLVEEPSREVVLRTSGDTSLQGSFSSQSVQMSASKQEASFSSFSSSSASSMTEMKFASMSAQSMSSMQESFVEMSSSSFMGISNMTQLESSTSKMLKAGIRGIPPKIEALPSDISIDEGKVLTVACAFTGEPTPEVTWSCGGRKIHSQEQGRFHIENTDDLTTLIIMDVQKQDGGLYTLSLGNEFGSDSATVNIHIRSI

SEQ ID NO: 7376 - protein, 27051 aa, Homo sapiens
MTTQAPTFTQPLQSVVVLEGSTATFEAHISGFPVPEVSWFRDGQVISTSTLPGVQISFSDGRAKLTIPAVTKANSGRYSLKATNGSGQATSTAELLVKAETAPPNFVQRLQSMTVRQGSQVRLQVRVTGIPTPVVKFYRDGAEIQSSLDFQISQEGDLYSLLIAEAYPEDSGTYSVNATNSVGRATSTAELLVQGEEEVPAKKTKTIVSTAQISESRQTRIEKKIEAHFDARSIATVEMVIDGAAGQQLPHKTPPRIPPKPKSRSPTPPSIAAKAQLARQQSPSPIRHSPSPVRHVRAPTPSPVRSVSPAARISTSPIRSVRSPLLMRKTQASTVATGPEVPPPWKQEGYVASSSEAEMRETTLTTSTQIRTEERWEGRYGVQEQVTISGAAGAAASVSASASYAAEAVATGAKEVKQDADKSAAVATVVAAVDMARVREPVISAVEQTAQRTTTTAVHIQPAQEQVRKEAEKTAVTKVVVAADKAKEQELKSRTKEVITTKQEQMHVTHEQIRKETEKTFVPKVVISAAKAKEQETRISEEITKKQKQVTQEAIMKETRKTVVPKVIVATPKVKEQDLVSRGREGITTKREQVQITQEKMRKEAEKTALSTIAVATAKAKEQETILRTRETMATRQEQIQVTHGKVDVGKKAEAVATVVAAVDQARVREPREPGHLEESYAQQTTLEYGYKERISAAKVAEPPQRPASEPHVVPKAVKPRVIQAPSETHIKTTDQKGMHISSQIKKTTDLTTERLVHVDKRPRTASPHFTVSKISVPKTEHGYEASIAGSAIATLQKELSATSSAQKITKSVKAPTVKPSETRVRAEPTPLPQFPFADTPDTYKSEAGVEVKKEVGVSITGTTVREERFEVLHGREAKVTETARVPAPVEIPVTPPTLVSGLKNVTVIEGESVTLECHISGYPSPTVTWYREDYQIESSIDFQITFQSGIARLMIREAFAEDSGRFTCSAVNEAGTVSTSCYLAVQVSEEFEKETTAVTEKFTTEEKRFVESRDVVMTDTSLTEEQAGPGEPAAPYFITKPVVQKLVEGGSVVFGCQVGGNPKPHVYWKKSGVPLTTGYRYKVSYNKQTGECKLVISMTFADDAGEYTIVVRNKHGETSASASLLEEADYELLMKSQQEMLYQTQVTAFVQEPKVGETAPGFVYSEYEKEYEKEQALIRKKMAKDTVVVRTYVEDQEFHISSFEERLIKEIEYRIIKTTLEELLEEDGEEKMAVDISESEAVESGFDSRIKNYRILEGMGVTFHCKMSGYPLPKIAWYKDGKRIKHGERYQMDFLQDGRASLRIPVVLPEDEGIYTAFASNIKGNAICSGKLYVEPAAPLGAPTYIPTLEPVSRIRSLSPRSVSRSPIRMSPARMSPARMSPARMSPARMSPGRRLEETDESQLERLYKPVFVLKPVSFKCLEGQTARFDLKVVGRPMPETFWFHDGQQIVNDYTHKVVIKEDGTQSLIIVPATPSDSGEWTVVAQNRAGRSSISVILTVEAVEHQVKPMFVEKLKNVNIKEGSRLEMKVRATGNPNPDIVWLKNSDIIVPHKYPKIRIEGTKGEAALKIDSTVSQDSAWYTATAINKAGRDTTRCKVNVEVEFAEPEPERKLIIPRGTYRAKEIAAPELEPLHLRYGQEQWEEGDLYDKEKQQKPFFKKKLTSLRLKRFGPAHFECRLTPIGDPTMVVEWLHDGKPLEAANRLRMINEFGYCSLDYGVAYSRDSGIITCRATNKYGTDHTSATLIVKDEKSLVEESQLPEGRKGLQRIEELERMAHEGALTGVTTDQKEKQKPDIVLYPEPVRVLEGETARFRCRVTGYPQPKVNWYLNGQLIRKSKRFRVRYDGIHYLDIVDCKSYDTGEVKVTAENPEGVIEHKVKLEIQQREDFRSVLRRAPEPRPEFHVHEPGKLQFEVQKVDRPVDTTETKEVVKLKRAERITHEKVPEESEELRSKFKRRTEEGYYEAITAVELKSRKKDESYEELLRKTKDELLHWTKELTEEEKKALAEEGKITIPTFKPDKIELSPSMEAPKIFERIQSQTVGQGSDAHFRVRVVGKPDPECEWYKNGVKIERSDRIYWYWPEDNVCELVIRDVTAEDSASIMVKAINIAGETSSHAFLLVQAKQLITFTQELQDVVAKEKDTMATFECETSEPFVKVKWYKDGMEVHEGDKYRMHSDRKVHFLSILTIDTSDAEDYSCVLVEDENVKTTAKLIVEGAVVEFVKELQDIEVPESYSGELECIVSPENIEGKWYHNDVELKSNGKYTITSRRGRQNLTVKDVTKEDQGEYSFVIDGKKTTCKLKMKPRPIAILQGLSDQKVCEGDIVQLEVKVSLESVEGVWMKDGQEVQPSDRVHIVIDKQSHMLLIEDMTKEDAGNYSFTIPALGLSTSGRVSVYSVDVITPLKDVNVIEGTKAVLECKVSVPDVTSVKWYLNDEQIKPDDRVQAIVKGTKQRLVINRTHASDEGPYKLIVGRVETNCNLSVEKIKIIRGLRDLTCTETQNVVFEVELSHSGIDVLWNFKDKEIKPSSKYKIEAHGKIYKLTVLNMMKDDEGKYTFYAGENMTSGKLTVAGGAISKPLTDQTVAESQEAVFECEVANPDSKGEWLRDGKHLPLTNNIRSESDGHKRRLIIAATKLDDIGEYTYKVATSKTSAKLKVEAVKIKKTLKNLTVTETQDAVFTVELTHPNVKGVQWIKNGVVLESNEKYAISVKGTIYSLRIKNCAIVDESVYGFRLGRLGASARLHVETVKIIKKPKDVTALENATVAFEVSVSHDTVPVKWFHKSVEIKPSDKHRLVSERKVHKLMLQNISPSDAGEYTAVVGQLECKAKLFVETLHITKTMKNIEVPETKTASFECEVSHFNVPSMWLKNGVEIEMSEKFKIVVQGKLHQLIIMNTSTEDSAEYTFVCGNDQVSATLTVTPIMITSMLKDINAEEKDTITFEVTVNYEGISYKWLKNGVEIKSTDKCQMRTKKLTHSLNIRNVHFGDAADYTFVAGKATSTATLYVEARHIEFRKHIKDIKVLEKKRAMFECEVSEPDITVQWMKDDQELQITDRIKIQKEKYVHRLLIPSTRMSDAGKYTVVAGGNVSTAKLFVEGRDVRIRSIKKEVQVIEKQRAVVEFEVNEDDVDAHWYKDGIEINFQVQERHKYVVERRIHRMFISETRQSDAGEYTFVAGRNRSSVTLYVNAPEPPQVLQELQPVTVQSGKPARFCAVISGRPQPKISWYKEEQLLSTGFKCKFLHDGQEYTLLLIEAFPEDAAVYTCEAKNDYGVATTSASLSVEVPEVVSPDQEMPVYPPAIITPLQDTVTSEGQPARFQCRVSGTDLKVSWYSKDKKIKPSRFFRMTQFEDTYQLEIAEAYPEDEGTYTFVASNAVGQVSSTANLSLEGFSKFEENTSNSQWHVSLSVSFKKEPLGQKPSFIQPLSSLRVHNGETVRFHARVSGIPKPEIQWFHNQQLILPTKDVVFHFEESTGMALMLIVDAYSEHAGQYSCKAANSAGEATCAATLTVTPKAPESILHERIEQEIEMEMKEFSSSFLSAEEEGLHSAELQLSKINETLELLSESPVYPTKFDSEKEGTGPIFIKEVSNADISMGDVATLSVTVIGIPKPKIQWFFNGVLLTPSADYKFVFDGDDHSLIILFTKLEDEGEYTCMASNDYGKTICSAYLKINSKGEGHKDTETESAVAKSLEKLGGPCPPHFLKELKPIRCAQGLPAIFEYTVVGEPAPTVTWFKENKQLCTSVYYTIIHNPNGSGTFIVNDPQREDSGLYICKAENMLGESTCAAELLVLLEDTDMTDTPCKAKSTPEAPEDFPQTPLKGPAVEALDSEQEIATFVKDTILKAALITEENQQLSYEHIAKANELSSQLPLGAQELQSILEQDKLTPESTREFLCINGSIHFQPLKEPSPNLQLQIVQSQKTFSKEGILMPEEPETQAVLSDTEKIFPSAMSIEQINSLTVEPLKTLLAEPEGNYPQSSIEPPMHSYLTSVAEEVLSPKEKTVSDTNREQRVTLQKQEAQSALILSQSLAEGHVESLQSPDVMISQVNYEPLVPSEHSCTEGGKILIESANPLENAGQDSAVRIEEGKSLRFPLALEEKQVLLKEEHSDNVVMPPDQIIESKREPVAIKKVQEVQGRDLLSKESLLSGIPEEQRLNLKIQICRALQAAVASEQPGLFSEWLRNIEKVEVEAVNITQEPRHIMCMYLVTSAKSVTEEVTIIIEDVDPQMANLKMELRDALCAIIYEEIDILTAEGPRIQQGAKTSLQEEMDSFSGSQKVEPITEPEVESKYLISTEEVSYFNVQSRVKYLDATPVTKGVASAVVSDEKQDESLKPSEEKEESSSESGTEEVATVKIQEAEGGLIKEDGPMIHTPLVDTVSEEGDIVHLTTSITNAKEVNWYFENKLVPSDEKFKCLQDQNTYTLVIDKVNTEDHQGEYVCEALNDSGKTATSAKLTVVKRAAPVIKRKIEPLEVALGHLAKFTCEIQSAPNVRFQWFKAGREIYESDKCSIRSSKYISSLEILRTQVVDCGEYTCKASNEYGSVSCTATLTVTVPGGEKKVRKLLPERKPEPKEEVVLKSVLRKRPEEEEPKVEPKKLEKVKKPAVPEPPPPKPVEEVEVPTVTKRERKIPEPTKVPEIKPAIPLPAPEPKPKPEAEVKTIKPPPVEPEPTPIAAPVTVPVVGKKAEAKAPKEEAAKPKGPIKGVPKKTPSPIEAERRKLRPGSGGEKPPDEAPFTYQLKAVPLKFVKEIKDIILTESEFVGSSAIFECLVSPSTAITTWMKDGSNIRESPKHRFIADGKDRKLHIIDVQLSDAGEYTCVLRLGNKEKTSTAKLVVEELPVRFVKTLEEEVTVVKGQPLYLSCELNKERDVVWRKDGKIVVEKPGRIVPGVIGLMRALTINDADDTDAGTYTVTVENANNLECSSCVKVVEVIRDWLVKPIRDQHVKPKGTAIFACDIAKDTPNIKWFKGYDEIPAEPNDKTEILRDGNHLYLKIKNAMPEDIAEYAVEIEGKRYPAKLTLGEREVELLKPIEDVTIYEKESASFDAEISEADIPGQWKLKGELLRPSPTCEIKAEGGKRFLTLHKVKLDQAGEVLYQALNAITTAILTVKEIELDFAVPLKDVTVPERRQARFECVLTREANVIWSKGPDIIKSSDKFDIIADGKKHILVINDSQFDDEGVYTAEVEGKKTSARLFVTGIRLKFMSPLEDQTVKEGETATFVCELSHEKMHVVWFKNDAKLHTSRTVLISSEGKTHKLEMKEVTLDDISQIKAQVKELSSTAQLKVLEADPYFTVKLHDKTAVEKDEITLKCEVSKDVPVKWFKDGEEIVPSPKYSIKADGLRRILKIKKADLKDKGEYVCDCGTDKTKANVTVEARLIKVEKPLYGVEVFVGETAHFEIELSEPDVHGQWKLKGQPLTASPDCEIIEDGKKHILILHNCQLGMTGEVSFQAANAKSAANLKVKELPLIFITPLSDVKVFEKDEAKFECEVSREPKTFRWLKGTQEITGDDRFELIKDGTKHSMVIKSAAFEDEAKYMFEAEDKHTSGKLIIEGIRLKFLTPLKDVTAKEKESAVFTVELSHDNIRVKWFKNDQRLHTTRSVSMQDEGKTHSITFKDLSIDDTSQIRVEAMGMSSEAKLTVLEGDPYFTGKLQDYTGVEKDEVILQCEISKADAPVKWFKDGKEIKPSKNAVIKADGKKRMLILKKALKSDIGQYTCDCGTDKTSGKLDIEDREIKLVRPLHSVEVMETETARFETEISEDDIHANWKLKGEALLQTPDCEIKEEGKIHSLVLHNCRLDQTGGVDFQAANVKSSAHLRVKPRVIGLLRPLKDVTVTAGETATFDCELSYEDIPVEWYLKGKKLEPSDKVVPRSEGKVHTLTLRDVKLEDAGEVQLTAKDFKTHANLFVKEPPVEFTKPLEDQTVEEGATAVLECEVSRENAKVKWFKNGTEILKSKKYEIVADGRVRKLVIHDCTPEDIKTYTCDAKDFKTSCNLNVVPPHVEFLRPLTDLQVREKEMARFECELSRENAKVKWFKDGAEIKKGKKYDIISKGAVRILVINKCLLDDEAEYSCEVRTARTSGMLTVLEEEAVFTKNLANIEVSETDTIKLVCEVSKPGAEVIWYKGDEEIIETGRYEILTEGRKRILVIQNAHLEDAGNYNCRLPSSRTDGKVKVHELAAEFISKPQNLEILEGEKAEFVCSISKESFPVQWKRDDKTLESGDKYDVIADGKKRVLVVKDATLQDMGTYVVMVGAARAAAHLTVIEKLRIVVPLKDTRVKEQQEVVFNCEVNTEGAKAKWFRNEEAIFDSSKYIILQKDLVYTLRIRDAHLDDQANYNVSLTNHRGENVKSAANLIVEEEDLRIVEPLKDIETMEKKSVTFWCKVNRLNVTLKWTKNGEEVPFDNRVSYRVDKYKHMLTIKDCGFPDEGEYIVTAGQDKSVAELLIIEAPTEFVEHLEDQTVTEFDDAVFSCQLSREKANVKWYRNGREIKEGKKYKFEKDGSIHRLIIKDCRLDDECEYACGVEDRKSRARLFVEEIPVEIIRPPQDILEAPGADVVFLAELNKDKVEVQWLRNNMVVVQGDKHQMMSEGKIHRLQICDIKPRDQGEYRFIAKDKEARAKLELAAAPKIKTADQDLVVDVGKPLTMVVPYDAYPKAEAEWFKENEPLSTKTIDTTAEQTSFRILEAKKGDKGRYKIVLQNKHGKAEGFINLKVIDVPGPVRNLEVTETFDGEVSLAWEEPLTDGGSKIIGYVVERRDIKRKTWVLATDRAESCEFTVTGLQKGGVEYLFRVSARNRVGTGEPVETDNPVEARSKYDVPGPPLNVTITDVNRFGVSLTWEPPEYDGGAEITNYVIELRDKTSIRWDTAMTVRAEDLSATVTDVVEGQEYSFRVRAQNRIGVGKPSAATPFVKVADPIERPSPPVNLTSSDQTQSSVQLKWEPPLKDGGSPILGYIIERCEEGKDNWIRCNMKLVPELTYKVTGLEKGNKYLYRVSAENKAGVSDPSEILGPLTADDAFVEPTMDLSAFKDGLEVIVPNPITILVPSTGYPRPTATWCFGDKVLETGDRVKMKTLSAYAELVISPSERSDKGIYTLKLENRVKTISGEIDVNVIARPSAPKELKFGDITKDSVHLTWEPPDDDGGSPLTGYVVEKREVSRKTWTKVMDFVTDLEFTVPDLVQGKEYLFKVCARNKCGPGEPAYVDEPVNMSTPATVPDPPENVKWRDRTANSIFLTWDPPKNDGGSRIKGYIVERCPRGSDKWVACGEPVAETKMEVTGLEEGKWYAYRVKALNRQGASKPSRPTEEIQAVDTQEAPEIFLDVKLLAGLTVKAGTKIELPATVTGKPEPKITWTKADMILKQDKRITIENVPKKSTVTIVDSKRSDTGTYIIEAVNVCGRATAVVEVNVLDKPGPPAAFDITDVTNESCLLTWNPPRDDGGSKITNYVVERRATDSEVWHKLSSTVKDTNFKATKLIPNKEYIFRVAAENMYGVGEPVQASPITAKYQFDPPGPPTRLEPSDITKDAVTLTWCEPDDDGGSPITGYWVERLDPDTDKWVRCNKMPVKDTTYRVKGLTNKKKYRFRVLAENLAGPGKPSKSTEPILIKDPIDPPWPPGKPTVKDVGKTSVRLNWTKPEHDGGAKIESYVIEMLKTGTDEWVRVAEGVPTTQHLLPGLMEGQEYSFRVRAVNKAGESEPSEPSDPVLCREKLYPPSPPRWLEVINITKNTADLKWTVPEKDGGSPITNYIVEKRDVRRKGWQTVDTTVKDTKCTVTPLTEGSLYVFRVAAENAIGQSDYTEIEDSVLAKDTFTTPGPPYALAVVDVTKRHVDLKWEPPKNDGGRPIQRYVIEKKERLGTRWVKAGKTAGPDCNFRVTDVIEGTEVQFQVRAENEAGVGHPSEPTEILSIEDPTSPPSPPLDLHVTDAGRKHIAIAWKPPEKNGGSPIIGYHVEMCPVGTEKWMRVNSRPIKDLKFKVEEGVVPDKEYVLRVRAVNAIGVSEPSEISENVVAKDPDCKPTIDLETHDIIVIEGEKLSIPVPFRAVPVPTVSWHKDGKEVKASDRLTMKNDHISAHLEVPKSVRADAGIYTITLENKLGSATASINVKVIGLPGPCKDIKASDITKSSCKLTWEPPEFDGGTPILHYVLERREAGRRTYIPVMSGENKLSWTVKDLIPNGEYFFRVKAVNKVGGGEYIELKNPVIAQDPKQPPDPPVDVEVHNPTAEAMTITWKPPLYDGGSKIMGYIIEKIAKGEERWKRCNEHLVPILTYTAKGLEEGKEYQFRVRAENAAGISEPSRATPPTKAVDPIDAPKVILRTSLEVKRGDEIALDASISGSPYPTITWIKDENVIVPEEIKKRAAPLVRRRKGEVQEEEPFVLPLTQRLSIDNSKKGESQLRVRDSLRPDHGLYMIKVENDHGIAKAPCTVSVLDTPGPPINFVFEDIRKTSVLCKWEPPLDDGGSEIINYTLEKKDKTKPDSEWIVVTSTLRHCKYSVTKLIEGKEYLFRVRAENRFGPGPPCVSKPLVAKDPFGPPDAPDKPIVEDVTSNSMLVKWNEPKDNGSPILGYWLEKREVNSTHWSRVNKSLLNALKANVDGLLEGLTYVFRVCAENAAGPGKFSPPSDPKTAHDPISPPGPPIPRVTDTSSTTIELEWEPPAFNGGGEIVGYFVDKQLVGTNEWSRCTEKMIKVRQYTVKEIREGADYKLRVSAVNAAGEGPPGETQPVTVAEPQEPPAVELDVSVKGGIQIMAGKTLRIPAVVTGRPVPTKVWTKEEGELDKDRVVIDNVGTKSELIIKDALRKDHGRYVITATNSCGSKFAAARVEVFDVPGPVLDLKPVVTNRKMCLLNWSDPEDDGGSEITGFIIERKDAKMHTWRQPIETERSKCDITGLLEGQEYKFRVIAKNKFGCGPPVEIGPILAVDPLGPPTSPERLTYTERTKSTITLDWKEPRSNGGSPIQGYIIEKRRHDKPDFERVNKRLCPTTSFLVENLDEHQMYEFRVKAVNEIGESEPSLPLNVVIQDDEVPPTIKLRLSVRGDTIKVKAGEPVHIPADVTGLPMPKIEWSKNETVIEKPTDALQITKEEVSRSEAKTELSIPKAVREDKGTYTVTASNRLGSVFRNVHVEVYDRPSPPRNLAVTDIKAESCYLTWDAPLDNGGSEITHYVIDKRDASRKKAEWEEVTNTAVEKRYGIWKLIPNGQYEFRVRAVNKYGISDECKSDKVVIQDPYRLPGPPGKPKVLARTKGSMLVSWTPPLDNGGSPITGYWLEKREEGSPYWSRVSRAPITKVGLKGVEFNVPRLLEGVKYQFRAMAINAAGIGPPSEPSDPEVAGDPIFPPGPPSCPEVKDKTKSSISLGWKPPAKDGGSPIKGYIVEMQEEGTTDWKRVNEPDKLITTCECVVPNLKELRKYRFRVKAVNEAGESEPSDTTGEIPATDIQEEPEVFIDIGAQDCLVCKAGSQIRIPAVIKGRPTPKSSWEFDGKAKKAMKDGVHDIPEDAQLETAENSSVIIIPECKRSHTGKYSITAKNKAGQKTANCRVKVMDVPGPPKDLKVSDITRGSCRLSWKMPDDDGGDRIKGYVIEKRTIDGKAWTKVNPDCGSTTFVVPDLLSEQQYFFRVRAENRFGIGPPVETIQRTTARDPIYPPDPPIKLKIGLITKNTVHLSWKPPKNDGGSPVTHYIVECLAWDPTGTKKEAWRQCNKRDVEELQFTVEDLVEGGEYEFRVKAVNAAGVSKPSATVGPVTVKDQTCPPSIDLKEFMEVEEGTNVNIVAKIKGVPFPTLTWFKAPPKKPDNKEPVLYDTHVNKLVVDDTCTLVIPQSRRSDTGLYTITAVNNLGTASKEMRLNVLGRPGPPVGPIKFESVSADQMTLSWFPPKDDGGSKITNYVIEKREANRKTWVHVSSEPKECTYTIPKLLEGHEYVFRIMAQNKYGIGEPLDSEPETARNLFSVPGAPDKPTVSSVTRNSMTVNWEEPEYDGGSPVTGYWLEMKDTTSKRWKRVNRDPIKAMTLGVSYKVTGLIEGSDYQFRVYAINAAGVGPASLPSDPATARDPIAPPGPPFPKVTDWTKSSADLEWSPPLKDGGSKVTGYIVEYKEEGKEEWEKGKDKEVRGTKLVVTGLKEGAFYKFRVRAVNIAGIGEPGEVTDVIEMKDRLVSPDLQLDASVRDRIVVHAGGVIRIIAYVSGKPPPTVTWNMNERTLPQEATIETTAISSSMVIKNCQRSHQGVYSLLAKNEAGERKKTIIVDVLDVPGPVGTPFLAHNLTNESCKLTWFSPEDDGGSPITNYVIEKRESDRRAWTPVTYTVTRQNATVQGLIQGKAYFFRIAAENSIGMGPFVETSEALVIREPITVPERPEDLEVKEVTKNTVTLTWNPPKYDGGSEIINYVLESRLIGTEKFHKVTNDNLLSRKYTVKGLKEGDTYEYRVSAVNIVGQGKPSFCTKPITCKDELAPPTLHLDFRDKLTIRVGEAFALTGRYSGKPKPKVSWFKDEADVLEDDRTHIKTTPATLALEKIKAKRSDSGKYCVVVENSTGSRKGFCQVNVVDRPGPPVGPVSFDEVTKDYMVISWKPPLDDGGSKITNYIIEKKEVGKDVWMPVTSASAKTTCKVSKLLEGKDYIFRIHAENLYGISDPLVSDSMKAKDRFRVPDAPDQPIVTEVTKDSALVTWNKPHDGGKPITNYILEKRETMSKRWARVTKDPIHPYTKFRVPDLLEGCQYEFRVSAENEIGIGDPSPPSKPVFAKDPIAKPSPPVNPEAIDTTCNSVDLTWQPPRHDGGSKILGYIVEYQKVGDEEWRRANHTPESCPETKYKVTGLRDGQTYKFRVLAVNAAGESDPAHVPEPVLVKDRLEPPELILDANMAREQHIKVGDTLRLSAIIKGVPFPKVTWKKEDRDAPTKARIDVTPVGSKLEIRNAAHEDGGIYSLTVENPAGSKTVSVKVLVLDKPGPPRDLEVSEIRKDSCYLTWKEPLDDGGSVITNYVVERRDVASAQWSPLSATSKKKSHFAKHLNEGNQYLFRVAAENQYGRGPFVETPKPIKALDPLHPPGPPKDLHHVDVDKTEVSLVWNKPDRDGGSPITGYLVEYQEEGTQDWIKFKTVTNLECVVTGLQQGKTYRFRVKAENIVGLGLPDTTIPIECQEKLVPPSVELDVKLIEGLVVKAGTTVRFPAIIRGVPVPTAKWTTDGSEIKTDEHYTVETDNFSSVLTIKNCLRRDTGEYQITVSNAAGSKTVAVHLTVLDVPGPPTGPINILDVTPEHMTISWQPPKDDGGSPVINYIVEKQDTRKDTWGVVSSGSSKTKLKIPHLQKGCEYVFRVRAENKIGVGPPLDSTPTVAKHKFSPPSPPGKPVVTDITENAATVSWTLPKSDGGSPITGYYMERREVTGKWVRVNKTPIADLKFRVTGLYEGNTYEFRVFAENLAGLSKPSPSSDPIKACRPIKPPGPPINPKLKDKSRETADLVWTKPLSDGGSPILGYVVECQKPGTAQWNRINKDELIRQCAFRVPGLIEGNEYRFRIKAANIVGEGEPRELAESVIAKDILHPPEVELDVTCRDVITVRVGQTIRILARVKGRPEPDITWTKEGKVLVREKRVDLIQDLPRVELQIKEAVRADHGKYIISAKNSSGHAQGSAIVNVLDRPGPCQNLKVTNVTKENCTISWENPLDNGGSEITNFIVEYRKPNQKGWSIVASDVTKRLIKANLLANNEYYFRVCAENKVGVGPTIETKTPILAINPIDRPGEPENLHIADKGKTFVYLKWRRPDYDGGSPNLSYHVERRLKGSDDWERVHKGSIKETHYMVDRCVENQIYEFRVQTKNEGGESDWVKTEEVVVKEDLQKPVLDLKLSGVLTVKAGDTIRLEAGVRGKPFPEVAWTKDKDATDLTRSPRVKIDTRADSSKFSLTKAKRSDGGKYVVTATNTAGSFVAYATVNVLDKPGPVRNLKIVDVSSDRCTVCWDPPEDDGGCEIQNYILEKCETKRMVWSTYSATVLTPGTTVTRLIEGNEYIFRVRAENKIGTGPPTESKPVIAKTKYDKPGRPDPPEVTKVSKEEMTVVWNPPEYDGGKSITGYFLEKKEKHSTRWVPVNKSAIPERRMKVQNLLPDHEYQFRVKAENEIGIGEPSLPSRPVVAKDPIEPPGPPTNFRVVDTTKHSITLGWGKPVYDGGAPIIGYVVEMRPKIADASPDEGWKRCNAAAQLVRKEFTVTSLDENQEYEFRVCAQNQVGIGRPAELKEAIKPKEILEPPEIDLDASMRKLVIVRAGCPIRLFAIVRGRPAPKVTWRKVGIDNVVRKGQVDLVDTMAFLVIPNSTRDDSGKYSLTLVNPAGEKAVFVNVRVLDTPGPVSDLKVSDVTKTSCHVSWAPPENDGGSQVTHYIVEKREADRKTWSTVTPEVKKTSFHVTNLVPGNEYYFRVTAVNEYGPGVPTDVPKPVLASDPLSEPDPPRKLEVTEMTKNSATLAWLPPLRDGGAKIDGYITSYREEEQPADRWTEYSVVKDLSLVVTGLKEGKKYKFRVAARNAVGVSLPREAEGVYEAKEQLLPPKILMPEQITIKAGKKLRIEAHVYGKPHPTCKWKKGEDEVVTSSHLAVHKADSSSILIIKDVTRKDSGYYSLTAENSSGTDTQKIKVVVMDAPGPPQPPFDISDIDADACSLSWHIPLEDGGSNITNYIVEKCDVSRGDWVTALASVTKTSCRVGKLIPGQEYIFRVRAENRFGISEPLTSPKMVAQFPFGVPSEPKNARVTKVNKDCIFVAWDRPDSDGGSPIIGYLIERKERNSLLWVKANDTLVRSTEYPCAGLVEGLEYSFRIYALNKAGSSPPSKPTEYVTARMPVDPPGKPEVIDVTKSTVSLIWARPKHDGGSKIIGYFVEACKLPGDKWVRCNTAPHQIPQEEYTATGLEEKAQYQFRAIARTAVNISPPSEPSDPVTILAENVPPRIDLSVAMKSLLTVKAGTNVCLDATVFGKPMPTVSWKKDGTLLKPAEGIKMAMQRNLCTLELFSVNRKDSGDYTITAENSSGSKSATIKLKVLDKPGPPASVKINKMYSDRAMLSWEPPLEDGGSEITNYIVDKRETSRPNWAQVSATVPITSCSVEKLIEGHEYQFRICAENKYGVGDPVFTEPAIAKNPYDPPGRCDPPVISNITKDHMTVSWKPPADDGGSPITGYLLEKRETQAVNWTKVNRKPIIERTLKATGLQEGTEYEFRVTAINKAGPGKPSDASKAAYARDPQYPPGPPAFPKVYDTTRSSVSLSWGKPAYDGGSPIIGYLVEVKRADSDNWVRCNLPQNLQKTRFEVTGLMEDTQYQFRVYAVNKIGYSDPSDVPDKHYPKDILIPPEGELDADLRKTLILRAGVTMRLYVPVKGRPPPKITWSKPNVNLRDRIGLDIKSTDFDTFLRCENVNKYDAGKYILTLENSCGKKEYTIVVKVLDTPGPPVNVTVKEISKDSAYVTWEPPIIDGGSPIINYVVQKRDAERKSWSTVTTECSKTSFRVANLEEGKSYFFRVFAENEYGIGDPGETRDAVKASQTPGPVVDLKVRSVSKSSCSIGWKKPHSDGGSRIIGYVVDFLTEENKWQRVMKSLSLQYSAKDLTEGKEYTFRVSAENENGEGTPSEITVVARDDVVAPDLDLKGLPDLCYLAKENSNFRLKIPIKGKPAPSVSWKKGEDPLATDTRVSVESSAVNTTLIVYDCQKSDAGKYTITLKNVAGTKEGTISIKVVGKPGIPTGPIKFDEVTAEAMTLKWAPPKDDGGSEITNYILEKRDSVNNKWVTCASAVQKTTFRVTRLHEGMEYTFRVSAENKYGVGEGLKSEPIVARHPFDVPDAPPPPNIVDVRHDSVSLTWTDPKKTGGSPITGYHLEFKERNSLLWKRANKTPIRMRDFKVTGLTEGLEYEFRVMAINLAGVGKPSLPSEPVVALDPIDPPGKPEVINITRNSVTLIWTEPKYDGGHKLTGYIVEKRDLPSKSWMKANHVNVPECAFTVTDLVEGGKYEFRIRAKNTAGAISAPSESTETIICKDEYEAPTIVLDPTIKDGLTIKAGDTIVLNAISILGKPLPKSSWSKAGKDIRPSDITQITSTPTSSMLTIKYATRKDAGEYTITATNPFGTKVEHVKVTVLDVPGPPGPVEISNVSAEKATLTWTPPLEDGGSPIKSYILEKRETSRLLWTVVSEDIQSCRHVATKLIQGNEYIFRVSAVNHYGKGEPVQSEPVKMVDRFGPPGPPEKPEVSNVTKNTATVSWKRPVDDGGSEITGYHVERREKKSLRWVRAIKTPVSDLRCKVTGLQEGSTYEFRVSAENRAGIGPPSEASDSVLMKDAAYPPGPPSNPHVTDTTKKSASLAWGKPHYDGGLEITGYVVEHQKVGDEAWIKDTTGTALRITQFVVPDLQTKEKYNFRISAINDAGVGEPAVIPDVEIVEREMAPDFELDAELRRTLVVRAGLSIRIFVPIKGRPAPEVTWTKDNINLKNRANIENTESFTLLIIPECNRYDTGKFVMTIENPAGKKSGFVNVRVLDTPGPVLNLRPTDITKDSVTLHWDLPLIDGGSRITNYIVEKREATRKSYSTATTKCHKCTYKVTGLSEGCEYFFRVMAENEYGIGEPTETTEPVKASEAPSPPDSLNIMDITKSTVSLAWPKPKHDGGSKITGYVIEAQRKGSDQWTHITTVKGLECVVRNLTEGEEYTFQVMAVNSAGRSAPRESRPVIVKEQTMLPELDLRGIYQKLVIAKAGDNIKVEIPVLGRPKPTVTWKKGDQILKQTQRVNFETTATSTILNINECVRSDSGPYPLTARNIVGEVGDVITIQVHDIPGPPTGPIKFDEVSSDFVTFSWDPPENDGGVPISNYVVEMRQTDSTTWVELATTVIRTTYKATRLTTGLEYQFRVKAQNRYGVGPGITSACIVANYPFKVPGPPGTPQVTAVTKDSMTISWHEPLSDGGSPILGYHVERKERNGILWQTVSKALVPGNIFKSSGLTDGIAYEFRVIAENMAGKSKPSKPSEPMLALDPIDPPGKPVPLNITRHTVTLKWAKPEYTGGFKITSYIVEKRDLPNGRWLKANFSNILENEFTVSGLTEDAAYEFRVIAKNAAGAISPPSEPSDAITCRDDVEAPKIKVDVKFKDTVILKAGEAFRLEADVSGRPPPTMEWSKDGKELEGTAKLEIKIADFSTNLVNKDSTRRDSGAYTLTATNPGGFAKHIFNVKVLDRPGPPEGPLAVTEVTSEKCVLSWFPPLDDGGAKIDHYIVQKRETSRLAWTNVASEVQVTKLKVTKLLKGNEYIFRVMAVNKYGVGEPLESEPVLAVNPYGPPDPPKNPEVTTITKDSMVVCWGHPDSDGGSEIINYIVERRDKAGQRWIKCNKKTLTDLRYKVSGLTEGHEYEFRIMAENAAGISAPSPTSPFYKACDTVFKPGPPGNPRVLDTSRSSISIAWNKPIYDGGSEITGYMVEIALPEEDEWQIVTPPAGLKATSYTITGLTENQEYKIRIYAMNSEGLGEPALVPGTPKAEDRMLPPEIELDADLRKVVTIRACCTLRLFVPIKGRPAPEVKWARDHGESLDKASIESTSSYTLLIVGNVNRFDSGKYILTVENSSGSKSAFVNVRVLDTPGPPQDLKVKEVTKTSVTLTWDPPLLDGGSKIKNYIVEKRESTRKAYSTVATNCHKTSWKVDQLQEGCSYYFRVLAENEYGIGLPAETAESVKASERPLPPGKITLMDVTRNSVSLSWEKPEHDGGSRILGYIVEMQTKGSDKWATCATVKVTEATITGLIQGEEYSFRVSAQNEKGISDPRQLSVPVIAKDLVIPPAFKLLFNTFTVLAGEDLKVDVPFIGRPTPAVTWHKDNVPLKQTTRVNAESTENNSLLTIKDACREDVGHYVVKLTNSAGEAIETLNVIVLDKPGPPTGPVKMDEVTADSITLSWGPPKYDGGSSINNYIVEKRDTSTTTWQIVSATVARTTIKACRLKTGCEYQFRIAAENRYGKSTYLNSEPTVAQYPFKVPGPPGTPVVTLSSRDSMEVQWNEPISDGGSRVIGYHLERKERNSILWVKLNKTPIPQTKFKTTGLEEGVEYEFRVSAENIVGIGKPSKVSECYVARDPCDPPGRPEAIIVTRNSVTLQWKKPTYDGGSKITGYIVEKKELPEGRWMKASFTNIIDTHFEVTGLVEDHRYEFRVIARNAAGVFSEPSESTGAITARDEVDPPRISMDPKYKDTIVVHAGESFKVDADIYGKPIPTIQWIKGDQELSNTARLEIKSTDFATSLSVKDAVRVDSGNYILKAKNVAGERSVTVNVKVLDRPGPPEGPVVISGVTAEKCTLAWKPPLQDGGSDIINYIVERRETSRLVWTVVDANVQTLSCKVTKLLEGNEYTFRIMAVNKYGVGEPLESEPVVAKNPFVVPDAPKAPEVTTVTKDSMIVVWERPASDGGSEILGYVLEKRDKEGIRWTRCHKRLIGELRLRVTGLIENHDYEFRVSAENAAGLSEPSPPSAYQKACDPIYKPGPPNNPKVIDITRSSVFLSWSKPIYDGGCEIQGYIVEKCDVSVGEWTMCTPPTGINKTNIEVEKLLEKHEYNFRICAINKAGVGEHADVPGPIIVEEKLEAPDIDLDLELRKIINIRAGGSLRLFVPIKGRPTPEVKWGKVDGEIRDAAIIDVTSSFTSLVLDNVNRYDSGKYTLTLENSSGTKSAFVTVRVLDTPSPPVNLKVTEITKDSVSITWEPPLLDGGSKIKNYIVEKREATRKSYAAVVTNCHKNSWKIDQLQEGCSYYFRVTAENEYGIGLPAQTADPIKVAEVPQPPGKITVDDVTRNSVSLSWTKPEHDGGSKIIQYIVEMQAKHSEKWSECARVKSLQAVITNLTQGEEYLFRVVAVNEKGRSDPRSLAVPIVAKDLVIEPDVKPAFSSYSVQVGQDLKIEVPISGRPKPTITWTKDGLPLKQTTRINVTDSLDLTTLSIKETHKDDGGQYGITVANVVGQKTASIEIVTLDKPDPPKGPVKFDDVSAESITLSWNPPLYTGGCQITNYIVQKRDTTTTVWDVVSATVARTTLKVTKLKTGTEYQFRIFAENRYGQSFALESDPIVAQYPYKEPGPPGTPFATAISKDSMVIQWHEPVNNGGSPVIGYHLERKERNSILWTKVNKTIIHDTQFKAQNLEEGIEYEFRVYAENIVGVGKASKNSECYVARDPCDPPGTPEPIMVKRNEITLQWTKPVYDGGSMITGYIVEKRDLPDGRWMKASFTNVIETQFTVSGLTEDQRYEFRVIAKNAAGAISKPSDSTGPITAKDEVELPRISMDPKFRDTIVVNAGETFRLEADVHGKPLPTIEWLRGDKEIEESARCEIKNTDFKALLIVKDAIRIDGGQYILRASNVAGSKSFPVNVKVLDRPGPPEGPVQVTGVTSEKCSLTWSPPLQDGGSDISHYVVEKRETSRLAWTVVASEVVTNSLKVTKLLEGNEYVFRIMAVNKYGVGEPLESAPVLMKNPFVLPGPPKSLEVTNIAKDSMTVCWNRPDSDGGSEIIGYIVEKRDRSGIRWIKCNKRRITDLRLRVTGLTEDHEYEFRVSAENAAGVGEPSPATVYYKACDPVFKPGPPTNAHIVDTTKNSITLAWGKPIYDGGSEILGYVVEICKADEEEWQIVTPQTGLRVTRFEISKLTEHQEYKIRVCALNKVGLGEATSVPGTVKPEDKLEAPELDLDSELRKGIVVRAGGSARIHIPFKGRPTPEITWSREEGEFTDKVQIEKGVNYTQLSIDNCDRNDAGKYILKLENSSGSKSAFVTVKVLDTPGPPQNLAVKEVRKDSAFLVWEPPIIDGGAKVKNYVIDKRESTRKAYANVSSKCSKTSFKVENLTEGAIYYFRVMAENEFGVGVPVETVDAVKAAEPPSPPGKVTLTDVSQTSASLMWEKPEHDGGSRVLGYVVEMQPKGTEKWSIVAESKVCNAVVTGLSSGQEYQFRVKAYNEKGKSDPRVLGVPVIAKDLTIQPSLKLPFNTYSIQAGEDLKIEIPVIGRPRPNISWVKDGEPLKQTTRVNVEETATSTVLHIKEGNKDDFGKYTVTATNSAGTATENLSVIVLEKPGPPVGPVRFDEVSADFVVISWEPPAYTGGCQISNYIVEKRDTTTTTWHMVSATVARTTIKITKLKTGTEYQFRIFAENRYGKSAPLDSKAVIVQYPFKEPGPPGTPFVTSISKDQMLVQWHEPVNDGGTKIIGYHLEQKEKNSILWVKLNKTPIQDTKFKTTGLDEGLEYEFKVSAENIVGIGKPSKVSECFVARDPCDPPGRPEAIVITRNNVTLKWKKPAYDGGSKITGYIVEKKDLPDGRWMKASFTNVLETEFTVSGLVEDQRYEFRVIARNAAGNFSEPSDSSGAITARDEIDAPNASLDPKYKDVIVVHAGETFVLEADIRGKPIPDVVWSKDGKELEETAARMEIKSTIQKTTLVVKDCIRTDGGQYILKLSNVGGTKSIPITVKVLDRPGPPEGPLKVTGVTAEKCYLAWNPPLQDGGANISHYIIEKRETSRLSWTQVSTEVQALNYKVTKLLPGNEYIFRVMAVNKYGIGEPLESGPVTACNPYKPPGPPSTPEVSAITKDSMVVTWARPVDDGGTEIEGYILEKRDKEGVRWTKCNKKTLTDLRLRVTGLTEGHSYEFRVAAENAAGVGEPSEPSVFYRACDALYPPGPPSNPKVTDTSRSSVSLAWSKPIYDGGAPVKGYVVEVKEAAADEWTTCTPPTGLQGKQFTVTKLKENTEYNFRICAINSEGVGEPATLPGSVVAQERIEPPEIELDADLRKVVVLRASATLRLFVTIKGRPEPEVKWEKAEGILTDRAQIEVTSSFTMLVIDNVTRFDSGRYNLTLENNSGSKTAFVNVRVLDSPSAPVNLTIREVKKDSVTLSWEPPLIDGGAKITNYIVEKRETTRKAYATITNNCTKTTFRIENLQEGCSYYFRVLASNEYGIGLPAETTEPVKVSEPPLPPGRVTLVDVTRNTATIKWEKPESDGGSKITGYVVEMQTKGSEKWSTCTQVKTLEATISGLTAGEEYVFRVAAVNEKGRSDPRQLGVPVIARDIEIKPSVELPFHTFNVKAREQLKIDVPFKGRPQATVNWRKDGQTLKETTRVNVSSSKTVTSLSIKEASKEDVGTYELCVSNSAGSITVPITIIVLDRPGPPGPIRIDEVSCDSITISWNPPEYDGGCQISNYIVEKKETTSTTWHIVSQAVARTSIKIVRLTTGSEYQFRVCAENRYGKSSYSESSAVVAEYPFSPPGPPGTPKVVHATKSTMLVTWQVPVNDGGSRVIGYHLEYKERSSILWSKANKILIADTQMKVSGLDEGLMYEYRVYAENIAGIGKCSKSCEPVPARDPCDPPGQPEVTNITRKSVSLKWSKPHYDGGAKITGYIVERRELPDGRWLKCNYTNIQETYFEVTELTEDQRYEFRVFARNAADSVSEPSESTGPIIVKDDVEPPRVMMDVKFRDVIVVKAGEVLKINADIAGRPLPVISWAKDGIEIEERARTEIISTDNHTLLTVKDCIRRDTGQYVLTLKNVAGTRSVAVNCKVLDKPGPPAGPLEINGLTAEKCSLSWGRPQEDGGADIDYYIVEKRETSHLAWTICEGELQMTSCKVTKLLKGNEYIFRVTGVNKYGVGEPLESVAIKALDPFTVPSPPTSLEITSVTKESMTLCWSRPESDGGSEISGYIIERREKNSLRWVRVNKKPVYDLRVKSTGLREGCEYEYRVYAENAAGLSLPSETSPLIRAEDPVFLPSPPSKPKIVDSGKTTITIAWVKPLFDGGAPITGYTVEYKKSDDTDWKTSIQSLRGTEYTISGLTTGAEYVFRVKSVNKVGASDPSDSSDPQIAKEREEEPLFDIDSEMRKTLIVKAGASFTMTVPFRGRPVPNVLWSKPDTDLRTRAYVDTTDSRTSLTIENANRNDSGKYTLTIQNVLSAASLTLVVKVLDTPGPPTNITVQDVTKESAVLSWDVPENDGGAPVKNYHIEKREASKKAWVSVTNNCNRLSYKVTNLQEGAIYYFRVSGENEFGVGIPAETKEGVKITEKPSPPEKLGVTSISKDSVSLTWLKPEHDGGSRIVHYVVEALEKGQKNWVKCAVAKSTHHVVSGLRENSEYFFRVFAENQAGLSDPRELLLPVLIKEQLEPPEIDMKNFPSHTVYVRAGSNLKVDIPISGKPLPKVTLSRDGVPLKATMRFNTEITAENLTINLKESVTADAGRYEITAANSSGTTKAFINIVVLDRPGPPTGPVVISDITEESVTLKWEPPKYDGGSQVTNYILLKRETSTAVWTEVSATVARTMMKVMKLTTGEEYQFRIKAENRFGISDHIDSACVTVKLPYTTPGPPSTPWVTNVTRESITVGWHEPVSNGGSAVVGYHLEMKDRNSILWQKANKLVIRTTHFKVTTISAGLIYEFRVYAENAAGVGKPSHPSEPVLAIDACEPPRNVRITDISKNSVSLSWQQPAFDGGSKITGYIVERRDLPDGRWTKASFTNVTETQFIISGLTQNSQYEFRVFARNAVGSISNPSEVVGPITCIDSYGGPVIDLPLEYTEVVKYRAGTSVKLRAGISGKPAPTIEWYKDDKELQTNALVCVENTTDLASILIKDADRLNSGCYELKLRNAMGSASATIRVQILDKPGPPGGPIEFKTVTAEKITLLWRPPADDGGAKITHYIVEKRETSRVVWSMVSEHLEECIITTTKIIKGNEYIFRVRAVNKYGIGEPLESDSVVAKNAFVTPGPPGIPEVTKITKNSMTVVWSRPIADGGSDISGYFLEKRDKKSLGWFKVLKETIRDTRQKVTGLTENSDYQYRVCAVNAAGQGPFSEPSEFYKAADPIDPPGPPAKIRIADSTKSSITLGWSKPVYDGGSAVTGYVVEIRQGEEEEWTTVSTKGEVRTTEYVVSNLKPGVNYYFRVSAVNCAGQGEPIEMNEPVQAKDILEAPEIDLDVALRTSVIAKAGEDVQVLIPFKGRPPPTVTWRKDEKNLGSDARYSIENTDSSSLLTIPQVTRNDTGKYILTIENGVGEPKSSTVSVKVLDTPAACQKLQVKHVSRGTVTLLWDPPLIDGGSPIINYVIEKRDATKRTWSVVSHKCSSTSFKLIDLSEKTPFFFRVLAENEIGIGEPCETTEPVKAAEVPAPIRDLSMKDSTKTSVILSWTKPDFDGGSVITEYVVERKGKGEQTWSHAGISKTCEIEVSQLKEQSVLEFRVFAKNEKGLSDPVTIGPITVKELIITPEVDLSDIPGAQVTVRIGHNVHLELPYKGKPKPSISWLKDGLPLKESEFVRFSKTENKITLSIKNAKKEHGGKYTVILDNAVCRIAVPITVITLGPPSKPKGPIRFDEIKADSVILSWDVPEDNGGGEITCYSIEKRETSQTNWKMVCSSVARTTFKVPNLVKDAEYQFRVRAENRYGVSQPLVSSIIVAKHQFRIPGPPGKPVIYNVTSDGMSLTWDAPVYDGGSEVTGFHVEKKERNSILWQKVNTSPISGREYRATGLVEGLDYQFRVYAENSAGLSSPSDPSKFTLAVSPVDPPGTPDYIDVTRETITLKWNPPLRDGGSKIVGYSIEKRQGNERWVRCNFTDVSECQYTVTGLSPGDRYEFRIIARNAVGTISPPSQSSGIIMTRDENVPPIVEFGPEYFDGLIIKSGESLRIKALVQGRPVPRVTWFKDGVEIEKRMNMEITDVLGSTSLFVRDATRDHRGVYTVEAKNASGSAKAEIKVKVQDTPGKVVGPIRFTNITGEKMTLWWDAPLNDGCAPITHYIIEKRETSRLAWALIEDKCEAQSYTAIKLINGNEYQFRVSAVNKFGVGRPLDSDPVVAQIQYTVPDAPGIPEPSNITGNSITLTWARPESDGGSEIQQYILERREKKSTRWVKVISKRPISETRFKVTGLTEGNEYEFHVMAENAAGVGPASGISRLIKCREPVNPPGPPTVVKVTDTSKTTVSLEWSKPVFDGGMEIIGYIIEMCKADLGDWHKVNAEACVKTRYTVTDLQAGEEYKFRVSAINGAGKGDSCEVTGTIKAVDRLTAPELDIDANFKQTHVVRAGASIRLFIAYQGRPTPTAVWSKPDSNLSLRADIHTTDSFSTLTVENCNRNDAGKYTLTVENNSGSKSITFTVKVLDTPGPPGPITFKDVTRGSATLMWDAPLLDGGARIHHYVVEKREASRRSWQVISEKCTRQIFKVNDLAEGVPYYFRVSAVNEYGVGEPYEMPEPIVATEQPAPPRRLDVVDTSKSSAVLAWLKPDHDGGSRITGYLLEMRQKGSDFWVEAGHTKQLTFTVERLVEKTEYEFRVKAKNDAGYSEPREAFSSVIIKEPQIEPTADLTGITNQLITCKAGSPFTIDVPISGRPAPKVTWKLEEMRLKETDRVSITTTKDRTTLTVKDSMRGDSGRYFLTLENTAGVKTFSVTVVVIGRPGPVTGPIEVSSVSAESCVLSWGEPKDGGGTEITNYIVEKRESGTTAWQLVNSSVKRTQIKVTHLTKYMEYSFRVSSENRFGVSKPLESAPIIAEHPFVPPSAPTRPEVYHVSANAMSIRWEEPYHDGGSKIIGYWVEKKERNTILWVKENKVPCLECNYKVTGLVEGLEYQFRTYALNAAGVSKASEASRPIMAQNPVDAPGRPEVTDVTRSTVSLIWSAPAYDGGSKVVGYIIERKPVSEVGDGRWLKCNYTIVSDNFFTVTALSEGDTYEFRVLAKNAAGVISKGSESTGPVTCRDEYAPPKAELDARLHGDLVTIRAGSDLVLDAAVGGKPEPKIIWTKGDKELDLCEKVSLQYTGKRATAVIKFCDRSDSGKYTLTVKNASGTKAVSVMVKVLDSPGPCGKLTVSRVTQEKCTLAWSLPQEDGGAEITHYIVERRETSRLNWVIVEGECPTLSYVVTRLIKNNEYIFRVRAVNKYGPGVPVESEPIVARNSFTIPSPPGIPEEVGTGKEHIIIQWTKPESDGGNEISNYLVDKREKKSLRWTRVNKDYVVYDTRLKVTSLMEGCDYQFRVTAVNAAGNSEPSEASNFISCREPSYTPGPPSAPRVVDTTKHSISLAWTKPMYDGGTDIVGYVLEMQEKDTDQWYRVHTNATIRNTEFTVPDLKMGQKYSFRVAAVNVKGMSEYSESIAEIEPVERIEIPDLELADDLKKTVTIRAGASLRLMVSVSGRPPPVITWSKQGIDLASRAIIDTTESYSLLIVDKVNRYDAGKYTIEAENQSGKKSATVLVKVYDTPGPCPSVKVKEVSRDSVTITWEIPTIDGGAPVNNYIVEKREAAMRAFKTVTTKCSKTLYRISGLVEGTMYYFRVLPENIYGIGEPCETSDAVLVSEVPLVPAKLEVVDVTKSTVTLAWEKPLYDGGSRLTGYVLEACKAGTERWMKVVTLKPTVLEHTVTSLNEGEQYLFRIRAQNEKGVSEPRETVTAVTVQDLRVLPTIDLSTMPQKTIHVPAGRPVELVIPIAGRPPPAASWFFAGSKLRESERVTVETHTKVAKLTIRETTIRDTGEYTLELKNVTGTTSETIKVIILDKPGPPTGPIKIDEIDATSITISWEPPELDGGAPLSGYVVEQRDAHRPGWLPVSESVTRSTFKFTRLTEGNEYVFRVAATNRFGIGSYLQSEVIECRSSIRIPGPPETLQIFDVSRDGMTLTWYPPEDDGGSQVTGYIVERKEVRADRWVRVNKVPVTMTRYRSTGLTEGLEYEHRVTAINARGSGKPSRPSKPIVAMDPIAPPGKPQNPRVTDTTRTSVSLAWSVPEDEGGSKVTGYLIEMQKVDQHEWTKCNTTPTKIREYTLTHLPQGAEYRFRVLACNAGGPGEPAEVPGTVKVTEMLEYPDYELDERYQEGIFVRQGGVIRLTIPIKGKPFPICKWTKEGQDISKRAMIATSETHTELVIKEADRGDSGTYDLVLENKCGKKAVYIKVRVIGSPNSPEGPLEYDDIQVRSVRVSWRPPADDGGADILGYILERREVPKAAWYTIDSRVRGTSLVVKGLKENVEYHFRVSAENQFGISKPLKSEEPVTPKTPLNPPEPPSNPPEVLDVTKSSVSLSWSRPKDDGGSRVTGYYIERKETSTDKWVRHNKTQITTTMYTVTGLVPDAEYQFRIIAQNDVGLSETSPASEPVVCKDPFDKPSQPGELEILSISKDSVTLQWEKPECDGGKEILGYWVEYRQSGDSAWKKSNKERIKDKQFTIGGLLEATEYEFRVFAENETGLSRPRRTAMSIKTKLTSGEAPGIRKEMKDVTTKLGEAAQLSCQIVGRPLPDIKWYRFGKELIQSRKYKMSSDGRTHTLTVMTEEQEDEGVYTCIATNEVGEVETSSKLLLQATPQFHPGYPLKEKYYGAVGSTLRLHVMYIGRPVPAMTWFHGQKLLQNSENITIENTEHYTHLVMKNVQRKTHAGKYKVQLSNVFGTVDAILDVEIQDKPDKPTGPIVIEALLKNSAVISWKPPADDGGSWITNYVVEKCEAKEGAEWQLVSSAISVTTCRIVNLTENAGYYFRVSAQNTFGISDPLEVSSVVIIKSPFEKPGAPGKPTITAVTKDSCVVAWKPPASDGGAKIRNYYLEKREKKQNKWISVTTEEIRETVFSVKNLIEGLEYEFRVKCENLGGESEWSEISEPITPKSDVPIQAPHFKEELRNLNVRYQSNATLVCKVTGHPKPIVKWYRQGKEIIADGLKYRIQEFKGGYHQLIIASVTDDDATVYQVRATNQGGSVSGTASLEVEVPAKIHLPKTLEGMGAVHALRGEVVSIKIPFSGKPDPVITWQKGQDLIDNNGHYQVIVTRSFTSLVFPNGVERKDAGFYVVCAKNRFGIDQKTVELDVADVPDPPRGVKVSDVSRDSVNLTWTEPASDGGSKITNYIVEKCATTAERWLRVGQARETRYTVINLFGKTSYQFRVIAENKFGLSKPSEPSEPTITKEDKTRAMNYDEEVDETREVSMTKASHSSTKELYEKYMIAEDLGRGEFGIVHRCVETSSKKTYMAKFVKVKGTDQVLVKKEISILNIARHRNILHLHESFESMEELVMIFEFISGLDIFERINTSAFELNEREIVSYVHQVCEALQFLHSHNIGHFDIRPENIIYQTRRSSTIKIIEFGQARQLKPGDNFRLLFTAPEYYAPEVHQHDVVSTATDMWSLGTLVYVLLSGINPFLAETNQQIIENIMNAEYTFDEEAFKEISIEAMDFVDRLLVKERKSRMTASEALQHPWLKQKIERVSTKVIRTLKHRRYYHTLIKKDLNMVVSAARISCGGAIRSQKGVSVAKVKVASIEIGPVSGQIMHAVGEEGGHVKYVCKIENYDQSTQVTWYFGVRQLENSEKYEITYEDGVAILYVKDITKLDDGTYRCKVVNDYGEDSSYAELFVKGVREVYDYYCRRTMKKIKRRTDTMRLLERPPEFTLPLYNKTAYVGENVRFGVTITVHPEPHVTWYKSGQKIKPGDNDKKYTFESDKGLYQLTINSVTTDDDAEYTVVARNKYGEDSCKAKLTVTLHPPPTDSTLRPMFKRLLANAECQEGQSVCFEIRVSGIPPPTLKWEKDGQPLSLGPNIEIIHEGLDYYALHIRDTLPEDTGYYRVTATNTAGSTSCQAHLQVERLRYKKQEFKSKEEHERHVQKQIDKTLRMAEILSGTESVPLTQVAKEALREAAVLYKPAVSTKTVKGEFRLEIEEKKEERKLRMPYDVPEPRKYKQTTIEEDQRIKQFVPMSDMKWYKKIRDQYEMPGKLDRVVQKRPKRIRLSRWEQFYVMPLPRITDQYRPKWRIPKLSQDDLEIVRPARRRTPSPDYDFYYRPRRRSLGDISDEELLLPIDDYLAMKRTEEERLRLEEELELGFSASPPSRSPPHFELSSLRYSSPQAHVKVEETRKDFRYSTYHIPTKAEASTSYAELRERHAQAAYRQPKQRQRIMAEREDEELLRPVTTTQHLSEYKSELDFMSKEEKSRKKSRRQREVTEITEIEEEYEISKHAQRESSSSASRLLRRRRSLSPTYIELMRPVSELIRSRPQPAEEYEDDTERRSPTPERTRPRSPSPVSSERSLSRFERSARFDIFSRYESMKAALKTQKTSERKYEVLSQQPFTLDHAPRITLRMRSHRVPCGQNTRFILNVQSKPTAEVKWYHNGVELQESSKIHYTNTSGVLTLEILDCHTDDSGTYRAVCTNYKGEASDYATLDVTGGDYTTYASQRRDEEVPRSVFPELTRTEAYAVSSFKKTSEMEASSSVREVKSQMTETRESLSSYEHSASAEMKSAALEEKSLEEKSTTRKIKTTLAARILTKPRSMTVYEGESARFSCDTDGEPVPTVTWLRKGQVLSTSARHQVTTTKYKSTFEISSVQASDEGNYSVVVENSEGKQEAEFTLTIQKARVTEKAVTSPPRVKSPEPRVKSPEAVKSPKRVKSPEPSHPKAVSPTETKPTPTEKVQHLPVSAPPKITQFLKAEASKEIAKLTCVVESSVLRAKEVTWYKDGKKLKENGHFQFHYSADGTYELKINNLTESDQGEYVCEISGEGGTSKTNLQFMGQAFKSIHEKVSKISETKKSDQKTTESTVTRKTEPKAPEPISSKPVIVTGLQDTTVSSDSVAKFAVKATGEPRPTAIWTKDGKAITQGGKYKLSEDKGGFFLEIHKTDTSDSGLYTCTVKNSAGSVSSSCKLTIKAIKDTEAQKVSTQKTSEITPQKKAVVQEEISQKALRSEEIKMSEAKSQEKLALKEEASKVLISEEVKKSAATSLEKSIVHEEITKTSQASEEVRTHAEIKAFSTQMSINEGQRLVLKANIAGATDVKWVLNGVELTNSEEYRYGVSGSDQTLTIKQASHRDEGILTCISKTKEGIVKCQYDLTLSKELSDAPAFISQPRSQNINEGQNVLFTCEISGEPSPEIEWFKNNLPISISSNVSISRSRNVYSLEIRNASVSDSGKYTIKAKNFRGQCSATASLMVLPLVEEPSREVVLRTSGDTSLQGSFSSQSVQMSASKQEASFSSFSSSSASSMTEMKFASMSAQSMSSMQESFVEMSSSSFMGISNMTQLESSTSKMLKAGIRGIPPKIEALPSDISIDEGKVLTVACAFTGEPTPEVTWSCGGRKIHSQEQGRFHIENTDDLTTLIIMDVQKQDGGLYTLSLGNEFGSDSATVNIHIRSI

SEQ ID NO: 7377 - protein, 33423 aa, Homo sapiens
MTTQAPTFTQPLQSVVVLEGSTATFEAHISGFPVPEVSWFRDGQVISTSTLPGVQISFSDGRAKLTIPAVTKANSGRYSLKATNGSGQATSTAELLVKAETAPPNFVQRLQSMTVRQGSQVRLQVRVTGIPTPVVKFYRDGAEIQSSLDFQISQEGDLYSLLIAEAYPEDSGTYSVNATNSVGRATSTAELLVQGEEEVPAKKTKTIVSTAQISESRQTRIEKKIEAHFDARSIATVEMVIDGAAGQQLPHKTPPRIPPKPKSRSPTPPSIAAKAQLARQQSPSPIRHSPSPVRHVRAPTPSPVRSVSPAARISTSPIRSVRSPLLMRKTQASTVATGPEVPPPWKQEGYVASSSEAEMRETTLTTSTQIRTEERWEGRYGVQEQVTISGAAGAAASVSASASYAAEAVATGAKEVKQDADKSAAVATVVAAVDMARVREPVISAVEQTAQRTTTTAVHIQPAQEQVRKEAEKTAVTKVVVAADKAKEQELKSRTKEVITTKQEQMHVTHEQIRKETEKTFVPKVVISAAKAKEQETRISEEITKKQKQVTQEAIRQETEITAASMVVVATAKSTKLETVPGAQEETTTQQDQMHLSYEKIMKETRKTVVPKVIVATPKVKEQDLVSRGREGITTKREQVQITQEKMRKEAEKTALSTIAVATAKAKEQETILRTRETMATRQEQIQVTHGKVDVGKKAEAVATVVAAVDQARVREPREPGHLEESYAQQTTLEYGYKERISAAKVAEPPQRPASEPHVVPKAVKPRVIQAPSETHIKTTDQKGMHISSQIKKTTDLTTERLVHVDKRPRTASPHFTVSKISVPKTEHGYEASIAGSAIATLQKELSATSSAQKITKSVKAPTVKPSETRVRAEPTPLPQFPFADTPDTYKSEAGVEVKKEVGVSITGTTVREERFEVLHGREAKVTETARVPAPVEIPVTPPTLVSGLKNVTVIEGESVTLECHISGYPSPTVTWYREDYQIESSIDFQITFQSGIARLMIREAFAEDSGRFTCSAVNEAGTVSTSCYLAVQVSEEFEKETTAVTEKFTTEEKRFVESRDVVMTDTSLTEEQAGPGEPAAPYFITKPVVQKLVEGGSVVFGCQVGGNPKPHVYWKKSGVPLTTGYRYKVSYNKQTGECKLVISMTFADDAGEYTIVVRNKHGETSASASLLEEADYELLMKSQQEMLYQTQVTAFVQEPKVGETAPGFVYSEYEKEYEKEQALIRKKMAKDTVVVRTYVEDQEFHISSFEERLIKEIEYRIIKTTLEELLEEDGEEKMAVDISESEAVESGFDSRIKNYRILEGMGVTFHCKMSGYPLPKIAWYKDGKRIKHGERYQMDFLQDGRASLRIPVVLPEDEGIYTAFASNIKGNAICSGKLYVEPAAPLGAPTYIPTLEPVSRIRSLSPRSVSRSPIRMSPARMSPARMSPARMSPARMSPGRRLEETDESQLERLYKPVFVLKPVSFKCLEGQTARFDLKVVGRPMPETFWFHDGQQIVNDYTHKVVIKEDGTQSLIIVPATPSDSGEWTVVAQNRAGRSSISVILTVEAVEHQVKPMFVEKLKNVNIKEGSRLEMKVRATGNPNPDIVWLKNSDIIVPHKYPKIRIEGTKGEAALKIDSTVSQDSAWYTATAINKAGRDTTRCKVNVEVEFAEPEPERKLIIPRGTYRAKEIAAPELEPLHLRYGQEQWEEGDLYDKEKQQKPFFKKKLTSLRLKRFGPAHFECRLTPIGDPTMVVEWLHDGKPLEAANRLRMINEFGYCSLDYGVAYSRDSGIITCRATNKYGTDHTSATLIVKDEKSLVEESQLPEGRKGLQRIEELERMAHEGALTGVTTDQKEKQKPDIVLYPEPVRVLEGETARFRCRVTGYPQPKVNWYLNGQLIRKSKRFRVRYDGIHYLDIVDCKSYDTGEVKVTAENPEGVIEHKVKLEIQQREDFRSVLRRAPEPRPEFHVHEPGKLQFEVQKVDRPVDTTETKEVVKLKRAERITHEKVPEESEELRSKFKRRTEEGYYEAITAVELKSRKKDESYEELLRKTKDELLHWTKELTEEEKKALAEEGKITIPTFKPDKIELSPSMEAPKIFERIQSQTVGQGSDAHFRVRVVGKPDPECEWYKNGVKIERSDRIYWYWPEDNVCELVIRDVTAEDSASIMVKAINIAGETSSHAFLLVQAKQLITFTQELQDVVAKEKDTMATFECETSEPFVKVKWYKDGMEVHEGDKYRMHSDRKVHFLSILTIDTSDAEDYSCVLVEDENVKTTAKLIVEGAVVEFVKELQDIEVPESYSGELECIVSPENIEGKWYHNDVELKSNGKYTITSRRGRQNLTVKDVTKEDQGEYSFVIDGKKTTCKLKMKPRPIAILQGLSDQKVCEGDIVQLEVKVSLESVEGVWMKDGQEVQPSDRVHIVIDKQSHMLLIEDMTKEDAGNYSFTIPALGLSTSGRVSVYSVDVITPLKDVNVIEGTKAVLECKVSVPDVTSVKWYLNDEQIKPDDRVQAIVKGTKQRLVINRTHASDEGPYKLIVGRVETNCNLSVEKIKIIRGLRDLTCTETQNVVFEVELSHSGIDVLWNFKDKEIKPSSKYKIEAHGKIYKLTVLNMMKDDEGKYTFYAGENMTSGKLTVAGGAISKPLTDQTVAESQEAVFECEVANPDSKGEWLRDGKHLPLTNNIRSESDGHKRRLIIAATKLDDIGEYTYKVATSKTSAKLKVEAVKIKKTLKNLTVTETQDAVFTVELTHPNVKGVQWIKNGVVLESNEKYAISVKGTIYSLRIKNCAIVDESVYGFRLGRLGASARLHVETVKIIKKPKDVTALENATVAFEVSVSHDTVPVKWFHKSVEIKPSDKHRLVSERKVHKLMLQNISPSDAGEYTAVVGQLECKAKLFVETLHITKTMKNIEVPETKTASFECEVSHFNVPSMWLKNGVEIEMSEKFKIVVQGKLHQLIIMNTSTEDSAEYTFVCGNDQVSATLTVTPIMITSMLKDINAEEKDTITFEVTVNYEGISYKWLKNGVEIKSTDKCQMRTKKLTHSLNIRNVHFGDAADYTFVAGKATSTATLYVEARHIEFRKHIKDIKVLEKKRAMFECEVSEPDITVQWMKDDQELQITDRIKIQKEKYVHRLLIPSTRMSDAGKYTVVAGGNVSTAKLFVEGRDVRIRSIKKEVQVIEKQRAVVEFEVNEDDVDAHWYKDGIEINFQVQERHKYVVERRIHRMFISETRQSDAGEYTFVAGRNRSSVTLYVNAPEPPQVLQELQPVTVQSGKPARFCAVISGRPQPKISWYKEEQLLSTGFKCKFLHDGQEYTLLLIEAFPEDAAVYTCEAKNDYGVATTSASLSVEVPEVVSPDQEMPVYPPAIITPLQDTVTSEGQPARFQCRVSGTDLKVSWYSKDKKIKPSRFFRMTQFEDTYQLEIAEAYPEDEGTYTFVASNAVGQVSSTANLSLEAPESILHERIEQEIEMEMKAAPVIKRKIEPLEVALGHLAKFTCEIQSAPNVRFQWFKAGREIYESDKCSIRSSKYISSLEILRTQVVDCGEYTCKASNEYGSVSCTATLTVTEAYPPTFLSRPKSLTTFVGKAAKFICTVTGTPVIETIWQKDGAALSPSPNWRISDAENKHILELSNLTIQDRGVYSCKASNKFGADICQAELIIIDKPHFIKELEPVQSAINKKVHLECQVDEDRKVTVTWSKDGQKLPPGKDYKICFEDKIATLEIPLAKLKDSGTYVCTASNEAGSSSCSATVTVREPPSFVKKVDPSYLMLPGESARLHCKLKGSPVIQVTWFKNNKELSESNTVRMYFVNSEAILDITDVKVEDSGSYSCEAVNDVGSDSCSTEIVIKEPPSFIKTLEPADIVRGTNALLQCEVSGTGPFEISWFKDKKQIRSSKKYRLFSQKSLVCLEIFSFNSADVGEYECVVANEVGKCGCMATHLLKEPPTFVKKVDDLIALGGQTVTLQAAVRGSEPISVTWMKGQEVIREDGKIKMSFSNGVAVLIIPDVQISFGGKYTCLAENEAGSQTSVGELIVKEPAKIIERAELIQVTAGDPATLEYTVAGTPELKPKWYKDGRPLVASKKYRISFKNNVAQLKFYSAELHDSGQYTFEISNEVGSSSCETTFTVLDRDIAPFFTKPLRNVDSVVNGTCRLDCKIAGSLPMRVSWFKDGKEIAASDRYRIAFVEGTASLEIIRVDMNDAGNFTCRATNSVGSKDSSGALIVQEPPSFVTKPGSKDVLPGSAVCLKSTFQGSTPLTIRWFKGNKELVSGGSCYITKEALESSLELYLVKTSDSGTYTCKVSNVAGGVECSANLFVKEPATFVEKLEPSQLLKKGDATQLACKVTGTPPIKITWFANDREIKESSKHRMSFVESTAVLRLTDVGIEDSGEYMCEAQNEAGSDHCSSIVIVKESPYFTKEFKPIEVLKEYDVMLLAEVAGTPPFEITWFKDNTILRSGRKYKTFIQDHLVSLQILKFVAADAGEYQCRVTNEVGSSICSARVTLREPPSFIKKIESTSSLRGGTAAFQATLKGSLPITVTWLKDSDEITEDDNIRMTFENNVASLYLSGIEVKHDGKYVCQAKNDAGIQRCSALLSVKEPATITEEAVSIDVTQGDPATLQVKFSGTKEITAKWFKDGQELTLGSKYKISVTDTVSILKIISTEKKDSGEYTFEVQNDVGRSSCKARINVLDLIIPPSFTKKLKKMDSIKGSFIDLECIVAGSHPISIQWFKDDQEISASEKYKFSFHDNTAFLEISQLEGTDSGTYTCSATNKAGHNQCSGHLTVKEPPYFVEKPQSQDVNPNTRVQLKALVGGTAPMTIKWFKDNKELHSGAARSVWKDDTSTSLELFAAKATDSGTYICQLSNDVGTATSKATLFVKEPPQFIKKPSPVLVLRNGQSTTFECQITGTPKIRVSWYLDGNEITAIQKHGISFIDGLATFQISGARVENSGTYVCEARNDAGTASCSIELKVKEPPTFIRELKPVEVVKYSDVELECEVTGTPPFEVTWLKNNREIRSSKKYTLTDRVSVFNLHITKCDPSDTGEYQCIVSNEGGSCSCSTRVALKEPPSFIKKIENTTTVLKSSATFQSTVAGSPPISITWLKDDQILDEDDNVYISFVDSVATLQIRSVDNGHSGRYTCQAKNESGVERCYAFLLVQEPAQIVEKAKSVDVTEKDPMTLECVVAGTPELKVKWLKDGKQIVPSRYFSMSFENNVASFRIQSVMKQDSGQYTFKVENDFGSSSCDAYLRVLDQNIPPSFTKKLTKMDKVLGSSIHMECKVSGSLPISAQWFKDGKEISTSAKYRLVCHERSVSLEVNNLELEDTANYTCKVSNVAGDDACSGILTVKEPPSFLVKPGRQQAIPDSTVEFKAILKGTPPFKIKWFKDDVELVSGPKCFIGLEGSTSFLNLYSVDASKTGQYTCHVTNDVGSDSCTTMLLVTEPPKFVKKLEASKIVKAGDSSRLECKIAGSPEIRVVWFRNEHELPASDKYRMTFIDSVAVIQMNNLSTEDSGDFICEAQNPAGSTSCSTKVIVKEPPVFSSFPPIVETLKNAEVSLECELSGTPPFEVVWYKDKRQLRSSKKYKIASKNFHTSIHILNVDTSDIGEYHCKAQNEVGSDTCVCTVKLKEPPRFVSKLNSLTVVAGEPAELQASIEGAQPIFVQWLKEKEEVIRESENIRITFVENVATLQFAKAEPANAGKYICQIKNDGGMRENMATLMVLEPAVIVEKAGPMTVTVGETCTLECKVAGTPELSVEWYKDGKLLTSSQKHKFSFYNKISSLRILSVERQDAGTYTFQVQNNVGKSSCTAVVDVSDRAVPPSFTRRLKNTGGVLGASCILECKVAGSSPISVAWFHEKTKIVSGAKYQTTFSDNVCTLQLNSLDSSDMGNYTCVAANVAGSDECRAVLTVQEPPSFVKEPEPLEVLPGKNVTFTSVIRGTPPFKVNWFRGARELVKGDRCNIYFEDTVAELELFNIDISQSGEYTCVVSNNAGQASCTTRLFVKEPAAFLKRLSDHSVEPGKSIILESTYTGTLPISVTWKKDGFNITTSEKCNIVTTEKTCILEILNSTKRDAGQYSCEIENEAGRDVCGALVSTLEPPYFVTELEPLEAAVGDSVSLQCQVAGTPEITVSWYKGDTKLRPTPEYRTYFTNNVATLVFNKVNINDSGEYTCKAENSIGTASSKTVFRIQERQLPPSFARQLKDIEQTVGLPVTLTCRLNGSAPIQVCWYRDGVLLRDDENLQTSFVDNVATLKILQTDLSHSGQYSCSASNPLGTASSSARLTAREPKKSPFFDIKPVSIDVIAGESADFECHVTGAQPMRITWSKDNKEIRPGGNYTITCVGNTPHLRILKVGKGDSGQYTCQATNDVGKDMCSAQLSVKEPPKFVKKLEASKVAKQGESIQLECKISGSPEIKVSWFRNDSELHESWKYNMSFINSVALLTINEASAEDSGDYICEAHNGVGDASCSTALTVKAPPVFTQKPSPVGALKGSDVILQCEISGTPPFEVVWVKDRKQVRNSKKFKITSKHFDTSLHILNLEASDVGEYHCKATNEVGSDTCSCSVKFKEPPRFVKKLSDTSTLIGDAVELRAIVEGFQPISVVWLKDRGEVIRESENTRISFIDNIATLQLGSPEASNSGKYICQIKNDAGMRECSAVLTVLEPARIIEKPEPMTVTTGNPFALECVVTGTPELSAKWFKDGRELSADSKHHITFINKVASLKIPCAEMSDKGLYSFEVKNSVGKSNCTVSVHVSDRIVPPSFIRKLKDVNAILGASVVLECRVSGSAPISVGWFQDGNEIVSGPKCQSSFSENVCTLNLSLLEPSDTGIYTCVAANVAGSDECSAVLTVQEPPSFEQTPDSVEVLPGMSLTFTSVIRGTPPFKVKWFKGSRELVPGESCNISLEDFVTELELFEVQPLESGDYSCLVTNDAGSASCTTHLFVKEPATFVKRLADFSVETGSPIVLEATYTGTPPISVSWIKDEYLISQSERCSITMTEKSTILEILESTIEDYAQYSCLIENEAGQDICEALVSVLEPPYFIEPLEHVEAVIGEPATLQCKVDGTPEIRISWYKEHTKLRSAPAYKMQFKNNVASLVINKVDHSDVGEYSCKADNSVGAVASSAVLVIKARKLPPFFARKLKDVHETLGFPVAFECRINGSEPLQVSWYKDGVLLKDDANLQTSFVHNVATLQILQTDQSHIGQYNCSASNPLGTASSSAKLILSEHEVPPFFDLKPVSVDLALGESGTFKCHVTGTAPIKITWAKDNREIRPGGNYKMTLVENTATLTVLKVGKGDAGQYTCYASNIAGKDSCSAQLGVQEPPRFIKKLEPSRIVKQDEFTRYECKIGGSPEIKVLWYKDETEIQESSKFRMSFVDSVAVLEMHNLSVEDSGDYTCEAHNAAGSASSSTSLKVKEPPIFRKKPHPIETLKGADVHLECELQGTPPFHVSWYKDKRELRSGKKYKIMSENFLTSIHILNVDAADIGEYQCKATNDVGSDTCVGSIALKAPPRFVKKLSDISTVVGKEVQLQTTIEGAEPISVVWFKDKGEIVRESDNIWISYSENIATLQFSRVEPANAGKYTCQIKNDAGMQECFATLSVLEPATIVEKPESIKVTTGDTCTLECTVAGTPELSTKWFKDGKELTSDNKYKISFFNKVSGLKIINVAPSDSGVYSFEVQNPVGKDSCTASLQVSDRTVPPSFTRKLKETNGLSGSSVVMECKVYGSPPISVSWFHEGNEISSGRKYQTTLTDNTCALTVNMLEESDSGDYTCIATNMAGSDECSAPLTVREPPSFVQKPDPMDVLTGTNVTFTSIVKGTPPFSVSWFKGSSELVPGDRCNVSLEDSVAELELFDVDTSQSGEYTCIVSNEAGKASCTTHLYIKAPAKFVKRLNDYSIEKGKPLILEGTFTGTPPISVTWKKNGINVTPSQRCNITTTEKSAILEIPSSTVEDAGQYNCYIENASGKDSCSAQILILEPPYFVKQLEPVKVSVGDSASLQCQLAGTPEIGVSWYKGDTKLRPTTTYKMHFRNNVATLVFNQVDINDSGEYICKAENSVGEVSASTFLTVQEQKLPPSFSRQLRDVQETVGLPVVFDCAISGSEPISVSWYKDGKPLKDSPNVQTSFLDNTATLNIFKTDRSLAGQYSCTATNPIGSASSSARLILTEGKNPPFFDIRLAPVDAVVGESADFECHVTGTQPIKVSWAKDSREIRSGGKYQISYLENSAHLTVLKVDKGDSGQYTCYAVNEVGKDSCTAQLNIKERLIPPSFTKRLSETVEETEGNSFKLEGRVAGSQPITVAWYKNNIEIQPTSNCEITFKNNTLVLQVRKAGMNDAGLYTCKVSNDAGSALCTSSIVIKEPKKPPVFDQHLTPVTVSEGEYVQLSCHVQGSEPIRIQWLKAGREIKPSDRCSFSFASGTAVLELRDVAKADSGDYVCKASNVAGSDTTKSKVTIKDKPAVAPATKKAAVDGRLFFVSEPQSIRVVEKTTATFIAKVGGDPIPNVKWTKGKWRQLNQGGRVFIHQKGDEAKLEIRDTTKTDSGLYRCVAFNEHGEIESNVNLQVDERKKQEKIEGDLRAMLKKTPILKKGAGEEEEIDIMELLKNVDPKEYEKYARMYGITDFRGLLQAFELLKQSQEEETHRLEIEEIERSERDEKEFEELVSFIQQRLSQTEPVTLIKDIENQTVLKDNDAVFEIDIKINYPEIKLSWYKGTEKLEPSDKFEISIDGDRHTLRVKNCQLKDQGNYRLVCGPHIASAKLTVIEPAWERHLQDVTLKEGQTCTMTCQFSVPNVKSEWFRNGRILKPQGRHKTEVEHKVHKLTIADVRAEDQGQYTCKYEDLETSAELRIEAEPIQFTKRIQNIVVSEHQSATFECEVSFDDAIVTWYKGPTELTESQKYNFRNDGRCHYMTIHNVTPDDEGVYSVIARLEPRGEARSTAELYLTTKEIKLELKPPDIPDSRVPIPTMPIRAVPPEEIPPVVAPPIPLLLPTPEEKKPPPKRIEVTKKAVKKDAKKVVAKPKEMTPREEIVKKPPPPTTLIPAKAPEIIDVSSKAEEVKIMTITRKKEVQKEKEAVYEKKQAVHKEKRVFIESFEEPYDELEVEPYTEPFEQPYYEEPDEDYEEIKVEAKKEVHEEWEEDFEEGQEYYEREEGYDEGEEEWEEAYQEREVIQVQKEVYEESHERKVPAKVPEKKAPPPPKVIKKPVIEKIEKTSRRMEEEKVQVTKVPEVSKKIVPQKPSRTPVQEEVIEVKVPAVHTKKMVISEEKMFFASHTEEEVSVTVPEVQKEIVTEEKIHVAISKRVEPPPKVPELPEKPAPEEVAPVPIPKKVEPPAPKVPEVPKKPVPEEKKPVPVPKKEPAAPPKVPEVPKKPVPEEKIPVPVAKKKEAPPAKVPEVQKGVVTEEKITIVTQREESPPPAVPEIPKKKVPEERKPVPRKEEEVPPPPKVPALPKKPVPEEKVAVPVPVAKKAPPPRAEVSKKTVVEEKRFVAEEKLSFAVPQRVEVTRHEVSAEEEWSYSEEEEGVSISVYREEEREEEEEAEVTEYEVMEEPEEYVVEEKLHIISKRVEAEPAEVTERQEKKIVLKPKIPAKIEEPPPAKVPEAPKKIVPEKKVPAPVPKKEKVPPPKVPEEPKKPVPEKKVPPKVIKMEEPLPAKVTERHMQITQEEKVLVAVTKKEAPPKARVPEEPKRAVPEEKVLKLKPKREEEPPAKVTEFRKRVVKEEKVSIEAPKREPQPIKEVTIMEEKERAYTLEEEAVSVQREEEYEEYEEYDYKEFEEYEPTEEYDQYEEYEEREYERYEEHEEYITEPEKPIPVKPVPEEPVPTKPKAPPAKVLKKAVPEEKVPVPIPKKLKPPPPKVPEEPKKVFEEKIRISITKREKEQVTEPAAKVPMKPKRVVAEEKVPVPRKEVAPPVRVPEVPKELEPEEVAFEEEVVTHVEEYLVEEEEEYIHEEEEFITEEEVVPVIPVKVPEVPRKPVPEEKKPVPVPKKKEAPPAKVPEVPKKPEEKVPVLIPKKEKPPPAKVPEVPKKPVPEEKVPVPVPKKVEAPPAKVPEVPKKPVPEKKVPVPAPKKVEAPPAKVPEVPKKLIPEEKKPTPVPKKVEAPPPKVPKKREPVPVPVALPQEEEVLFEEEIVPEEEVLPEEEEVLPEEEEVLPEEEEVLPEEEEIPPEEEEVPPEEEYVPEEEEFVPEEEVLPEVKPKVPVPAPVPEIKKKVTEKKVVIPKKEEAPPAKVPEVPKKVEEKRIILPKEEEVLPVEVTEEPEEEPISEEEIPEEPPSIEEVEEVAPPRVPEVIKKAVPEAPTPVPKKVEAPPAKVSKKIPEEKVPVPVQKKEAPPAKVPEVPKKVPEKKVLVPKKEAVPPAKGRTVLEEKVSVAFRQEVVVKERLELEVVEAEVEEIPEEEEFHEVEEYFEEGEFHEVEEFIKLEQHRVEEEHRVEKVHRVIEVFEAEEVEVFEKPKAPPKGPEISEKIIPPKKPPTKVVPRKEPPAKVPEVPKKIVVEEKVRVPEEPRVPPTKVPEVLPPKEVVPEKKVPVPPAKKPEAPPPKVPEAPKEVVPEKKVPVPPPKKPEVPPTKVPEVPKAAVPEKKVPEAIPPKPESPPPEVPEAPKEVVPEKKVPAAPPKKPEVTPVKVPEAPKEVVPEKKVPVPPPKKPEVPPTKVPEVPKVAVPEKKVPEAIPPKPESPPPEVFEEPEEVALEEPPAEVVEEPEPAAPPQVTVPPKKPVPEKKAPAVVAKKPELPPVKVPEVPKEVVPEKKVPLVVPKKPEAPPAKVPEVPKEVVPEKKVAVPKKPEVPPAKVPEVPKKPVLEEKPAVPVPERAESPPPEVYEEPEEIAPEEEIAPEEEKPVPVAEEEEPEVPPPAVPEEPKKIIPEKKVPVIKKPEAPPPKEPEPEKVIEKPKLKPRPPPPPPAPPKEDVKEKIFQLKAIPKKKVPEKPQVPEKVELTPLKVPGGEKKVRKLLPERKPEPKEEVVLKSVLRKRPEEEEPKVEPKKLEKVKKPAVPEPPPPKPVEEVEVPTVTKRERKIPEPTKVPEIKPAIPLPAPEPKPKPEAEVKTIKPPPVEPEPTPIAAPVTVPVVGKKAEAKAPKEEAAKPKGPIKGVPKKTPSPIEAERRKLRPGSGGEKPPDEAPFTYQLKAVPLKFVKEIKDIILTESEFVGSSAIFECLVSPSTAITTWMKDGSNIRESPKHRFIADGKDRKLHIIDVQLSDAGEYTCVLRLGNKEKTSTAKLVVEELPVRFVKTLEEEVTVVKGQPLYLSCELNKERDVVWRKDGKIVVEKPGRIVPGVIGLMRALTINDADDTDAGTYTVTVENANNLECSSCVKVVEVIRDWLVKPIRDQHVKPKGTAIFACDIAKDTPNIKWFKGYDEIPAEPNDKTEILRDGNHLYLKIKNAMPEDIAEYAVEIEGKRYPAKLTLGEREVELLKPIEDVTIYEKESASFDAEISEADIPGQWKLKGELLRPSPTCEIKAEGGKRFLTLHKVKLDQAGEVLYQALNAITTAILTVKEIELDFAVPLKDVTVPERRQARFECVLTREANVIWSKGPDIIKSSDKFDIIADGKKHILVINDSQFDDEGVYTAEVEGKKTSARLFVTGIRLKFMSPLEDQTVKEGETATFVCELSHEKMHVVWFKNDAKLHTSRTVLISSEGKTHKLEMKEVTLDDISQIKAQVKELSSTAQLKVLEADPYFTVKLHDKTAVEKDEITLKCEVSKDVPVKWFKDGEEIVPSPKYSIKADGLRRILKIKKADLKDKGEYVCDCGTDKTKANVTVEARLIKVEKPLYGVEVFVGETAHFEIELSEPDVHGQWKLKGQPLTASPDCEIIEDGKKHILILHNCQLGMTGEVSFQAANAKSAANLKVKELPLIFITPLSDVKVFEKDEAKFECEVSREPKTFRWLKGTQEITGDDRFELIKDGTKHSMVIKSAAFEDEAKYMFEAEDKHTSGKLIIEGIRLKFLTPLKDVTAKEKESAVFTVELSHDNIRVKWFKNDQRLHTTRSVSMQDEGKTHSITFKDLSIDDTSQIRVEAMGMSSEAKLTVLEGDPYFTGKLQDYTGVEKDEVILQCEISKADAPVKWFKDGKEIKPSKNAVIKADGKKRMLILKKALKSDIGQYTCDCGTDKTSGKLDIEDREIKLVRPLHSVEVMETETARFETEISEDDIHANWKLKGEALLQTPDCEIKEEGKIHSLVLHNCRLDQTGGVDFQAANVKSSAHLRVKPRVIGLLRPLKDVTVTAGETATFDCELSYEDIPVEWYLKGKKLEPSDKVVPRSEGKVHTLTLRDVKLEDAGEVQLTAKDFKTHANLFVKEPPVEFTKPLEDQTVEEGATAVLECEVSRENAKVKWFKNGTEILKSKKYEIVADGRVRKLVIHDCTPEDIKTYTCDAKDFKTSCNLNVVPPHVEFLRPLTDLQVREKEMARFECELSRENAKVKWFKDGAEIKKGKKYDIISKGAVRILVINKCLLDDEAEYSCEVRTARTSGMLTVLEEEAVFTKNLANIEVSETDTIKLVCEVSKPGAEVIWYKGDEEIIETGRYEILTEGRKRILVIQNAHLEDAGNYNCRLPSSRTDGKVKVHELAAEFISKPQNLEILEGEKAEFVCSISKESFPVQWKRDDKTLESGDKYDVIADGKKRVLVVKDATLQDMGTYVVMVGAARAAAHLTVIEKLRIVVPLKDTRVKEQQEVVFNCEVNTEGAKAKWFRNEEAIFDSSKYIILQKDLVYTLRIRDAHLDDQANYNVSLTNHRGENVKSAANLIVEEEDLRIVEPLKDIETMEKKSVTFWCKVNRLNVTLKWTKNGEEVPFDNRVSYRVDKYKHMLTIKDCGFPDEGEYIVTAGQDKSVAELLIIEAPTEFVEHLEDQTVTEFDDAVFSCQLSREKANVKWYRNGREIKEGKKYKFEKDGSIHRLIIKDCRLDDECEYACGVEDRKSRARLFVEEIPVEIIRPPQDILEAPGADVVFLAELNKDKVEVQWLRNNMVVVQGDKHQMMSEGKIHRLQICDIKPRDQGEYRFIAKDKEARAKLELAAAPKIKTADQDLVVDVGKPLTMVVPYDAYPKAEAEWFKENEPLSTKTIDTTAEQTSFRILEAKKGDKGRYKIVLQNKHGKAEGFINLKVIDVPGPVRNLEVTETFDGEVSLAWEEPLTDGGSKIIGYVVERRDIKRKTWVLATDRAESCEFTVTGLQKGGVEYLFRVSARNRVGTGEPVETDNPVEARSKYDVPGPPLNVTITDVNRFGVSLTWEPPEYDGGAEITNYVIELRDKTSIRWDTAMTVRAEDLSATVTDVVEGQEYSFRVRAQNRIGVGKPSAATPFVKVADPIERPSPPVNLTSSDQTQSSVQLKWEPPLKDGGSPILGYIIERCEEGKDNWIRCNMKLVPELTYKVTGLEKGNKYLYRVSAENKAGVSDPSEILGPLTADDAFVEPTMDLSAFKDGLEVIVPNPITILVPSTGYPRPTATWCFGDKVLETGDRVKMKTLSAYAELVISPSERSDKGIYTLKLENRVKTISGEIDVNVIARPSAPKELKFGDITKDSVHLTWEPPDDDGGSPLTGYVVEKREVSRKTWTKVMDFVTDLEFTVPDLVQGKEYLFKVCARNKCGPGEPAYVDEPVNMSTPATVPDPPENVKWRDRTANSIFLTWDPPKNDGGSRIKGYIVERCPRGSDKWVACGEPVAETKMEVTGLEEGKWYAYRVKALNRQGASKPSRPTEEIQAVDTQEAPEIFLDVKLLAGLTVKAGTKIELPATVTGKPEPKITWTKADMILKQDKRITIENVPKKSTVTIVDSKRSDTGTYIIEAVNVCGRATAVVEVNVLDKPGPPAAFDITDVTNESCLLTWNPPRDDGGSKITNYVVERRATDSEVWHKLSSTVKDTNFKATKLIPNKEYIFRVAAENMYGVGEPVQASPITAKYQFDPPGPPTRLEPSDITKDAVTLTWCEPDDDGGSPITGYWVERLDPDTDKWVRCNKMPVKDTTYRVKGLTNKKKYRFRVLAENLAGPGKPSKSTEPILIKDPIDPPWPPGKPTVKDVGKTSVRLNWTKPEHDGGAKIESYVIEMLKTGTDEWVRVAEGVPTTQHLLPGLMEGQEYSFRVRAVNKAGESEPSEPSDPVLCREKLYPPSPPRWLEVINITKNTADLKWTVPEKDGGSPITNYIVEKRDVRRKGWQTVDTTVKDTKCTVTPLTEGSLYVFRVAAENAIGQSDYTEIEDSVLAKDTFTTPGPPYALAVVDVTKRHVDLKWEPPKNDGGRPIQRYVIEKKERLGTRWVKAGKTAGPDCNFRVTDVIEGTEVQFQVRAENEAGVGHPSEPTEILSIEDPTSPPSPPLDLHVTDAGRKHIAIAWKPPEKNGGSPIIGYHVEMCPVGTEKWMRVNSRPIKDLKFKVEEGVVPDKEYVLRVRAVNAIGVSEPSEISENVVAKDPDCKPTIDLETHDIIVIEGEKLSIPVPFRAVPVPTVSWHKDGKEVKASDRLTMKNDHISAHLEVPKSVRADAGIYTITLENKLGSATASINVKVIGLPGPCKDIKASDITKSSCKLTWEPPEFDGGTPILHYVLERREAGRRTYIPVMSGENKLSWTVKDLIPNGEYFFRVKAVNKVGGGEYIELKNPVIAQDPKQPPDPPVDVEVHNPTAEAMTITWKPPLYDGGSKIMGYIIEKIAKGEERWKRCNEHLVPILTYTAKGLEEGKEYQFRVRAENAAGISEPSRATPPTKAVDPIDAPKVILRTSLEVKRGDEIALDASISGSPYPTITWIKDENVIVPEEIKKRAAPLVRRRKGEVQEEEPFVLPLTQRLSIDNSKKGESQLRVRDSLRPDHGLYMIKVENDHGIAKAPCTVSVLDTPGPPINFVFEDIRKTSVLCKWEPPLDDGGSEIINYTLEKKDKTKPDSEWIVVTSTLRHCKYSVTKLIEGKEYLFRVRAENRFGPGPPCVSKPLVAKDPFGPPDAPDKPIVEDVTSNSMLVKWNEPKDNGSPILGYWLEKREVNSTHWSRVNKSLLNALKANVDGLLEGLTYVFRVCAENAAGPGKFSPPSDPKTAHDPISPPGPPIPRVTDTSSTTIELEWEPPAFNGGGEIVGYFVDKQLVGTNEWSRCTEKMIKVRQYTVKEIREGADYKLRVSAVNAAGEGPPGETQPVTVAEPQEPPAVELDVSVKGGIQIMAGKTLRIPAVVTGRPVPTKVWTKEEGELDKDRVVIDNVGTKSELIIKDALRKDHGRYVITATNSCGSKFAAARVEVFDVPGPVLDLKPVVTNRKMCLLNWSDPEDDGGSEITGFIIERKDAKMHTWRQPIETERSKCDITGLLEGQEYKFRVIAKNKFGCGPPVEIGPILAVDPLGPPTSPERLTYTERTKSTITLDWKEPRSNGGSPIQGYIIEKRRHDKPDFERVNKRLCPTTSFLVENLDEHQMYEFRVKAVNEIGESEPSLPLNVVIQDDEVPPTIKLRLSVRGDTIKVKAGEPVHIPADVTGLPMPKIEWSKNETVIEKPTDALQITKEEVSRSEAKTELSIPKAVREDKGTYTVTASNRLGSVFRNVHVEVYDRPSPPRNLAVTDIKAESCYLTWDAPLDNGGSEITHYVIDKRDASRKKAEWEEVTNTAVEKRYGIWKLIPNGQYEFRVRAVNKYGISDECKSDKVVIQDPYRLPGPPGKPKVLARTKGSMLVSWTPPLDNGGSPITGYWLEKREEGSPYWSRVSRAPITKVGLKGVEFNVPRLLEGVKYQFRAMAINAAGIGPPSEPSDPEVAGDPIFPPGPPSCPEVKDKTKSSISLGWKPPAKDGGSPIKGYIVEMQEEGTTDWKRVNEPDKLITTCECVVPNLKELRKYRFRVKAVNEAGESEPSDTTGEIPATDIQEEPEVFIDIGAQDCLVCKAGSQIRIPAVIKGRPTPKSSWEFDGKAKKAMKDGVHDIPEDAQLETAENSSVIIIPECKRSHTGKYSITAKNKAGQKTANCRVKVMDVPGPPKDLKVSDITRGSCRLSWKMPDDDGGDRIKGYVIEKRTIDGKAWTKVNPDCGSTTFVVPDLLSEQQYFFRVRAENRFGIGPPVETIQRTTARDPIYPPDPPIKLKIGLITKNTVHLSWKPPKNDGGSPVTHYIVECLAWDPTGTKKEAWRQCNKRDVEELQFTVEDLVEGGEYEFRVKAVNAAGVSKPSATVGPVTVKDQTCPPSIDLKEFMEVEEGTNVNIVAKIKGVPFPTLTWFKAPPKKPDNKEPVLYDTHVNKLVVDDTCTLVIPQSRRSDTGLYTITAVNNLGTASKEMRLNVLGRPGPPVGPIKFESVSADQMTLSWFPPKDDGGSKITNYVIEKREANRKTWVHVSSEPKECTYTIPKLLEGHEYVFRIMAQNKYGIGEPLDSEPETARNLFSVPGAPDKPTVSSVTRNSMTVNWEEPEYDGGSPVTGYWLEMKDTTSKRWKRVNRDPIKAMTLGVSYKVTGLIEGSDYQFRVYAINAAGVGPASLPSDPATARDPIAPPGPPFPKVTDWTKSSADLEWSPPLKDGGSKVTGYIVEYKEEGKEEWEKGKDKEVRGTKLVVTGLKEGAFYKFRVRAVNIAGIGEPGEVTDVIEMKDRLVSPDLQLDASVRDRIVVHAGGVIRIIAYVSGKPPPTVTWNMNERTLPQEATIETTAISSSMVIKNCQRSHQGVYSLLAKNEAGERKKTIIVDVLDVPGPVGTPFLAHNLTNESCKLTWFSPEDDGGSPITNYVIEKRESDRRAWTPVTYTVTRQNATVQGLIQGKAYFFRIAAENSIGMGPFVETSEALVIREPITVPERPEDLEVKEVTKNTVTLTWNPPKYDGGSEIINYVLESRLIGTEKFHKVTNDNLLSRKYTVKGLKEGDTYEYRVSAVNIVGQGKPSFCTKPITCKDELAPPTLHLDFRDKLTIRVGEAFALTGRYSGKPKPKVSWFKDEADVLEDDRTHIKTTPATLALEKIKAKRSDSGKYCVVVENSTGSRKGFCQVNVVDRPGPPVGPVSFDEVTKDYMVISWKPPLDDGGSKITNYIIEKKEVGKDVWMPVTSASAKTTCKVSKLLEGKDYIFRIHAENLYGISDPLVSDSMKAKDRFRVPDAPDQPIVTEVTKDSALVTWNKPHDGGKPITNYILEKRETMSKRWARVTKDPIHPYTKFRVPDLLEGCQYEFRVSAENEIGIGDPSPPSKPVFAKDPIAKPSPPVNPEAIDTTCNSVDLTWQPPRHDGGSKILGYIVEYQKVGDEEWRRANHTPESCPETKYKVTGLRDGQTYKFRVLAVNAAGESDPAHVPEPVLVKDRLEPPELILDANMAREQHIKVGDTLRLSAIIKGVPFPKVTWKKEDRDAPTKARIDVTPVGSKLEIRNAAHEDGGIYSLTVENPAGSKTVSVKVLVLDKPGPPRDLEVSEIRKDSCYLTWKEPLDDGGSVITNYVVERRDVASAQWSPLSATSKKKSHFAKHLNEGNQYLFRVAAENQYGRGPFVETPKPIKALDPLHPPGPPKDLHHVDVDKTEVSLVWNKPDRDGGSPITGYLVEYQEEGTQDWIKFKTVTNLECVVTGLQQGKTYRFRVKAENIVGLGLPDTTIPIECQEKLVPPSVELDVKLIEGLVVKAGTTVRFPAIIRGVPVPTAKWTTDGSEIKTDEHYTVETDNFSSVLTIKNCLRRDTGEYQITVSNAAGSKTVAVHLTVLDVPGPPTGPINILDVTPEHMTISWQPPKDDGGSPVINYIVEKQDTRKDTWGVVSSGSSKTKLKIPHLQKGCEYVFRVRAENKIGVGPPLDSTPTVAKHKFSPPSPPGKPVVTDITENAATVSWTLPKSDGGSPITGYYMERREVTGKWVRVNKTPIADLKFRVTGLYEGNTYEFRVFAENLAGLSKPSPSSDPIKACRPIKPPGPPINPKLKDKSRETADLVWTKPLSDGGSPILGYVVECQKPGTAQWNRINKDELIRQCAFRVPGLIEGNEYRFRIKAANIVGEGEPRELAESVIAKDILHPPEVELDVTCRDVITVRVGQTIRILARVKGRPEPDITWTKEGKVLVREKRVDLIQDLPRVELQIKEAVRADHGKYIISAKNSSGHAQGSAIVNVLDRPGPCQNLKVTNVTKENCTISWENPLDNGGSEITNFIVEYRKPNQKGWSIVASDVTKRLIKANLLANNEYYFRVCAENKVGVGPTIETKTPILAINPIDRPGEPENLHIADKGKTFVYLKWRRPDYDGGSPNLSYHVERRLKGSDDWERVHKGSIKETHYMVDRCVENQIYEFRVQTKNEGGESDWVKTEEVVVKEDLQKPVLDLKLSGVLTVKAGDTIRLEAGVRGKPFPEVAWTKDKDATDLTRSPRVKIDTRADSSKFSLTKAKRSDGGKYVVTATNTAGSFVAYATVNVLDKPGPVRNLKIVDVSSDRCTVCWDPPEDDGGCEIQNYILEKCETKRMVWSTYSATVLTPGTTVTRLIEGNEYIFRVRAENKIGTGPPTESKPVIAKTKYDKPGRPDPPEVTKVSKEEMTVVWNPPEYDGGKSITGYFLEKKEKHSTRWVPVNKSAIPERRMKVQNLLPDHEYQFRVKAENEIGIGEPSLPSRPVVAKDPIEPPGPPTNFRVVDTTKHSITLGWGKPVYDGGAPIIGYVVEMRPKIADASPDEGWKRCNAAAQLVRKEFTVTSLDENQEYEFRVCAQNQVGIGRPAELKEAIKPKEILEPPEIDLDASMRKLVIVRAGCPIRLFAIVRGRPAPKVTWRKVGIDNVVRKGQVDLVDTMAFLVIPNSTRDDSGKYSLTLVNPAGEKAVFVNVRVLDTPGPVSDLKVSDVTKTSCHVSWAPPENDGGSQVTHYIVEKREADRKTWSTVTPEVKKTSFHVTNLVPGNEYYFRVTAVNEYGPGVPTDVPKPVLASDPLSEPDPPRKLEVTEMTKNSATLAWLPPLRDGGAKIDGYITSYREEEQPADRWTEYSVVKDLSLVVTGLKEGKKYKFRVAARNAVGVSLPREAEGVYEAKEQLLPPKILMPEQITIKAGKKLRIEAHVYGKPHPTCKWKKGEDEVVTSSHLAVHKADSSSILIIKDVTRKDSGYYSLTAENSSGTDTQKIKVVVMDAPGPPQPPFDISDIDADACSLSWHIPLEDGGSNITNYIVEKCDVSRGDWVTALASVTKTSCRVGKLIPGQEYIFRVRAENRFGISEPLTSPKMVAQFPFGVPSEPKNARVTKVNKDCIFVAWDRPDSDGGSPIIGYLIERKERNSLLWVKANDTLVRSTEYPCAGLVEGLEYSFRIYALNKAGSSPPSKPTEYVTARMPVDPPGKPEVIDVTKSTVSLIWARPKHDGGSKIIGYFVEACKLPGDKWVRCNTAPHQIPQEEYTATGLEEKAQYQFRAIARTAVNISPPSEPSDPVTILAENVPPRIDLSVAMKSLLTVKAGTNVCLDATVFGKPMPTVSWKKDGTLLKPAEGIKMAMQRNLCTLELFSVNRKDSGDYTITAENSSGSKSATIKLKVLDKPGPPASVKINKMYSDRAMLSWEPPLEDGGSEITNYIVDKRETSRPNWAQVSATVPITSCSVEKLIEGHEYQFRICAENKYGVGDPVFTEPAIAKNPYDPPGRCDPPVISNITKDHMTVSWKPPADDGGSPITGYLLEKRETQAVNWTKVNRKPIIERTLKATGLQEGTEYEFRVTAINKAGPGKPSDASKAAYARDPQYPPGPPAFPKVYDTTRSSVSLSWGKPAYDGGSPIIGYLVEVKRADSDNWVRCNLPQNLQKTRFEVTGLMEDTQYQFRVYAVNKIGYSDPSDVPDKHYPKDILIPPEGELDADLRKTLILRAGVTMRLYVPVKGRPPPKITWSKPNVNLRDRIGLDIKSTDFDTFLRCENVNKYDAGKYILTLENSCGKKEYTIVVKVLDTPGPPVNVTVKEISKDSAYVTWEPPIIDGGSPIINYVVQKRDAERKSWSTVTTECSKTSFRVANLEEGKSYFFRVFAENEYGIGDPGETRDAVKASQTPGPVVDLKVRSVSKSSCSIGWKKPHSDGGSRIIGYVVDFLTEENKWQRVMKSLSLQYSAKDLTEGKEYTFRVSAENENGEGTPSEITVVARDDVVAPDLDLKGLPDLCYLAKENSNFRLKIPIKGKPAPSVSWKKGEDPLATDTRVSVESSAVNTTLIVYDCQKSDAGKYTITLKNVAGTKEGTISIKVVGKPGIPTGPIKFDEVTAEAMTLKWAPPKDDGGSEITNYILEKRDSVNNKWVTCASAVQKTTFRVTRLHEGMEYTFRVSAENKYGVGEGLKSEPIVARHPFDVPDAPPPPNIVDVRHDSVSLTWTDPKKTGGSPITGYHLEFKERNSLLWKRANKTPIRMRDFKVTGLTEGLEYEFRVMAINLAGVGKPSLPSEPVVALDPIDPPGKPEVINITRNSVTLIWTEPKYDGGHKLTGYIVEKRDLPSKSWMKANHVNVPECAFTVTDLVEGGKYEFRIRAKNTAGAISAPSESTETIICKDEYEAPTIVLDPTIKDGLTIKAGDTIVLNAISILGKPLPKSSWSKAGKDIRPSDITQITSTPTSSMLTIKYATRKDAGEYTITATNPFGTKVEHVKVTVLDVPGPPGPVEISNVSAEKATLTWTPPLEDGGSPIKSYILEKRETSRLLWTVVSEDIQSCRHVATKLIQGNEYIFRVSAVNHYGKGEPVQSEPVKMVDRFGPPGPPEKPEVSNVTKNTATVSWKRPVDDGGSEITGYHVERREKKSLRWVRAIKTPVSDLRCKVTGLQEGSTYEFRVSAENRAGIGPPSEASDSVLMKDAAYPPGPPSNPHVTDTTKKSASLAWGKPHYDGGLEITGYVVEHQKVGDEAWIKDTTGTALRITQFVVPDLQTKEKYNFRISAINDAGVGEPAVIPDVEIVEREMAPDFELDAELRRTLVVRAGLSIRIFVPIKGRPAPEVTWTKDNINLKNRANIENTESFTLLIIPECNRYDTGKFVMTIENPAGKKSGFVNVRVLDTPGPVLNLRPTDITKDSVTLHWDLPLIDGGSRITNYIVEKREATRKSYSTATTKCHKCTYKVTGLSEGCEYFFRVMAENEYGIGEPTETTEPVKASEAPSPPDSLNIMDITKSTVSLAWPKPKHDGGSKITGYVIEAQRKGSDQWTHITTVKGLECVVRNLTEGEEYTFQVMAVNSAGRSAPRESRPVIVKEQTMLPELDLRGIYQKLVIAKAGDNIKVEIPVLGRPKPTVTWKKGDQILKQTQRVNFETTATSTILNINECVRSDSGPYPLTARNIVGEVGDVITIQVHDIPGPPTGPIKFDEVSSDFVTFSWDPPENDGGVPISNYVVEMRQTDSTTWVELATTVIRTTYKATRLTTGLEYQFRVKAQNRYGVGPGITSACIVANYPFKVPGPPGTPQVTAVTKDSMTISWHEPLSDGGSPILGYHVERKERNGILWQTVSKALVPGNIFKSSGLTDGIAYEFRVIAENMAGKSKPSKPSEPMLALDPIDPPGKPVPLNITRHTVTLKWAKPEYTGGFKITSYIVEKRDLPNGRWLKANFSNILENEFTVSGLTEDAAYEFRVIAKNAAGAISPPSEPSDAITCRDDVEAPKIKVDVKFKDTVILKAGEAFRLEADVSGRPPPTMEWSKDGKELEGTAKLEIKIADFSTNLVNKDSTRRDSGAYTLTATNPGGFAKHIFNVKVLDRPGPPEGPLAVTEVTSEKCVLSWFPPLDDGGAKIDHYIVQKRETSRLAWTNVASEVQVTKLKVTKLLKGNEYIFRVMAVNKYGVGEPLESEPVLAVNPYGPPDPPKNPEVTTITKDSMVVCWGHPDSDGGSEIINYIVERRDKAGQRWIKCNKKTLTDLRYKVSGLTEGHEYEFRIMAENAAGISAPSPTSPFYKACDTVFKPGPPGNPRVLDTSRSSISIAWNKPIYDGGSEITGYMVEIALPEEDEWQIVTPPAGLKATSYTITGLTENQEYKIRIYAMNSEGLGEPALVPGTPKAEDRMLPPEIELDADLRKVVTIRACCTLRLFVPIKGRPAPEVKWARDHGESLDKASIESTSSYTLLIVGNVNRFDSGKYILTVENSSGSKSAFVNVRVLDTPGPPQDLKVKEVTKTSVTLTWDPPLLDGGSKIKNYIVEKRESTRKAYSTVATNCHKTSWKVDQLQEGCSYYFRVLAENEYGIGLPAETAESVKASERPLPPGKITLMDVTRNSVSLSWEKPEHDGGSRILGYIVEMQTKGSDKWATCATVKVTEATITGLIQGEEYSFRVSAQNEKGISDPRQLSVPVIAKDLVIPPAFKLLFNTFTVLAGEDLKVDVPFIGRPTPAVTWHKDNVPLKQTTRVNAESTENNSLLTIKDACREDVGHYVVKLTNSAGEAIETLNVIVLDKPGPPTGPVKMDEVTADSITLSWGPPKYDGGSSINNYIVEKRDTSTTTWQIVSATVARTTIKACRLKTGCEYQFRIAAENRYGKSTYLNSEPTVAQYPFKVPGPPGTPVVTLSSRDSMEVQWNEPISDGGSRVIGYHLERKERNSILWVKLNKTPIPQTKFKTTGLEEGVEYEFRVSAENIVGIGKPSKVSECYVARDPCDPPGRPEAIIVTRNSVTLQWKKPTYDGGSKITGYIVEKKELPEGRWMKASFTNIIDTHFEVTGLVEDHRYEFRVIARNAAGVFSEPSESTGAITARDEVDPPRISMDPKYKDTIVVHAGESFKVDADIYGKPIPTIQWIKGDQELSNTARLEIKSTDFATSLSVKDAVRVDSGNYILKAKNVAGERSVTVNVKVLDRPGPPEGPVVISGVTAEKCTLAWKPPLQDGGSDIINYIVERRETSRLVWTVVDANVQTLSCKVTKLLEGNEYTFRIMAVNKYGVGEPLESEPVVAKNPFVVPDAPKAPEVTTVTKDSMIVVWERPASDGGSEILGYVLEKRDKEGIRWTRCHKRLIGELRLRVTGLIENHDYEFRVSAENAAGLSEPSPPSAYQKACDPIYKPGPPNNPKVIDITRSSVFLSWSKPIYDGGCEIQGYIVEKCDVSVGEWTMCTPPTGINKTNIEVEKLLEKHEYNFRICAINKAGVGEHADVPGPIIVEEKLEAPDIDLDLELRKIINIRAGGSLRLFVPIKGRPTPEVKWGKVDGEIRDAAIIDVTSSFTSLVLDNVNRYDSGKYTLTLENSSGTKSAFVTVRVLDTPSPPVNLKVTEITKDSVSITWEPPLLDGGSKIKNYIVEKREATRKSYAAVVTNCHKNSWKIDQLQEGCSYYFRVTAENEYGIGLPAQTADPIKVAEVPQPPGKITVDDVTRNSVSLSWTKPEHDGGSKIIQYIVEMQAKHSEKWSECARVKSLQAVITNLTQGEEYLFRVVAVNEKGRSDPRSLAVPIVAKDLVIEPDVKPAFSSYSVQVGQDLKIEVPISGRPKPTITWTKDGLPLKQTTRINVTDSLDLTTLSIKETHKDDGGQYGITVANVVGQKTASIEIVTLDKPDPPKGPVKFDDVSAESITLSWNPPLYTGGCQITNYIVQKRDTTTTVWDVVSATVARTTLKVTKLKTGTEYQFRIFAENRYGQSFALESDPIVAQYPYKEPGPPGTPFATAISKDSMVIQWHEPVNNGGSPVIGYHLERKERNSILWTKVNKTIIHDTQFKAQNLEEGIEYEFRVYAENIVGVGKASKNSECYVARDPCDPPGTPEPIMVKRNEITLQWTKPVYDGGSMITGYIVEKRDLPDGRWMKASFTNVIETQFTVSGLTEDQRYEFRVIAKNAAGAISKPSDSTGPITAKDEVELPRISMDPKFRDTIVVNAGETFRLEADVHGKPLPTIEWLRGDKEIEESARCEIKNTDFKALLIVKDAIRIDGGQYILRASNVAGSKSFPVNVKVLDRPGPPEGPVQVTGVTSEKCSLTWSPPLQDGGSDISHYVVEKRETSRLAWTVVASEVVTNSLKVTKLLEGNEYVFRIMAVNKYGVGEPLESAPVLMKNPFVLPGPPKSLEVTNIAKDSMTVCWNRPDSDGGSEIIGYIVEKRDRSGIRWIKCNKRRITDLRLRVTGLTEDHEYEFRVSAENAAGVGEPSPATVYYKACDPVFKPGPPTNAHIVDTTKNSITLAWGKPIYDGGSEILGYVVEICKADEEEWQIVTPQTGLRVTRFEISKLTEHQEYKIRVCALNKVGLGEATSVPGTVKPEDKLEAPELDLDSELRKGIVVRAGGSARIHIPFKGRPTPEITWSREEGEFTDKVQIEKGVNYTQLSIDNCDRNDAGKYILKLENSSGSKSAFVTVKVLDTPGPPQNLAVKEVRKDSAFLVWEPPIIDGGAKVKNYVIDKRESTRKAYANVSSKCSKTSFKVENLTEGAIYYFRVMAENEFGVGVPVETVDAVKAAEPPSPPGKVTLTDVSQTSASLMWEKPEHDGGSRVLGYVVEMQPKGTEKWSIVAESKVCNAVVTGLSSGQEYQFRVKAYNEKGKSDPRVLGVPVIAKDLTIQPSLKLPFNTYSIQAGEDLKIEIPVIGRPRPNISWVKDGEPLKQTTRVNVEETATSTVLHIKEGNKDDFGKYTVTATNSAGTATENLSVIVLEKPGPPVGPVRFDEVSADFVVISWEPPAYTGGCQISNYIVEKRDTTTTTWHMVSATVARTTIKITKLKTGTEYQFRIFAENRYGKSAPLDSKAVIVQYPFKEPGPPGTPFVTSISKDQMLVQWHEPVNDGGTKIIGYHLEQKEKNSILWVKLNKTPIQDTKFKTTGLDEGLEYEFKVSAENIVGIGKPSKVSECFVARDPCDPPGRPEAIVITRNNVTLKWKKPAYDGGSKITGYIVEKKDLPDGRWMKASFTNVLETEFTVSGLVEDQRYEFRVIARNAAGNFSEPSDSSGAITARDEIDAPNASLDPKYKDVIVVHAGETFVLEADIRGKPIPDVVWSKDGKELEETAARMEIKSTIQKTTLVVKDCIRTDGGQYILKLSNVGGTKSIPITVKVLDRPGPPEGPLKVTGVTAEKCYLAWNPPLQDGGANISHYIIEKRETSRLSWTQVSTEVQALNYKVTKLLPGNEYIFRVMAVNKYGIGEPLESGPVTACNPYKPPGPPSTPEVSAITKDSMVVTWARPVDDGGTEIEGYILEKRDKEGVRWTKCNKKTLTDLRLRVTGLTEGHSYEFRVAAENAAGVGEPSEPSVFYRACDALYPPGPPSNPKVTDTSRSSVSLAWSKPIYDGGAPVKGYVVEVKEAAADEWTTCTPPTGLQGKQFTVTKLKENTEYNFRICAINSEGVGEPATLPGSVVAQERIEPPEIELDADLRKVVVLRASATLRLFVTIKGRPEPEVKWEKAEGILTDRAQIEVTSSFTMLVIDNVTRFDSGRYNLTLENNSGSKTAFVNVRVLDSPSAPVNLTIREVKKDSVTLSWEPPLIDGGAKITNYIVEKRETTRKAYATITNNCTKTTFRIENLQEGCSYYFRVLASNEYGIGLPAETTEPVKVSEPPLPPGRVTLVDVTRNTATIKWEKPESDGGSKITGYVVEMQTKGSEKWSTCTQVKTLEATISGLTAGEEYVFRVAAVNEKGRSDPRQLGVPVIARDIEIKPSVELPFHTFNVKAREQLKIDVPFKGRPQATVNWRKDGQTLKETTRVNVSSSKTVTSLSIKEASKEDVGTYELCVSNSAGSITVPITIIVLDRPGPPGPIRIDEVSCDSITISWNPPEYDGGCQISNYIVEKKETTSTTWHIVSQAVARTSIKIVRLTTGSEYQFRVCAENRYGKSSYSESSAVVAEYPFSPPGPPGTPKVVHATKSTMLVTWQVPVNDGGSRVIGYHLEYKERSSILWSKANKILIADTQMKVSGLDEGLMYEYRVYAENIAGIGKCSKSCEPVPARDPCDPPGQPEVTNITRKSVSLKWSKPHYDGGAKITGYIVERRELPDGRWLKCNYTNIQETYFEVTELTEDQRYEFRVFARNAADSVSEPSESTGPIIVKDDVEPPRVMMDVKFRDVIVVKAGEVLKINADIAGRPLPVISWAKDGIEIEERARTEIISTDNHTLLTVKDCIRRDTGQYVLTLKNVAGTRSVAVNCKVLDKPGPPAGPLEINGLTAEKCSLSWGRPQEDGGADIDYYIVEKRETSHLAWTICEGELQMTSCKVTKLLKGNEYIFRVTGVNKYGVGEPLESVAIKALDPFTVPSPPTSLEITSVTKESMTLCWSRPESDGGSEISGYIIERREKNSLRWVRVNKKPVYDLRVKSTGLREGCEYEYRVYAENAAGLSLPSETSPLIRAEDPVFLPSPPSKPKIVDSGKTTITIAWVKPLFDGGAPITGYTVEYKKSDDTDWKTSIQSLRGTEYTISGLTTGAEYVFRVKSVNKVGASDPSDSSDPQIAKEREEEPLFDIDSEMRKTLIVKAGASFTMTVPFRGRPVPNVLWSKPDTDLRTRAYVDTTDSRTSLTIENANRNDSGKYTLTIQNVLSAASLTLVVKVLDTPGPPTNITVQDVTKESAVLSWDVPENDGGAPVKNYHIEKREASKKAWVSVTNNCNRLSYKVTNLQEGAIYYFRVSGENEFGVGIPAETKEGVKITEKPSPPEKLGVTSISKDSVSLTWLKPEHDGGSRIVHYVVEALEKGQKNWVKCAVAKSTHHVVSGLRENSEYFFRVFAENQAGLSDPRELLLPVLIKEQLEPPEIDMKNFPSHTVYVRAGSNLKVDIPISGKPLPKVTLSRDGVPLKATMRFNTEITAENLTINLKESVTADAGRYEITAANSSGTTKAFINIVVLDRPGPPTGPVVISDITEESVTLKWEPPKYDGGSQVTNYILLKRETSTAVWTEVSATVARTMMKVMKLTTGEEYQFRIKAENRFGISDHIDSACVTVKLPYTTPGPPSTPWVTNVTRESITVGWHEPVSNGGSAVVGYHLEMKDRNSILWQKANKLVIRTTHFKVTTISAGLIYEFRVYAENAAGVGKPSHPSEPVLAIDACEPPRNVRITDISKNSVSLSWQQPAFDGGSKITGYIVERRDLPDGRWTKASFTNVTETQFIISGLTQNSQYEFRVFARNAVGSISNPSEVVGPITCIDSYGGPVIDLPLEYTEVVKYRAGTSVKLRAGISGKPAPTIEWYKDDKELQTNALVCVENTTDLASILIKDADRLNSGCYELKLRNAMGSASATIRVQILDKPGPPGGPIEFKTVTAEKITLLWRPPADDGGAKITHYIVEKRETSRVVWSMVSEHLEECIITTTKIIKGNEYIFRVRAVNKYGIGEPLESDSVVAKNAFVTPGPPGIPEVTKITKNSMTVVWSRPIADGGSDISGYFLEKRDKKSLGWFKVLKETIRDTRQKVTGLTENSDYQYRVCAVNAAGQGPFSEPSEFYKAADPIDPPGPPAKIRIADSTKSSITLGWSKPVYDGGSAVTGYVVEIRQGEEEEWTTVSTKGEVRTTEYVVSNLKPGVNYYFRVSAVNCAGQGEPIEMNEPVQAKDILEAPEIDLDVALRTSVIAKAGEDVQVLIPFKGRPPPTVTWRKDEKNLGSDARYSIENTDSSSLLTIPQVTRNDTGKYILTIENGVGEPKSSTVSVKVLDTPAACQKLQVKHVSRGTVTLLWDPPLIDGGSPIINYVIEKRDATKRTWSVVSHKCSSTSFKLIDLSEKTPFFFRVLAENEIGIGEPCETTEPVKAAEVPAPIRDLSMKDSTKTSVILSWTKPDFDGGSVITEYVVERKGKGEQTWSHAGISKTCEIEVSQLKEQSVLEFRVFAKNEKGLSDPVTIGPITVKELIITPEVDLSDIPGAQVTVRIGHNVHLELPYKGKPKPSISWLKDGLPLKESEFVRFSKTENKITLSIKNAKKEHGGKYTVILDNAVCRIAVPITVITLGPPSKPKGPIRFDEIKADSVILSWDVPEDNGGGEITCYSIEKRETSQTNWKMVCSSVARTTFKVPNLVKDAEYQFRVRAENRYGVSQPLVSSIIVAKHQFRIPGPPGKPVIYNVTSDGMSLTWDAPVYDGGSEVTGFHVEKKERNSILWQKVNTSPISGREYRATGLVEGLDYQFRVYAENSAGLSSPSDPSKFTLAVSPVDPPGTPDYIDVTRETITLKWNPPLRDGGSKIVGYSIEKRQGNERWVRCNFTDVSECQYTVTGLSPGDRYEFRIIARNAVGTISPPSQSSGIIMTRDENVPPIVEFGPEYFDGLIIKSGESLRIKALVQGRPVPRVTWFKDGVEIEKRMNMEITDVLGSTSLFVRDATRDHRGVYTVEAKNASGSAKAEIKVKVQDTPGKVVGPIRFTNITGEKMTLWWDAPLNDGCAPITHYIIEKRETSRLAWALIEDKCEAQSYTAIKLINGNEYQFRVSAVNKFGVGRPLDSDPVVAQIQYTVPDAPGIPEPSNITGNSITLTWARPESDGGSEIQQYILERREKKSTRWVKVISKRPISETRFKVTGLTEGNEYEFHVMAENAAGVGPASGISRLIKCREPVNPPGPPTVVKVTDTSKTTVSLEWSKPVFDGGMEIIGYIIEMCKADLGDWHKVNAEACVKTRYTVTDLQAGEEYKFRVSAINGAGKGDSCEVTGTIKAVDRLTAPELDIDANFKQTHVVRAGASIRLFIAYQGRPTPTAVWSKPDSNLSLRADIHTTDSFSTLTVENCNRNDAGKYTLTVENNSGSKSITFTVKVLDTPGPPGPITFKDVTRGSATLMWDAPLLDGGARIHHYVVEKREASRRSWQVISEKCTRQIFKVNDLAEGVPYYFRVSAVNEYGVGEPYEMPEPIVATEQPAPPRRLDVVDTSKSSAVLAWLKPDHDGGSRITGYLLEMRQKGSDFWVEAGHTKQLTFTVERLVEKTEYEFRVKAKNDAGYSEPREAFSSVIIKEPQIEPTADLTGITNQLITCKAGSPFTIDVPISGRPAPKVTWKLEEMRLKETDRVSITTTKDRTTLTVKDSMRGDSGRYFLTLENTAGVKTFSVTVVVIGRPGPVTGPIEVSSVSAESCVLSWGEPKDGGGTEITNYIVEKRESGTTAWQLVNSSVKRTQIKVTHLTKYMEYSFRVSSENRFGVSKPLESAPIIAEHPFVPPSAPTRPEVYHVSANAMSIRWEEPYHDGGSKIIGYWVEKKERNTILWVKENKVPCLECNYKVTGLVEGLEYQFRTYALNAAGVSKASEASRPIMAQNPVDAPGRPEVTDVTRSTVSLIWSAPAYDGGSKVVGYIIERKPVSEVGDGRWLKCNYTIVSDNFFTVTALSEGDTYEFRVLAKNAAGVISKGSESTGPVTCRDEYAPPKAELDARLHGDLVTIRAGSDLVLDAAVGGKPEPKIIWTKGDKELDLCEKVSLQYTGKRATAVIKFCDRSDSGKYTLTVKNASGTKAVSVMVKVLDSPGPCGKLTVSRVTQEKCTLAWSLPQEDGGAEITHYIVERRETSRLNWVIVEGECPTLSYVVTRLIKNNEYIFRVRAVNKYGPGVPVESEPIVARNSFTIPSPPGIPEEVGTGKEHIIIQWTKPESDGGNEISNYLVDKREKKSLRWTRVNKDYVVYDTRLKVTSLMEGCDYQFRVTAVNAAGNSEPSEASNFISCREPSYTPGPPSAPRVVDTTKHSISLAWTKPMYDGGTDIVGYVLEMQEKDTDQWYRVHTNATIRNTEFTVPDLKMGQKYSFRVAAVNVKGMSEYSESIAEIEPVERIEIPDLELADDLKKTVTIRAGASLRLMVSVSGRPPPVITWSKQGIDLASRAIIDTTESYSLLIVDKVNRYDAGKYTIEAENQSGKKSATVLVKVYDTPGPCPSVKVKEVSRDSVTITWEIPTIDGGAPVNNYIVEKREAAMRAFKTVTTKCSKTLYRISGLVEGTMYYFRVLPENIYGIGEPCETSDAVLVSEVPLVPAKLEVVDVTKSTVTLAWEKPLYDGGSRLTGYVLEACKAGTERWMKVVTLKPTVLEHTVTSLNEGEQYLFRIRAQNEKGVSEPRETVTAVTVQDLRVLPTIDLSTMPQKTIHVPAGRPVELVIPIAGRPPPAASWFFAGSKLRESERVTVETHTKVAKLTIRETTIRDTGEYTLELKNVTGTTSETIKVIILDKPGPPTGPIKIDEIDATSITISWEPPELDGGAPLSGYVVEQRDAHRPGWLPVSESVTRSTFKFTRLTEGNEYVFRVAATNRFGIGSYLQSEVIECRSSIRIPGPPETLQIFDVSRDGMTLTWYPPEDDGGSQVTGYIVERKEVRADRWVRVNKVPVTMTRYRSTGLTEGLEYEHRVTAINARGSGKPSRPSKPIVAMDPIAPPGKPQNPRVTDTTRTSVSLAWSVPEDEGGSKVTGYLIEMQKVDQHEWTKCNTTPTKIREYTLTHLPQGAEYRFRVLACNAGGPGEPAEVPGTVKVTEMLEYPDYELDERYQEGIFVRQGGVIRLTIPIKGKPFPICKWTKEGQDISKRAMIATSETHTELVIKEADRGDSGTYDLVLENKCGKKAVYIKVRVIGSPNSPEGPLEYDDIQVRSVRVSWRPPADDGGADILGYILERREVPKAAWYTIDSRVRGTSLVVKGLKENVEYHFRVSAENQFGISKPLKSEEPVTPKTPLNPPEPPSNPPEVLDVTKSSVSLSWSRPKDDGGSRVTGYYIERKETSTDKWVRHNKTQITTTMYTVTGLVPDAEYQFRIIAQNDVGLSETSPASEPVVCKDPFDKPSQPGELEILSISKDSVTLQWEKPECDGGKEILGYWVEYRQSGDSAWKKSNKERIKDKQFTIGGLLEATEYEFRVFAENETGLSRPRRTAMSIKTKLTSGEAPGIRKEMKDVTTKLGEAAQLSCQIVGRPLPDIKWYRFGKELIQSRKYKMSSDGRTHTLTVMTEEQEDEGVYTCIATNEVGEVETSSKLLLQATPQFHPGYPLKEKYYGAVGSTLRLHVMYIGRPVPAMTWFHGQKLLQNSENITIENTEHYTHLVMKNVQRKTHAGKYKVQLSNVFGTVDAILDVEIQDKPDKPTGPIVIEALLKNSAVISWKPPADDGGSWITNYVVEKCEAKEGAEWQLVSSAISVTTCRIVNLTENAGYYFRVSAQNTFGISDPLEVSSVVIIKSPFEKPGAPGKPTITAVTKDSCVVAWKPPASDGGAKIRNYYLEKREKKQNKWISVTTEEIRETVFSVKNLIEGLEYEFRVKCENLGGESEWSEISEPITPKSDVPIQAPHFKEELRNLNVRYQSNATLVCKVTGHPKPIVKWYRQGKEIIADGLKYRIQEFKGGYHQLIIASVTDDDATVYQVRATNQGGSVSGTASLEVEVPAKIHLPKTLEGMGAVHALRGEVVSIKIPFSGKPDPVITWQKGQDLIDNNGHYQVIVTRSFTSLVFPNGVERKDAGFYVVCAKNRFGIDQKTVELDVADVPDPPRGVKVSDVSRDSVNLTWTEPASDGGSKITNYIVEKCATTAERWLRVGQARETRYTVINLFGKTSYQFRVIAENKFGLSKPSEPSEPTITKEDKTRAMNYDEEVDETREVSMTKASHSSTKELYEKYMIAEDLGRGEFGIVHRCVETSSKKTYMAKFVKVKGTDQVLVKKEISILNIARHRNILHLHESFESMEELVMIFEFISGLDIFERINTSAFELNEREIVSYVHQVCEALQFLHSHNIGHFDIRPENIIYQTRRSSTIKIIEFGQARQLKPGDNFRLLFTAPEYYAPEVHQHDVVSTATDMWSLGTLVYVLLSGINPFLAETNQQIIENIMNAEYTFDEEAFKEISIEAMDFVDRLLVKERKSRMTASEALQHPWLKQKIERVSTKVIRTLKHRRYYHTLIKKDLNMVVSAARISCGGAIRSQKGVSVAKVKVASIEIGPVSGQIMHAVGEEGGHVKYVCKIENYDQSTQVTWYFGVRQLENSEKYEITYEDGVAILYVKDITKLDDGTYRCKVVNDYGEDSSYAELFVKGVREVYDYYCRRTMKKIKRRTDTMRLLERPPEFTLPLYNKTAYVGENVRFGVTITVHPEPHVTWYKSGQKIKPGDNDKKYTFESDKGLYQLTINSVTTDDDAEYTVVARNKYGEDSCKAKLTVTLHPPPTDSTLRPMFKRLLANAECQEGQSVCFEIRVSGIPPPTLKWEKDGQPLSLGPNIEIIHEGLDYYALHIRDTLPEDTGYYRVTATNTAGSTSCQAHLQVERLRYKKQEFKSKEEHERHVQKQIDKTLRMAEILSGTESVPLTQVAKEALREAAVLYKPAVSTKTVKGEFRLEIEEKKEERKLRMPYDVPEPRKYKQTTIEEDQRIKQFVPMSDMKWYKKIRDQYEMPGKLDRVVQKRPKRIRLSRWEQFYVMPLPRITDQYRPKWRIPKLSQDDLEIVRPARRRTPSPDYDFYYRPRRRSLGDISDEELLLPIDDYLAMKRTEEERLRLEEELELGFSASPPSRSPPHFELSSLRYSSPQAHVKVEETRKDFRYSTYHIPTKAEASTSYAELRERHAQAAYRQPKQRQRIMAEREDEELLRPVTTTQHLSEYKSELDFMSKEEKSRKKSRRQREVTEITEIEEEYEISKHAQRESSSSASRLLRRRRSLSPTYIELMRPVSELIRSRPQPAEEYEDDTERRSPTPERTRPRSPSPVSSERSLSRFERSARFDIFSRYESMKAALKTQKTSERKYEVLSQQPFTLDHAPRITLRMRSHRVPCGQNTRFILNVQSKPTAEVKWYHNGVELQESSKIHYTNTSGVLTLEILDCHTDDSGTYRAVCTNYKGEASDYATLDVTGGDYTTYASQRRDEEVPRSVFPELTRTEAYAVSSFKKTSEMEASSSVREVKSQMTETRESLSSYEHSASAEMKSAALEEKSLEEKSTTRKIKTTLAARILTKPRSMTVYEGESARFSCDTDGEPVPTVTWLRKGQVLSTSARHQVTTTKYKSTFEISSVQASDEGNYSVVVENSEGKQEAEFTLTIQKARVTEKAVTSPPRVKSPEPRVKSPEAVKSPKRVKSPEPSHPKAVSPTETKPTPTEKVQHLPVSAPPKITQFLKAEASKEIAKLTCVVESSVLRAKEVTWYKDGKKLKENGHFQFHYSADGTYELKINNLTESDQGEYVCEISGEGGTSKTNLQFMGQAFKSIHEKVSKISETKKSDQKTTESTVTRKTEPKAPEPISSKPVIVTGLQDTTVSSDSVAKFAVKATGEPRPTAIWTKDGKAITQGGKYKLSEDKGGFFLEIHKTDTSDSGLYTCTVKNSAGSVSSSCKLTIKAIKDTEAQKVSTQKTSEITPQKKAVVQEEISQKALRSEEIKMSEAKSQEKLALKEEASKVLISEEVKKSAATSLEKSIVHEEITKTSQASEEVRTHAEIKAFSTQMSINEGQRLVLKANIAGATDVKWVLNGVELTNSEEYRYGVSGSDQTLTIKQASHRDEGILTCISKTKEGIVKCQYDLTLSKELSDAPAFISQPRSQNINEGQNVLFTCEISGEPSPEIEWFKNNLPISISSNVSISRSRNVYSLEIRNASVSDSGKYTIKAKNFRGQCSATASLMVLPLVEEPSREVVLRTSGDTSLQGSFSSQSVQMSASKQEASFSSFSSSSASSMTEMKFASMSAQSMSSMQESFVEMSSSSFMGISNMTQLESSTSKMLKAGIRGIPPKIEALPSDISIDEGKVLTVACAFTGEPTPEVTWSCGGRKIHSQEQGRFHIENTDDLTTLIIMDVQKQDGGLYTLSLGNEFGSDSATVNIHIRSI

SEQ ID NO: 7378 - protein, 35991 aa, Homo sapiens
MTTQAPTFTQPLQSVVVLEGSTATFEAHISGFPVPEVSWFRDGQVISTSTLPGVQISFSDGRAKLTIPAVTKANSGRYSLKATNGSGQATSTAELLVKAETAPPNFVQRLQSMTVRQGSQVRLQVRVTGIPTPVVKFYRDGAEIQSSLDFQISQEGDLYSLLIAEAYPEDSGTYSVNATNSVGRATSTAELLVQGEEEVPAKKTKTIVSTAQISESRQTRIEKKIEAHFDARSIATVEMVIDGAAGQQLPHKTPPRIPPKPKSRSPTPPSIAAKAQLARQQSPSPIRHSPSPVRHVRAPTPSPVRSVSPAARISTSPIRSVRSPLLMRKTQASTVATGPEVPPPWKQEGYVASSSEAEMRETTLTTSTQIRTEERWEGRYGVQEQVTISGAAGAAASVSASASYAAEAVATGAKEVKQDADKSAAVATVVAAVDMARVREPVISAVEQTAQRTTTTAVHIQPAQEQVRKEAEKTAVTKVVVAADKAKEQELKSRTKEVITTKQEQMHVTHEQIRKETEKTFVPKVVISAAKAKEQETRISEEITKKQKQVTQEAIRQETEITAASMVVVATAKSTKLETVPGAQEETTTQQDQMHLSYEKIMKETRKTVVPKVIVATPKVKEQDLVSRGREGITTKREQVQITQEKMRKEAEKTALSTIAVATAKAKEQETILRTRETMATRQEQIQVTHGKVDVGKKAEAVATVVAAVDQARVREPREPGHLEESYAQQTTLEYGYKERISAAKVAEPPQRPASEPHVVPKAVKPRVIQAPSETHIKTTDQKGMHISSQIKKTTDLTTERLVHVDKRPRTASPHFTVSKISVPKTEHGYEASIAGSAIATLQKELSATSSAQKITKSVKAPTVKPSETRVRAEPTPLPQFPFADTPDTYKSEAGVEVKKEVGVSITGTTVREERFEVLHGREAKVTETARVPAPVEIPVTPPTLVSGLKNVTVIEGESVTLECHISGYPSPTVTWYREDYQIESSIDFQITFQSGIARLMIREAFAEDSGRFTCSAVNEAGTVSTSCYLAVQVSEEFEKETTAVTEKFTTEEKRFVESRDVVMTDTSLTEEQAGPGEPAAPYFITKPVVQKLVEGGSVVFGCQVGGNPKPHVYWKKSGVPLTTGYRYKVSYNKQTGECKLVISMTFADDAGEYTIVVRNKHGETSASASLLEEADYELLMKSQQEMLYQTQVTAFVQEPKVGETAPGFVYSEYEKEYEKEQALIRKKMAKDTVVVRTYVEDQEFHISSFEERLIKEIEYRIIKTTLEELLEEDGEEKMAVDISESEAVESGFDSRIKNYRILEGMGVTFHCKMSGYPLPKIAWYKDGKRIKHGERYQMDFLQDGRASLRIPVVLPEDEGIYTAFASNIKGNAICSGKLYVEPAAPLGAPTYIPTLEPVSRIRSLSPRSVSRSPIRMSPARMSPARMSPARMSPARMSPGRRLEETDESQLERLYKPVFVLKPVSFKCLEGQTARFDLKVVGRPMPETFWFHDGQQIVNDYTHKVVIKEDGTQSLIIVPATPSDSGEWTVVAQNRAGRSSISVILTVEAVEHQVKPMFVEKLKNVNIKEGSRLEMKVRATGNPNPDIVWLKNSDIIVPHKYPKIRIEGTKGEAALKIDSTVSQDSAWYTATAINKAGRDTTRCKVNVEVEFAEPEPERKLIIPRGTYRAKEIAAPELEPLHLRYGQEQWEEGDLYDKEKQQKPFFKKKLTSLRLKRFGPAHFECRLTPIGDPTMVVEWLHDGKPLEAANRLRMINEFGYCSLDYGVAYSRDSGIITCRATNKYGTDHTSATLIVKDEKSLVEESQLPEGRKGLQRIEELERMAHEGALTGVTTDQKEKQKPDIVLYPEPVRVLEGETARFRCRVTGYPQPKVNWYLNGQLIRKSKRFRVRYDGIHYLDIVDCKSYDTGEVKVTAENPEGVIEHKVKLEIQQREDFRSVLRRAPEPRPEFHVHEPGKLQFEVQKVDRPVDTTETKEVVKLKRAERITHEKVPEESEELRSKFKRRTEEGYYEAITAVELKSRKKDESYEELLRKTKDELLHWTKELTEEEKKALAEEGKITIPTFKPDKIELSPSMEAPKIFERIQSQTVGQGSDAHFRVRVVGKPDPECEWYKNGVKIERSDRIYWYWPEDNVCELVIRDVTAEDSASIMVKAINIAGETSSHAFLLVQAKQLITFTQELQDVVAKEKDTMATFECETSEPFVKVKWYKDGMEVHEGDKYRMHSDRKVHFLSILTIDTSDAEDYSCVLVEDENVKTTAKLIVEGAVVEFVKELQDIEVPESYSGELECIVSPENIEGKWYHNDVELKSNGKYTITSRRGRQNLTVKDVTKEDQGEYSFVIDGKKTTCKLKMKPRPIAILQGLSDQKVCEGDIVQLEVKVSLESVEGVWMKDGQEVQPSDRVHIVIDKQSHMLLIEDMTKEDAGNYSFTIPALGLSTSGRVSVYSVDVITPLKDVNVIEGTKAVLECKVSVPDVTSVKWYLNDEQIKPDDRVQAIVKGTKQRLVINRTHASDEGPYKLIVGRVETNCNLSVEKIKIIRGLRDLTCTETQNVVFEVELSHSGIDVLWNFKDKEIKPSSKYKIEAHGKIYKLTVLNMMKDDEGKYTFYAGENMTSGKLTVAGGAISKPLTDQTVAESQEAVFECEVANPDSKGEWLRDGKHLPLTNNIRSESDGHKRRLIIAATKLDDIGEYTYKVATSKTSAKLKVEAVKIKKTLKNLTVTETQDAVFTVELTHPNVKGVQWIKNGVVLESNEKYAISVKGTIYSLRIKNCAIVDESVYGFRLGRLGASARLHVETVKIIKKPKDVTALENATVAFEVSVSHDTVPVKWFHKSVEIKPSDKHRLVSERKVHKLMLQNISPSDAGEYTAVVGQLECKAKLFVETLHITKTMKNIEVPETKTASFECEVSHFNVPSMWLKNGVEIEMSEKFKIVVQGKLHQLIIMNTSTEDSAEYTFVCGNDQVSATLTVTPIMITSMLKDINAEEKDTITFEVTVNYEGISYKWLKNGVEIKSTDKCQMRTKKLTHSLNIRNVHFGDAADYTFVAGKATSTATLYVEARHIEFRKHIKDIKVLEKKRAMFECEVSEPDITVQWMKDDQELQITDRIKIQKEKYVHRLLIPSTRMSDAGKYTVVAGGNVSTAKLFVEGRDVRIRSIKKEVQVIEKQRAVVEFEVNEDDVDAHWYKDGIEINFQVQERHKYVVERRIHRMFISETRQSDAGEYTFVAGRNRSSVTLYVNAPEPPQVLQELQPVTVQSGKPARFCAVISGRPQPKISWYKEEQLLSTGFKCKFLHDGQEYTLLLIEAFPEDAAVYTCEAKNDYGVATTSASLSVEVPEVVSPDQEMPVYPPAIITPLQDTVTSEGQPARFQCRVSGTDLKVSWYSKDKKIKPSRFFRMTQFEDTYQLEIAEAYPEDEGTYTFVASNAVGQVSSTANLSLEGFSKFEENTSNSQWHVSLSVSFKKEPLGQKPSFIQPLSSLRVHNGETVRFHARVSGIPKPEIQWFHNQQLILPTKDVVFHFEESTGMALMLIVDAYSEHAGQYSCKAANSAGEATCAATLTVTPKVQALDRQSSGKDVRESAKSQAVADSSFTKEESKISQKEIKSFQGSSYEYEVQVFESVSQSSIHTAASVQDTQLCHTASLSQIAESTELSKECAKESTGEAPKIFLHLQDVTVKCGDTAQFLCVLKDDSFIDVTWTHEGAKIEESERLKQSQNGNIQFLTICNVQLVDQGLYSCIVHNDCGERTTSAVLSVEGAPESILHERIEQEIEMEMKEFSSSFLSAEEEGLHSAELQLSKINETLELLSESPVYPTKFDSEKEGTGPIFIKEVSNADISMGDVATLSVTVIGIPKPKIQWFFNGVLLTPSADYKFVFDGDDHSLIILFTKLEDEGEYTCMASNDYGKTICSAYLKINSKGEGHKDTETESAVAKSLEKLGGPCPPHFLKELKPIRCAQGLPAIFEYTVVGEPAPTVTWFKENKQLCTSVYYTIIHNPNGSGTFIVNDPQREDSGLYICKAENMLGESTCAAELLVLLEDTDMTDTPCKAKSTPEAPEDFPQTPLKGPAVEALDSEQEIATFVKDTILKAALITEENQQLSYEHIAKANELSSQLPLGAQELQSILEQDKLTPESTREFLCINGSIHFQPLKEPSPNLQLQIVQSQKTFSKEGILMPEEPETQAVLSDTEKIFPSAMSIEQINSLTVEPLKTLLAEPEGNYPQSSIEPPMHSYLTSVAEEVLSPKEKTVSDTNREQRVTLQKQEAQSALILSQSLAEGHVESLQSPDVMISQVNYEPLVPSEHSCTEGGKILIESANPLENAGQDSAVRIEEGKSLRFPLALEEKQVLLKEEHSDNVVMPPDQIIESKREPVAIKKVQEVQGRDLLSKESLLSGIPEEQRLNLKIQICRALQAAVASEQPGLFSEWLRNIEKVEVEAVNITQEPRHIMCMYLVTSAKSVTEEVTIIIEDVDPQMANLKMELRDALCAIIYEEIDILTAEGPRIQQGAKTSLQEEMDSFSGSQKVEPITEPEVESKYLISTEEVSYFNVQSRVKYLDATPVTKGVASAVVSDEKQDESLKPSEEKEESSSESGTEEVATVKIQEAEGGLIKEDGPMIHTPLVDTVSEEGDIVHLTTSITNAKEVNWYFENKLVPSDEKFKCLQDQNTYTLVIDKVNTEDHQGEYVCEALNDSGKTATSAKLTVVKRAAPVIKRKIEPLEVALGHLAKFTCEIQSAPNVRFQWFKAGREIYESDKCSIRSSKYISSLEILRTQVVDCGEYTCKASNEYGSVSCTATLTVTEAYPPTFLSRPKSLTTFVGKAAKFICTVTGTPVIETIWQKDGAALSPSPNWRISDAENKHILELSNLTIQDRGVYSCKASNKFGADICQAELIIIDKPHFIKELEPVQSAINKKVHLECQVDEDRKVTVTWSKDGQKLPPGKDYKICFEDKIATLEIPLAKLKDSGTYVCTASNEAGSSSCSATVTVREPPSFVKKVDPSYLMLPGESARLHCKLKGSPVIQVTWFKNNKELSESNTVRMYFVNSEAILDITDVKVEDSGSYSCEAVNDVGSDSCSTEIVIKEPPSFIKTLEPADIVRGTNALLQCEVSGTGPFEISWFKDKKQIRSSKKYRLFSQKSLVCLEIFSFNSADVGEYECVVANEVGKCGCMATHLLKEPPTFVKKVDDLIALGGQTVTLQAAVRGSEPISVTWMKGQEVIREDGKIKMSFSNGVAVLIIPDVQISFGGKYTCLAENEAGSQTSVGELIVKEPAKIIERAELIQVTAGDPATLEYTVAGTPELKPKWYKDGRPLVASKKYRISFKNNVAQLKFYSAELHDSGQYTFEISNEVGSSSCETTFTVLDRDIAPFFTKPLRNVDSVVNGTCRLDCKIAGSLPMRVSWFKDGKEIAASDRYRIAFVEGTASLEIIRVDMNDAGNFTCRATNSVGSKDSSGALIVQEPPSFVTKPGSKDVLPGSAVCLKSTFQGSTPLTIRWFKGNKELVSGGSCYITKEALESSLELYLVKTSDSGTYTCKVSNVAGGVECSANLFVKEPATFVEKLEPSQLLKKGDATQLACKVTGTPPIKITWFANDREIKESSKHRMSFVESTAVLRLTDVGIEDSGEYMCEAQNEAGSDHCSSIVIVKESPYFTKEFKPIEVLKEYDVMLLAEVAGTPPFEITWFKDNTILRSGRKYKTFIQDHLVSLQILKFVAADAGEYQCRVTNEVGSSICSARVTLREPPSFIKKIESTSSLRGGTAAFQATLKGSLPITVTWLKDSDEITEDDNIRMTFENNVASLYLSGIEVKHDGKYVCQAKNDAGIQRCSALLSVKEPATITEEAVSIDVTQGDPATLQVKFSGTKEITAKWFKDGQELTLGSKYKISVTDTVSILKIISTEKKDSGEYTFEVQNDVGRSSCKARINVLDLIIPPSFTKKLKKMDSIKGSFIDLECIVAGSHPISIQWFKDDQEISASEKYKFSFHDNTAFLEISQLEGTDSGTYTCSATNKAGHNQCSGHLTVKEPPYFVEKPQSQDVNPNTRVQLKALVGGTAPMTIKWFKDNKELHSGAARSVWKDDTSTSLELFAAKATDSGTYICQLSNDVGTATSKATLFVKEPPQFIKKPSPVLVLRNGQSTTFECQITGTPKIRVSWYLDGNEITAIQKHGISFIDGLATFQISGARVENSGTYVCEARNDAGTASCSIELKVKEPPTFIRELKPVEVVKYSDVELECEVTGTPPFEVTWLKNNREIRSSKKYTLTDRVSVFNLHITKCDPSDTGEYQCIVSNEGGSCSCSTRVALKEPPSFIKKIENTTTVLKSSATFQSTVAGSPPISITWLKDDQILDEDDNVYISFVDSVATLQIRSVDNGHSGRYTCQAKNESGVERCYAFLLVQEPAQIVEKAKSVDVTEKDPMTLECVVAGTPELKVKWLKDGKQIVPSRYFSMSFENNVASFRIQSVMKQDSGQYTFKVENDFGSSSCDAYLRVLDQNIPPSFTKKLTKMDKVLGSSIHMECKVSGSLPISAQWFKDGKEISTSAKYRLVCHERSVSLEVNNLELEDTANYTCKVSNVAGDDACSGILTVKEPPSFLVKPGRQQAIPDSTVEFKAILKGTPPFKIKWFKDDVELVSGPKCFIGLEGSTSFLNLYSVDASKTGQYTCHVTNDVGSDSCTTMLLVTEPPKFVKKLEASKIVKAGDSSRLECKIAGSPEIRVVWFRNEHELPASDKYRMTFIDSVAVIQMNNLSTEDSGDFICEAQNPAGSTSCSTKVIVKEPPVFSSFPPIVETLKNAEVSLECELSGTPPFEVVWYKDKRQLRSSKKYKIASKNFHTSIHILNVDTSDIGEYHCKAQNEVGSDTCVCTVKLKEPPRFVSKLNSLTVVAGEPAELQASIEGAQPIFVQWLKEKEEVIRESENIRITFVENVATLQFAKAEPANAGKYICQIKNDGGMRENMATLMVLEPAVIVEKAGPMTVTVGETCTLECKVAGTPELSVEWYKDGKLLTSSQKHKFSFYNKISSLRILSVERQDAGTYTFQVQNNVGKSSCTAVVDVSDRAVPPSFTRRLKNTGGVLGASCILECKVAGSSPISVAWFHEKTKIVSGAKYQTTFSDNVCTLQLNSLDSSDMGNYTCVAANVAGSDECRAVLTVQEPPSFVKEPEPLEVLPGKNVTFTSVIRGTPPFKVNWFRGARELVKGDRCNIYFEDTVAELELFNIDISQSGEYTCVVSNNAGQASCTTRLFVKEPAAFLKRLSDHSVEPGKSIILESTYTGTLPISVTWKKDGFNITTSEKCNIVTTEKTCILEILNSTKRDAGQYSCEIENEAGRDVCGALVSTLEPPYFVTELEPLEAAVGDSVSLQCQVAGTPEITVSWYKGDTKLRPTPEYRTYFTNNVATLVFNKVNINDSGEYTCKAENSIGTASSKTVFRIQERQLPPSFARQLKDIEQTVGLPVTLTCRLNGSAPIQVCWYRDGVLLRDDENLQTSFVDNVATLKILQTDLSHSGQYSCSASNPLGTASSSARLTAREPKKSPFFDIKPVSIDVIAGESADFECHVTGAQPMRITWSKDNKEIRPGGNYTITCVGNTPHLRILKVGKGDSGQYTCQATNDVGKDMCSAQLSVKEPPKFVKKLEASKVAKQGESIQLECKISGSPEIKVSWFRNDSELHESWKYNMSFINSVALLTINEASAEDSGDYICEAHNGVGDASCSTALTVKAPPVFTQKPSPVGALKGSDVILQCEISGTPPFEVVWVKDRKQVRNSKKFKITSKHFDTSLHILNLEASDVGEYHCKATNEVGSDTCSCSVKFKEPPRFVKKLSDTSTLIGDAVELRAIVEGFQPISVVWLKDRGEVIRESENTRISFIDNIATLQLGSPEASNSGKYICQIKNDAGMRECSAVLTVLEPARIIEKPEPMTVTTGNPFALECVVTGTPELSAKWFKDGRELSADSKHHITFINKVASLKIPCAEMSDKGLYSFEVKNSVGKSNCTVSVHVSDRIVPPSFIRKLKDVNAILGASVVLECRVSGSAPISVGWFQDGNEIVSGPKCQSSFSENVCTLNLSLLEPSDTGIYTCVAANVAGSDECSAVLTVQEPPSFEQTPDSVEVLPGMSLTFTSVIRGTPPFKVKWFKGSRELVPGESCNISLEDFVTELELFEVQPLESGDYSCLVTNDAGSASCTTHLFVKEPATFVKRLADFSVETGSPIVLEATYTGTPPISVSWIKDEYLISQSERCSITMTEKSTILEILESTIEDYAQYSCLIENEAGQDICEALVSVLEPPYFIEPLEHVEAVIGEPATLQCKVDGTPEIRISWYKEHTKLRSAPAYKMQFKNNVASLVINKVDHSDVGEYSCKADNSVGAVASSAVLVIKARKLPPFFARKLKDVHETLGFPVAFECRINGSEPLQVSWYKDGVLLKDDANLQTSFVHNVATLQILQTDQSHIGQYNCSASNPLGTASSSAKLILSEHEVPPFFDLKPVSVDLALGESGTFKCHVTGTAPIKITWAKDNREIRPGGNYKMTLVENTATLTVLKVGKGDAGQYTCYASNIAGKDSCSAQLGVQEPPRFIKKLEPSRIVKQDEFTRYECKIGGSPEIKVLWYKDETEIQESSKFRMSFVDSVAVLEMHNLSVEDSGDYTCEAHNAAGSASSSTSLKVKEPPIFRKKPHPIETLKGADVHLECELQGTPPFHVSWYKDKRELRSGKKYKIMSENFLTSIHILNVDAADIGEYQCKATNDVGSDTCVGSIALKAPPRFVKKLSDISTVVGKEVQLQTTIEGAEPISVVWFKDKGEIVRESDNIWISYSENIATLQFSRVEPANAGKYTCQIKNDAGMQECFATLSVLEPATIVEKPESIKVTTGDTCTLECTVAGTPELSTKWFKDGKELTSDNKYKISFFNKVSGLKIINVAPSDSGVYSFEVQNPVGKDSCTASLQVSDRTVPPSFTRKLKETNGLSGSSVVMECKVYGSPPISVSWFHEGNEISSGRKYQTTLTDNTCALTVNMLEESDSGDYTCIATNMAGSDECSAPLTVREPPSFVQKPDPMDVLTGTNVTFTSIVKGTPPFSVSWFKGSSELVPGDRCNVSLEDSVAELELFDVDTSQSGEYTCIVSNEAGKASCTTHLYIKAPAKFVKRLNDYSIEKGKPLILEGTFTGTPPISVTWKKNGINVTPSQRCNITTTEKSAILEIPSSTVEDAGQYNCYIENASGKDSCSAQILILEPPYFVKQLEPVKVSVGDSASLQCQLAGTPEIGVSWYKGDTKLRPTTTYKMHFRNNVATLVFNQVDINDSGEYICKAENSVGEVSASTFLTVQEQKLPPSFSRQLRDVQETVGLPVVFDCAISGSEPISVSWYKDGKPLKDSPNVQTSFLDNTATLNIFKTDRSLAGQYSCTATNPIGSASSSARLILTEGKNPPFFDIRLAPVDAVVGESADFECHVTGTQPIKVSWAKDSREIRSGGKYQISYLENSAHLTVLKVDKGDSGQYTCYAVNEVGKDSCTAQLNIKERLIPPSFTKRLSETVEETEGNSFKLEGRVAGSQPITVAWYKNNIEIQPTSNCEITFKNNTLVLQVRKAGMNDAGLYTCKVSNDAGSALCTSSIVIKEPKKPPVFDQHLTPVTVSEGEYVQLSCHVQGSEPIRIQWLKAGREIKPSDRCSFSFASGTAVLELRDVAKADSGDYVCKASNVAGSDTTKSKVTIKDKPAVAPATKKAAVDGRLFFVSEPQSIRVVEKTTATFIAKVGGDPIPNVKWTKGKWRQLNQGGRVFIHQKGDEAKLEIRDTTKTDSGLYRCVAFNEHGEIESNVNLQVDERKKQEKIEGDLRAMLKKTPILKKGAGEEEEIDIMELLKNVDPKEYEKYARMYGITDFRGLLQAFELLKQSQEEETHRLEIEEIERSERDEKEFEELVSFIQQRLSQTEPVTLIKDIENQTVLKDNDAVFEIDIKINYPEIKLSWYKGTEKLEPSDKFEISIDGDRHTLRVKNCQLKDQGNYRLVCGPHIASAKLTVIEPAWERHLQDVTLKEGQTCTMTCQFSVPNVKSEWFRNGRILKPQGRHKTEVEHKVHKLTIADVRAEDQGQYTCKYEDLETSAELRIEAEPIQFTKRIQNIVVSEHQSATFECEVSFDDAIVTWYKGPTELTESQKYNFRNDGRCHYMTIHNVTPDDEGVYSVIARLEPRGEARSTAELYLTTKEIKLELKPPDIPDSRVPIPTMPIRAVPPEEIPPVVAPPIPLLLPTPEEKKPPPKRIEVTKKAVKKDAKKVVAKPKEMTPREEIVKKPPPPTTLIPAKAPEIIDVSSKAEEVKIMTITRKKEVQKEKEAVYEKKQAVHKEKRVFIESFEEPYDELEVEPYTEPFEQPYYEEPDEDYEEIKVEAKKEVHEEWEEDFEEGQEYYEREEGYDEGEEEWEEAYQEREVIQVQKEVYEESHERKVPAKVPEKKAPPPPKVIKKPVIEKIEKTSRRMEEEKVQVTKVPEVSKKIVPQKPSRTPVQEEVIEVKVPAVHTKKMVISEEKMFFASHTEEEVSVTVPEVQKEIVTEEKIHVAISKRVEPPPKVPELPEKPAPEEVAPVPIPKKVEPPAPKVPEVPKKPVPEEKKPVPVPKKEPAAPPKVPEVPKKPVPEEKIPVPVAKKKEAPPAKVPEVQKGVVTEEKITIVTQREESPPPAVPEIPKKKVPEERKPVPRKEEEVPPPPKVPALPKKPVPEEKVAVPVPVAKKAPPPRAEVSKKTVVEEKRFVAEEKLSFAVPQRVEVTRHEVSAEEEWSYSEEEEGVSISVYREEEREEEEEAEVTEYEVMEEPEEYVVEEKLHIISKRVEAEPAEVTERQEKKIVLKPKIPAKIEEPPPAKVPEAPKKIVPEKKVPAPVPKKEKVPPPKVPEEPKKPVPEKKVPPKVIKMEEPLPAKVTERHMQITQEEKVLVAVTKKEAPPKARVPEEPKRAVPEEKVLKLKPKREEEPPAKVTEFRKRVVKEEKVSIEAPKREPQPIKEVTIMEEKERAYTLEEEAVSVQREEEYEEYEEYDYKEFEEYEPTEEYDQYEEYEEREYERYEEHEEYITEPEKPIPVKPVPEEPVPTKPKAPPAKVLKKAVPEEKVPVPIPKKLKPPPPKVPEEPKKVFEEKIRISITKREKEQVTEPAAKVPMKPKRVVAEEKVPVPRKEVAPPVRVPEVPKELEPEEVAFEEEVVTHVEEYLVEEEEEYIHEEEEFITEEEVVPVIPVKVPEVPRKPVPEEKKPVPVPKKKEAPPAKVPEVPKKPEEKVPVLIPKKEKPPPAKVPEVPKKPVPEEKVPVPVPKKVEAPPAKVPEVPKKPVPEKKVPVPAPKKVEAPPAKVPEVPKKLIPEEKKPTPVPKKVEAPPPKVPKKREPVPVPVALPQEEEVLFEEEIVPEEEVLPEEEEVLPEEEEVLPEEEEVLPEEEEIPPEEEEVPPEEEYVPEEEEFVPEEEVLPEVKPKVPVPAPVPEVPKKPVPEKKVPVPAPKKVEPPPPPKVPEIKKKVTEKKVVIPKKEEAPPAKVSVVPKKPEPEKKVPPPGLKKAVAPPAKVPEVPKKVEEKRIILPKEEEVLPVEVTEEPEEEPISEEEIPEEPPSIEEVEEVAPPRVPEVIKKAVPEAPTPVPKKVEAPPAKVSKKIPEEKVPVPVQKKEAPPAKVPEVPKKVPEKKVLVPKKEAVPPAKGRTVLEEKVSVAFRQEVVVKERLELEVVEAEVEEIPEEEEFHEVEEYFEEGEFHEVEEFIKLEQHRVEEEHRVEKVHRVIEVFEAEEVEVFEKPKAPPKGPEISEKIIPPKKPPTKVVPRKEPPAKVPEVPKKIVVEEKVRVPEEPRVPPTKAPEVPKKIVPEEKVREAVLKKPEVPPAKVPGMPKKSVQEEKSPIVISEDTEMYIYEASEEAVLEEKVLVTQPQKTKPKLAKVPEPPKKVVPEDKIYVTIPKKRETPATKEPDTTRGIFPEVEPPEAIPEIPEHPPTEEFEVFKEVIPEGETPIVKRRKTPSPTVPESPREIVPVKETPMAAPLEIEIPPTKAPEAMKEVVPEMKIFEDVPEEPETPRMKTPEAPQEIIPAKTVPSKKREPPSVKVPEALQEIVPEKKTLVVPLRKPEVLPDEVPEALREVVPEKKVHPPQRAEVVPVKVHEAPKEIIPEKKVSVVPPKKPEVPPVKVPEASKEVIREEKVPLAPPKEPEVPPVKVPEPPKEVVPEKKAPVAPPKEPEVPPVKVPEAPKEVVPEKKVPVPPPKKPEVPPTKVPEVPKAAVPEKKLPEAIPPKPESPPPEVPEVLPPKEVVPEKKVPVPPAKKPEAPPPKVPEAPKEVVLEKKASVAVPKKPEAPRAKVPEAAQEVVPEKKIPKAPIKKPEAPAVTVPEVPQEATEKEIPVAPPKKPEAPIVPVPEAQEVVPEKKVPKAPPTKPEAPPATVPEVPQEIVPEKKTLVLPKKPEVPPVTVPEAPKEVVLEKKVPSAPPKKPEVPPVKVPEAPKEVVPEKKVPVPPPKKPEVPPTKVPEVPKAAVPEKKVPEAIPPKPESPPPEVPEVLPPKEVVPEKKVPVPPAKKPEAPPPKVPEAPKEVVLEKKASVAVPKKPEAPRAKVPEAAQEVVPEKKIPKAPIKKPEAPAVTVPEVPQEAAEKEIPVAPPKKPEAPIVPVPEAQEVVPEKKVPKAPPTKPEAPPATVPEVPQEIVPEKKTLVLPKKPEVPPVTVPEAPKEVVLEKKVPSTPPKKPEVPPVKVPEAPKEVVPEKKVPVPPPKKPEVPPTKVPEVPKAAVPEKKVPEAIPPKPESPPPEVPEVLPPKEVVPEKKVPVPPAKKPEAPPPKVPEAPKEVVLEKKVSVAVPKKPEAPRAKVPEAAQEVVPEKKIPKAPIKKPEAPAVTVPEVPQEAAEKEIPVAPPKKPEAPIVPVPEAQEVVPEKKVPKAPPTKPEAPPATVPEVPQEIVPEKKTLVLPKKPEVPPVTVPEAPKEVVLEKKVPLAPPKKPEVPPVKVPEAPKEVVPEKKVPVTPPKKPEVPPVKVPEAPIEVVPEKKMPLAPPKKPEVPPVKVPEAPKEVVPEKKVPSAPPKKPEVPPVKVPEAPKEVVPEKKVPAAPPKKPEVTPVKVPEAPKEVVPEKKVPVPPPKKPEVPPTKVPEVPKVAVPEKKVPEAIPPKPESPPPEVFEEPEEVALEEPPAEVVEEPEPAAPPQVTVPPKKPVPEKKAPAVVAKKPELPPVKVPEVPKEVVPEKKVPLVVPKKPEAPPAKVPEVPKEVVPEKKVAVPKKPEVPPAKVPEVPKKPVLEEKPAVPVPERAESPPPEVYEEPEEIAPEEEIAPEEEKPVPVAEEEEPEVPPPAVPEEPKKIIPEKKVPVIKKPEAPPPKEPEMPKKVVPVKKVPTVKKPETPAAKVPEVPKKLVPVKKEPVPVTKKPEVLPEKVPKVPEKIIPEKEVSVPIPAEPEVPPAEVEETPEEIIYEEKASITIGRKETPPVEEREIEKYIKPEEPEPEPQPEEIPVKEPEPEKVIEKPKLKPRPPPPPPAPPKEDVKEKIFQLKAIPKKKVPEKPQVPEKVELTPLKVPGGEKKVRKLLPERKPEPKEEVVLKSVLRKRPEEEEPKVEPKKLEKVKKPAVPEPPPPKPVEEVEVPTVTKRERKIPEPTKVPEIKPAIPLPAPEPKPKPEAEVKTIKPPPVEPEPTPIAAPVTVPVVGKKAEAKAPKEEAAKPKGPIKGVPKKTPSPIEAERRKLRPGSGGEKPPDEAPFTYQLKAVPLKFVKEIKDIILTESEFVGSSAIFECLVSPSTAITTWMKDGSNIRESPKHRFIADGKDRKLHIIDVQLSDAGEYTCVLRLGNKEKTSTAKLVVEELPVRFVKTLEEEVTVVKGQPLYLSCELNKERDVVWRKDGKIVVEKPGRIVPGVIGLMRALTINDADDTDAGTYTVTVENANNLECSSCVKVVEVIRDWLVKPIRDQHVKPKGTAIFACDIAKDTPNIKWFKGYDEIPAEPNDKTEILRDGNHLYLKIKNAMPEDIAEYAVEIEGKRYPAKLTLGEREVELLKPIEDVTIYEKESASFDAEISEADIPGQWKLKGELLRPSPTCEIKAEGGKRFLTLHKVKLDQAGEVLYQALNAITTAILTVKEIELDFAVPLKDVTVPERRQARFECVLTREANVIWSKGPDIIKSSDKFDIIADGKKHILVINDSQFDDEGVYTAEVEGKKTSARLFVTGIRLKFMSPLEDQTVKEGETATFVCELSHEKMHVVWFKNDAKLHTSRTVLISSEGKTHKLEMKEVTLDDISQIKAQVKELSSTAQLKVLEADPYFTVKLHDKTAVEKDEITLKCEVSKDVPVKWFKDGEEIVPSPKYSIKADGLRRILKIKKADLKDKGEYVCDCGTDKTKANVTVEARLIKVEKPLYGVEVFVGETAHFEIELSEPDVHGQWKLKGQPLTASPDCEIIEDGKKHILILHNCQLGMTGEVSFQAANAKSAANLKVKELPLIFITPLSDVKVFEKDEAKFECEVSREPKTFRWLKGTQEITGDDRFELIKDGTKHSMVIKSAAFEDEAKYMFEAEDKHTSGKLIIEGIRLKFLTPLKDVTAKEKESAVFTVELSHDNIRVKWFKNDQRLHTTRSVSMQDEGKTHSITFKDLSIDDTSQIRVEAMGMSSEAKLTVLEGDPYFTGKLQDYTGVEKDEVILQCEISKADAPVKWFKDGKEIKPSKNAVIKADGKKRMLILKKALKSDIGQYTCDCGTDKTSGKLDIEDREIKLVRPLHSVEVMETETARFETEISEDDIHANWKLKGEALLQTPDCEIKEEGKIHSLVLHNCRLDQTGGVDFQAANVKSSAHLRVKPRVIGLLRPLKDVTVTAGETATFDCELSYEDIPVEWYLKGKKLEPSDKVVPRSEGKVHTLTLRDVKLEDAGEVQLTAKDFKTHANLFVKEPPVEFTKPLEDQTVEEGATAVLECEVSRENAKVKWFKNGTEILKSKKYEIVADGRVRKLVIHDCTPEDIKTYTCDAKDFKTSCNLNVVPPHVEFLRPLTDLQVREKEMARFECELSRENAKVKWFKDGAEIKKGKKYDIISKGAVRILVINKCLLDDEAEYSCEVRTARTSGMLTVLEEEAVFTKNLANIEVSETDTIKLVCEVSKPGAEVIWYKGDEEIIETGRYEILTEGRKRILVIQNAHLEDAGNYNCRLPSSRTDGKVKVHELAAEFISKPQNLEILEGEKAEFVCSISKESFPVQWKRDDKTLESGDKYDVIADGKKRVLVVKDATLQDMGTYVVMVGAARAAAHLTVIEKLRIVVPLKDTRVKEQQEVVFNCEVNTEGAKAKWFRNEEAIFDSSKYIILQKDLVYTLRIRDAHLDDQANYNVSLTNHRGENVKSAANLIVEEEDLRIVEPLKDIETMEKKSVTFWCKVNRLNVTLKWTKNGEEVPFDNRVSYRVDKYKHMLTIKDCGFPDEGEYIVTAGQDKSVAELLIIEAPTEFVEHLEDQTVTEFDDAVFSCQLSREKANVKWYRNGREIKEGKKYKFEKDGSIHRLIIKDCRLDDECEYACGVEDRKSRARLFVEEIPVEIIRPPQDILEAPGADVVFLAELNKDKVEVQWLRNNMVVVQGDKHQMMSEGKIHRLQICDIKPRDQGEYRFIAKDKEARAKLELAAAPKIKTADQDLVVDVGKPLTMVVPYDAYPKAEAEWFKENEPLSTKTIDTTAEQTSFRILEAKKGDKGRYKIVLQNKHGKAEGFINLKVIDVPGPVRNLEVTETFDGEVSLAWEEPLTDGGSKIIGYVVERRDIKRKTWVLATDRAESCEFTVTGLQKGGVEYLFRVSARNRVGTGEPVETDNPVEARSKYDVPGPPLNVTITDVNRFGVSLTWEPPEYDGGAEITNYVIELRDKTSIRWDTAMTVRAEDLSATVTDVVEGQEYSFRVRAQNRIGVGKPSAATPFVKVADPIERPSPPVNLTSSDQTQSSVQLKWEPPLKDGGSPILGYIIERCEEGKDNWIRCNMKLVPELTYKVTGLEKGNKYLYRVSAENKAGVSDPSEILGPLTADDAFVEPTMDLSAFKDGLEVIVPNPITILVPSTGYPRPTATWCFGDKVLETGDRVKMKTLSAYAELVISPSERSDKGIYTLKLENRVKTISGEIDVNVIARPSAPKELKFGDITKDSVHLTWEPPDDDGGSPLTGYVVEKREVSRKTWTKVMDFVTDLEFTVPDLVQGKEYLFKVCARNKCGPGEPAYVDEPVNMSTPATVPDPPENVKWRDRTANSIFLTWDPPKNDGGSRIKGYIVERCPRGSDKWVACGEPVAETKMEVTGLEEGKWYAYRVKALNRQGASKPSRPTEEIQAVDTQEAPEIFLDVKLLAGLTVKAGTKIELPATVTGKPEPKITWTKADMILKQDKRITIENVPKKSTVTIVDSKRSDTGTYIIEAVNVCGRATAVVEVNVLDKPGPPAAFDITDVTNESCLLTWNPPRDDGGSKITNYVVERRATDSEVWHKLSSTVKDTNFKATKLIPNKEYIFRVAAENMYGVGEPVQASPITAKYQFDPPGPPTRLEPSDITKDAVTLTWCEPDDDGGSPITGYWVERLDPDTDKWVRCNKMPVKDTTYRVKGLTNKKKYRFRVLAENLAGPGKPSKSTEPILIKDPIDPPWPPGKPTVKDVGKTSVRLNWTKPEHDGGAKIESYVIEMLKTGTDEWVRVAEGVPTTQHLLPGLMEGQEYSFRVRAVNKAGESEPSEPSDPVLCREKLYPPSPPRWLEVINITKNTADLKWTVPEKDGGSPITNYIVEKRDVRRKGWQTVDTTVKDTKCTVTPLTEGSLYVFRVAAENAIGQSDYTEIEDSVLAKDTFTTPGPPYALAVVDVTKRHVDLKWEPPKNDGGRPIQRYVIEKKERLGTRWVKAGKTAGPDCNFRVTDVIEGTEVQFQVRAENEAGVGHPSEPTEILSIEDPTSPPSPPLDLHVTDAGRKHIAIAWKPPEKNGGSPIIGYHVEMCPVGTEKWMRVNSRPIKDLKFKVEEGVVPDKEYVLRVRAVNAIGVSEPSEISENVVAKDPDCKPTIDLETHDIIVIEGEKLSIPVPFRAVPVPTVSWHKDGKEVKASDRLTMKNDHISAHLEVPKSVRADAGIYTITLENKLGSATASINVKVIGLPGPCKDIKASDITKSSCKLTWEPPEFDGGTPILHYVLERREAGRRTYIPVMSGENKLSWTVKDLIPNGEYFFRVKAVNKVGGGEYIELKNPVIAQDPKQPPDPPVDVEVHNPTAEAMTITWKPPLYDGGSKIMGYIIEKIAKGEERWKRCNEHLVPILTYTAKGLEEGKEYQFRVRAENAAGISEPSRATPPTKAVDPIDAPKVILRTSLEVKRGDEIALDASISGSPYPTITWIKDENVIVPEEIKKRAAPLVRRRKGEVQEEEPFVLPLTQRLSIDNSKKGESQLRVRDSLRPDHGLYMIKVENDHGIAKAPCTVSVLDTPGPPINFVFEDIRKTSVLCKWEPPLDDGGSEIINYTLEKKDKTKPDSEWIVVTSTLRHCKYSVTKLIEGKEYLFRVRAENRFGPGPPCVSKPLVAKDPFGPPDAPDKPIVEDVTSNSMLVKWNEPKDNGSPILGYWLEKREVNSTHWSRVNKSLLNALKANVDGLLEGLTYVFRVCAENAAGPGKFSPPSDPKTAHDPISPPGPPIPRVTDTSSTTIELEWEPPAFNGGGEIVGYFVDKQLVGTNEWSRCTEKMIKVRQYTVKEIREGADYKLRVSAVNAAGEGPPGETQPVTVAEPQEPPAVELDVSVKGGIQIMAGKTLRIPAVVTGRPVPTKVWTKEEGELDKDRVVIDNVGTKSELIIKDALRKDHGRYVITATNSCGSKFAAARVEVFDVPGPVLDLKPVVTNRKMCLLNWSDPEDDGGSEITGFIIERKDAKMHTWRQPIETERSKCDITGLLEGQEYKFRVIAKNKFGCGPPVEIGPILAVDPLGPPTSPERLTYTERTKSTITLDWKEPRSNGGSPIQGYIIEKRRHDKPDFERVNKRLCPTTSFLVENLDEHQMYEFRVKAVNEIGESEPSLPLNVVIQDDEVPPTIKLRLSVRGDTIKVKAGEPVHIPADVTGLPMPKIEWSKNETVIEKPTDALQITKEEVSRSEAKTELSIPKAVREDKGTYTVTASNRLGSVFRNVHVEVYDRPSPPRNLAVTDIKAESCYLTWDAPLDNGGSEITHYVIDKRDASRKKAEWEEVTNTAVEKRYGIWKLIPNGQYEFRVRAVNKYGISDECKSDKVVIQDPYRLPGPPGKPKVLARTKGSMLVSWTPPLDNGGSPITGYWLEKREEGSPYWSRVSRAPITKVGLKGVEFNVPRLLEGVKYQFRAMAINAAGIGPPSEPSDPEVAGDPIFPPGPPSCPEVKDKTKSSISLGWKPPAKDGGSPIKGYIVEMQEEGTTDWKRVNEPDKLITTCECVVPNLKELRKYRFRVKAVNEAGESEPSDTTGEIPATDIQEEPEVFIDIGAQDCLVCKAGSQIRIPAVIKGRPTPKSSWEFDGKAKKAMKDGVHDIPEDAQLETAENSSVIIIPECKRSHTGKYSITAKNKAGQKTANCRVKVMDVPGPPKDLKVSDITRGSCRLSWKMPDDDGGDRIKGYVIEKRTIDGKAWTKVNPDCGSTTFVVPDLLSEQQYFFRVRAENRFGIGPPVETIQRTTARDPIYPPDPPIKLKIGLITKNTVHLSWKPPKNDGGSPVTHYIVECLAWDPTGTKKEAWRQCNKRDVEELQFTVEDLVEGGEYEFRVKAVNAAGVSKPSATVGPVTVKDQTCPPSIDLKEFMEVEEGTNVNIVAKIKGVPFPTLTWFKAPPKKPDNKEPVLYDTHVNKLVVDDTCTLVIPQSRRSDTGLYTITAVNNLGTASKEMRLNVLGRPGPPVGPIKFESVSADQMTLSWFPPKDDGGSKITNYVIEKREANRKTWVHVSSEPKECTYTIPKLLEGHEYVFRIMAQNKYGIGEPLDSEPETARNLFSVPGAPDKPTVSSVTRNSMTVNWEEPEYDGGSPVTGYWLEMKDTTSKRWKRVNRDPIKAMTLGVSYKVTGLIEGSDYQFRVYAINAAGVGPASLPSDPATARDPIAPPGPPFPKVTDWTKSSADLEWSPPLKDGGSKVTGYIVEYKEEGKEEWEKGKDKEVRGTKLVVTGLKEGAFYKFRVRAVNIAGIGEPGEVTDVIEMKDRLVSPDLQLDASVRDRIVVHAGGVIRIIAYVSGKPPPTVTWNMNERTLPQEATIETTAISSSMVIKNCQRSHQGVYSLLAKNEAGERKKTIIVDVLDVPGPVGTPFLAHNLTNESCKLTWFSPEDDGGSPITNYVIEKRESDRRAWTPVTYTVTRQNATVQGLIQGKAYFFRIAAENSIGMGPFVETSEALVIREPITVPERPEDLEVKEVTKNTVTLTWNPPKYDGGSEIINYVLESRLIGTEKFHKVTNDNLLSRKYTVKGLKEGDTYEYRVSAVNIVGQGKPSFCTKPITCKDELAPPTLHLDFRDKLTIRVGEAFALTGRYSGKPKPKVSWFKDEADVLEDDRTHIKTTPATLALEKIKAKRSDSGKYCVVVENSTGSRKGFCQVNVVDRPGPPVGPVSFDEVTKDYMVISWKPPLDDGGSKITNYIIEKKEVGKDVWMPVTSASAKTTCKVSKLLEGKDYIFRIHAENLYGISDPLVSDSMKAKDRFRVPDAPDQPIVTEVTKDSALVTWNKPHDGGKPITNYILEKRETMSKRWARVTKDPIHPYTKFRVPDLLEGCQYEFRVSAENEIGIGDPSPPSKPVFAKDPIAKPSPPVNPEAIDTTCNSVDLTWQPPRHDGGSKILGYIVEYQKVGDEEWRRANHTPESCPETKYKVTGLRDGQTYKFRVLAVNAAGESDPAHVPEPVLVKDRLEPPELILDANMAREQHIKVGDTLRLSAIIKGVPFPKVTWKKEDRDAPTKARIDVTPVGSKLEIRNAAHEDGGIYSLTVENPAGSKTVSVKVLVLDKPGPPRDLEVSEIRKDSCYLTWKEPLDDGGSVITNYVVERRDVASAQWSPLSATSKKKSHFAKHLNEGNQYLFRVAAENQYGRGPFVETPKPIKALDPLHPPGPPKDLHHVDVDKTEVSLVWNKPDRDGGSPITGYLVEYQEEGTQDWIKFKTVTNLECVVTGLQQGKTYRFRVKAENIVGLGLPDTTIPIECQEKLVPPSVELDVKLIEGLVVKAGTTVRFPAIIRGVPVPTAKWTTDGSEIKTDEHYTVETDNFSSVLTIKNCLRRDTGEYQITVSNAAGSKTVAVHLTVLDVPGPPTGPINILDVTPEHMTISWQPPKDDGGSPVINYIVEKQDTRKDTWGVVSSGSSKTKLKIPHLQKGCEYVFRVRAENKIGVGPPLDSTPTVAKHKFSPPSPPGKPVVTDITENAATVSWTLPKSDGGSPITGYYMERREVTGKWVRVNKTPIADLKFRVTGLYEGNTYEFRVFAENLAGLSKPSPSSDPIKACRPIKPPGPPINPKLKDKSRETADLVWTKPLSDGGSPILGYVVECQKPGTAQWNRINKDELIRQCAFRVPGLIEGNEYRFRIKAANIVGEGEPRELAESVIAKDILHPPEVELDVTCRDVITVRVGQTIRILARVKGRPEPDITWTKEGKVLVREKRVDLIQDLPRVELQIKEAVRADHGKYIISAKNSSGHAQGSAIVNVLDRPGPCQNLKVTNVTKENCTISWENPLDNGGSEITNFIVEYRKPNQKGWSIVASDVTKRLIKANLLANNEYYFRVCAENKVGVGPTIETKTPILAINPIDRPGEPENLHIADKGKTFVYLKWRRPDYDGGSPNLSYHVERRLKGSDDWERVHKGSIKETHYMVDRCVENQIYEFRVQTKNEGGESDWVKTEEVVVKEDLQKPVLDLKLSGVLTVKAGDTIRLEAGVRGKPFPEVAWTKDKDATDLTRSPRVKIDTRADSSKFSLTKAKRSDGGKYVVTATNTAGSFVAYATVNVLDKPGPVRNLKIVDVSSDRCTVCWDPPEDDGGCEIQNYILEKCETKRMVWSTYSATVLTPGTTVTRLIEGNEYIFRVRAENKIGTGPPTESKPVIAKTKYDKPGRPDPPEVTKVSKEEMTVVWNPPEYDGGKSITGYFLEKKEKHSTRWVPVNKSAIPERRMKVQNLLPDHEYQFRVKAENEIGIGEPSLPSRPVVAKDPIEPPGPPTNFRVVDTTKHSITLGWGKPVYDGGAPIIGYVVEMRPKIADASPDEGWKRCNAAAQLVRKEFTVTSLDENQEYEFRVCAQNQVGIGRPAELKEAIKPKEILEPPEIDLDASMRKLVIVRAGCPIRLFAIVRGRPAPKVTWRKVGIDNVVRKGQVDLVDTMAFLVIPNSTRDDSGKYSLTLVNPAGEKAVFVNVRVLDTPGPVSDLKVSDVTKTSCHVSWAPPENDGGSQVTHYIVEKREADRKTWSTVTPEVKKTSFHVTNLVPGNEYYFRVTAVNEYGPGVPTDVPKPVLASDPLSEPDPPRKLEVTEMTKNSATLAWLPPLRDGGAKIDGYITSYREEEQPADRWTEYSVVKDLSLVVTGLKEGKKYKFRVAARNAVGVSLPREAEGVYEAKEQLLPPKILMPEQITIKAGKKLRIEAHVYGKPHPTCKWKKGEDEVVTSSHLAVHKADSSSILIIKDVTRKDSGYYSLTAENSSGTDTQKIKVVVMDAPGPPQPPFDISDIDADACSLSWHIPLEDGGSNITNYIVEKCDVSRGDWVTALASVTKTSCRVGKLIPGQEYIFRVRAENRFGISEPLTSPKMVAQFPFGVPSEPKNARVTKVNKDCIFVAWDRPDSDGGSPIIGYLIERKERNSLLWVKANDTLVRSTEYPCAGLVEGLEYSFRIYALNKAGSSPPSKPTEYVTARMPVDPPGKPEVIDVTKSTVSLIWARPKHDGGSKIIGYFVEACKLPGDKWVRCNTAPHQIPQEEYTATGLEEKAQYQFRAIARTAVNISPPSEPSDPVTILAENVPPRIDLSVAMKSLLTVKAGTNVCLDATVFGKPMPTVSWKKDGTLLKPAEGIKMAMQRNLCTLELFSVNRKDSGDYTITAENSSGSKSATIKLKVLDKPGPPASVKINKMYSDRAMLSWEPPLEDGGSEITNYIVDKRETSRPNWAQVSATVPITSCSVEKLIEGHEYQFRICAENKYGVGDPVFTEPAIAKNPYDPPGRCDPPVISNITKDHMTVSWKPPADDGGSPITGYLLEKRETQAVNWTKVNRKPIIERTLKATGLQEGTEYEFRVTAINKAGPGKPSDASKAAYARDPQYPPGPPAFPKVYDTTRSSVSLSWGKPAYDGGSPIIGYLVEVKRADSDNWVRCNLPQNLQKTRFEVTGLMEDTQYQFRVYAVNKIGYSDPSDVPDKHYPKDILIPPEGELDADLRKTLILRAGVTMRLYVPVKGRPPPKITWSKPNVNLRDRIGLDIKSTDFDTFLRCENVNKYDAGKYILTLENSCGKKEYTIVVKVLDTPGPPVNVTVKEISKDSAYVTWEPPIIDGGSPIINYVVQKRDAERKSWSTVTTECSKTSFRVANLEEGKSYFFRVFAENEYGIGDPGETRDAVKASQTPGPVVDLKVRSVSKSSCSIGWKKPHSDGGSRIIGYVVDFLTEENKWQRVMKSLSLQYSAKDLTEGKEYTFRVSAENENGEGTPSEITVVARDDVVAPDLDLKGLPDLCYLAKENSNFRLKIPIKGKPAPSVSWKKGEDPLATDTRVSVESSAVNTTLIVYDCQKSDAGKYTITLKNVAGTKEGTISIKVVGKPGIPTGPIKFDEVTAEAMTLKWAPPKDDGGSEITNYILEKRDSVNNKWVTCASAVQKTTFRVTRLHEGMEYTFRVSAENKYGVGEGLKSEPIVARHPFDVPDAPPPPNIVDVRHDSVSLTWTDPKKTGGSPITGYHLEFKERNSLLWKRANKTPIRMRDFKVTGLTEGLEYEFRVMAINLAGVGKPSLPSEPVVALDPIDPPGKPEVINITRNSVTLIWTEPKYDGGHKLTGYIVEKRDLPSKSWMKANHVNVPECAFTVTDLVEGGKYEFRIRAKNTAGAISAPSESTETIICKDEYEAPTIVLDPTIKDGLTIKAGDTIVLNAISILGKPLPKSSWSKAGKDIRPSDITQITSTPTSSMLTIKYATRKDAGEYTITATNPFGTKVEHVKVTVLDVPGPPGPVEISNVSAEKATLTWTPPLEDGGSPIKSYILEKRETSRLLWTVVSEDIQSCRHVATKLIQGNEYIFRVSAVNHYGKGEPVQSEPVKMVDRFGPPGPPEKPEVSNVTKNTATVSWKRPVDDGGSEITGYHVERREKKSLRWVRAIKTPVSDLRCKVTGLQEGSTYEFRVSAENRAGIGPPSEASDSVLMKDAAYPPGPPSNPHVTDTTKKSASLAWGKPHYDGGLEITGYVVEHQKVGDEAWIKDTTGTALRITQFVVPDLQTKEKYNFRISAINDAGVGEPAVIPDVEIVEREMAPDFELDAELRRTLVVRAGLSIRIFVPIKGRPAPEVTWTKDNINLKNRANIENTESFTLLIIPECNRYDTGKFVMTIENPAGKKSGFVNVRVLDTPGPVLNLRPTDITKDSVTLHWDLPLIDGGSRITNYIVEKREATRKSYSTATTKCHKCTYKVTGLSEGCEYFFRVMAENEYGIGEPTETTEPVKASEAPSPPDSLNIMDITKSTVSLAWPKPKHDGGSKITGYVIEAQRKGSDQWTHITTVKGLECVVRNLTEGEEYTFQVMAVNSAGRSAPRESRPVIVKEQTMLPELDLRGIYQKLVIAKAGDNIKVEIPVLGRPKPTVTWKKGDQILKQTQRVNFETTATSTILNINECVRSDSGPYPLTARNIVGEVGDVITIQVHDIPGPPTGPIKFDEVSSDFVTFSWDPPENDGGVPISNYVVEMRQTDSTTWVELATTVIRTTYKATRLTTGLEYQFRVKAQNRYGVGPGITSACIVANYPFKVPGPPGTPQVTAVTKDSMTISWHEPLSDGGSPILGYHVERKERNGILWQTVSKALVPGNIFKSSGLTDGIAYEFRVIAENMAGKSKPSKPSEPMLALDPIDPPGKPVPLNITRHTVTLKWAKPEYTGGFKITSYIVEKRDLPNGRWLKANFSNILENEFTVSGLTEDAAYEFRVIAKNAAGAISPPSEPSDAITCRDDVEAPKIKVDVKFKDTVILKAGEAFRLEADVSGRPPPTMEWSKDGKELEGTAKLEIKIADFSTNLVNKDSTRRDSGAYTLTATNPGGFAKHIFNVKVLDRPGPPEGPLAVTEVTSEKCVLSWFPPLDDGGAKIDHYIVQKRETSRLAWTNVASEVQVTKLKVTKLLKGNEYIFRVMAVNKYGVGEPLESEPVLAVNPYGPPDPPKNPEVTTITKDSMVVCWGHPDSDGGSEIINYIVERRDKAGQRWIKCNKKTLTDLRYKVSGLTEGHEYEFRIMAENAAGISAPSPTSPFYKACDTVFKPGPPGNPRVLDTSRSSISIAWNKPIYDGGSEITGYMVEIALPEEDEWQIVTPPAGLKATSYTITGLTENQEYKIRIYAMNSEGLGEPALVPGTPKAEDRMLPPEIELDADLRKVVTIRACCTLRLFVPIKGRPAPEVKWARDHGESLDKASIESTSSYTLLIVGNVNRFDSGKYILTVENSSGSKSAFVNVRVLDTPGPPQDLKVKEVTKTSVTLTWDPPLLDGGSKIKNYIVEKRESTRKAYSTVATNCHKTSWKVDQLQEGCSYYFRVLAENEYGIGLPAETAESVKASERPLPPGKITLMDVTRNSVSLSWEKPEHDGGSRILGYIVEMQTKGSDKWATCATVKVTEATITGLIQGEEYSFRVSAQNEKGISDPRQLSVPVIAKDLVIPPAFKLLFNTFTVLAGEDLKVDVPFIGRPTPAVTWHKDNVPLKQTTRVNAESTENNSLLTIKDACREDVGHYVVKLTNSAGEAIETLNVIVLDKPGPPTGPVKMDEVTADSITLSWGPPKYDGGSSINNYIVEKRDTSTTTWQIVSATVARTTIKACRLKTGCEYQFRIAAENRYGKSTYLNSEPTVAQYPFKVPGPPGTPVVTLSSRDSMEVQWNEPISDGGSRVIGYHLERKERNSILWVKLNKTPIPQTKFKTTGLEEGVEYEFRVSAENIVGIGKPSKVSECYVARDPCDPPGRPEAIIVTRNSVTLQWKKPTYDGGSKITGYIVEKKELPEGRWMKASFTNIIDTHFEVTGLVEDHRYEFRVIARNAAGVFSEPSESTGAITARDEVDPPRISMDPKYKDTIVVHAGESFKVDADIYGKPIPTIQWIKGDQELSNTARLEIKSTDFATSLSVKDAVRVDSGNYILKAKNVAGERSVTVNVKVLDRPGPPEGPVVISGVTAEKCTLAWKPPLQDGGSDIINYIVERRETSRLVWTVVDANVQTLSCKVTKLLEGNEYTFRIMAVNKYGVGEPLESEPVVAKNPFVVPDAPKAPEVTTVTKDSMIVVWERPASDGGSEILGYVLEKRDKEGIRWTRCHKRLIGELRLRVTGLIENHDYEFRVSAENAAGLSEPSPPSAYQKACDPIYKPGPPNNPKVIDITRSSVFLSWSKPIYDGGCEIQGYIVEKCDVSVGEWTMCTPPTGINKTNIEVEKLLEKHEYNFRICAINKAGVGEHADVPGPIIVEEKLEAPDIDLDLELRKIINIRAGGSLRLFVPIKGRPTPEVKWGKVDGEIRDAAIIDVTSSFTSLVLDNVNRYDSGKYTLTLENSSGTKSAFVTVRVLDTPSPPVNLKVTEITKDSVSITWEPPLLDGGSKIKNYIVEKREATRKSYAAVVTNCHKNSWKIDQLQEGCSYYFRVTAENEYGIGLPAQTADPIKVAEVPQPPGKITVDDVTRNSVSLSWTKPEHDGGSKIIQYIVEMQAKHSEKWSECARVKSLQAVITNLTQGEEYLFRVVAVNEKGRSDPRSLAVPIVAKDLVIEPDVKPAFSSYSVQVGQDLKIEVPISGRPKPTITWTKDGLPLKQTTRINVTDSLDLTTLSIKETHKDDGGQYGITVANVVGQKTASIEIVTLDKPDPPKGPVKFDDVSAESITLSWNPPLYTGGCQITNYIVQKRDTTTTVWDVVSATVARTTLKVTKLKTGTEYQFRIFAENRYGQSFALESDPIVAQYPYKEPGPPGTPFATAISKDSMVIQWHEPVNNGGSPVIGYHLERKERNSILWTKVNKTIIHDTQFKAQNLEEGIEYEFRVYAENIVGVGKASKNSECYVARDPCDPPGTPEPIMVKRNEITLQWTKPVYDGGSMITGYIVEKRDLPDGRWMKASFTNVIETQFTVSGLTEDQRYEFRVIAKNAAGAISKPSDSTGPITAKDEVELPRISMDPKFRDTIVVNAGETFRLEADVHGKPLPTIEWLRGDKEIEESARCEIKNTDFKALLIVKDAIRIDGGQYILRASNVAGSKSFPVNVKVLDRPGPPEGPVQVTGVTSEKCSLTWSPPLQDGGSDISHYVVEKRETSRLAWTVVASEVVTNSLKVTKLLEGNEYVFRIMAVNKYGVGEPLESAPVLMKNPFVLPGPPKSLEVTNIAKDSMTVCWNRPDSDGGSEIIGYIVEKRDRSGIRWIKCNKRRITDLRLRVTGLTEDHEYEFRVSAENAAGVGEPSPATVYYKACDPVFKPGPPTNAHIVDTTKNSITLAWGKPIYDGGSEILGYVVEICKADEEEWQIVTPQTGLRVTRFEISKLTEHQEYKIRVCALNKVGLGEATSVPGTVKPEDKLEAPELDLDSELRKGIVVRAGGSARIHIPFKGRPTPEITWSREEGEFTDKVQIEKGVNYTQLSIDNCDRNDAGKYILKLENSSGSKSAFVTVKVLDTPGPPQNLAVKEVRKDSAFLVWEPPIIDGGAKVKNYVIDKRESTRKAYANVSSKCSKTSFKVENLTEGAIYYFRVMAENEFGVGVPVETVDAVKAAEPPSPPGKVTLTDVSQTSASLMWEKPEHDGGSRVLGYVVEMQPKGTEKWSIVAESKVCNAVVTGLSSGQEYQFRVKAYNEKGKSDPRVLGVPVIAKDLTIQPSLKLPFNTYSIQAGEDLKIEIPVIGRPRPNISWVKDGEPLKQTTRVNVEETATSTVLHIKEGNKDDFGKYTVTATNSAGTATENLSVIVLEKPGPPVGPVRFDEVSADFVVISWEPPAYTGGCQISNYIVEKRDTTTTTWHMVSATVARTTIKITKLKTGTEYQFRIFAENRYGKSAPLDSKAVIVQYPFKEPGPPGTPFVTSISKDQMLVQWHEPVNDGGTKIIGYHLEQKEKNSILWVKLNKTPIQDTKFKTTGLDEGLEYEFKVSAENIVGIGKPSKVSECFVARDPCDPPGRPEAIVITRNNVTLKWKKPAYDGGSKITGYIVEKKDLPDGRWMKASFTNVLETEFTVSGLVEDQRYEFRVIARNAAGNFSEPSDSSGAITARDEIDAPNASLDPKYKDVIVVHAGETFVLEADIRGKPIPDVVWSKDGKELEETAARMEIKSTIQKTTLVVKDCIRTDGGQYILKLSNVGGTKSIPITVKVLDRPGPPEGPLKVTGVTAEKCYLAWNPPLQDGGANISHYIIEKRETSRLSWTQVSTEVQALNYKVTKLLPGNEYIFRVMAVNKYGIGEPLESGPVTACNPYKPPGPPSTPEVSAITKDSMVVTWARPVDDGGTEIEGYILEKRDKEGVRWTKCNKKTLTDLRLRVTGLTEGHSYEFRVAAENAAGVGEPSEPSVFYRACDALYPPGPPSNPKVTDTSRSSVSLAWSKPIYDGGAPVKGYVVEVKEAAADEWTTCTPPTGLQGKQFTVTKLKENTEYNFRICAINSEGVGEPATLPGSVVAQERIEPPEIELDADLRKVVVLRASATLRLFVTIKGRPEPEVKWEKAEGILTDRAQIEVTSSFTMLVIDNVTRFDSGRYNLTLENNSGSKTAFVNVRVLDSPSAPVNLTIREVKKDSVTLSWEPPLIDGGAKITNYIVEKRETTRKAYATITNNCTKTTFRIENLQEGCSYYFRVLASNEYGIGLPAETTEPVKVSEPPLPPGRVTLVDVTRNTATIKWEKPESDGGSKITGYVVEMQTKGSEKWSTCTQVKTLEATISGLTAGEEYVFRVAAVNEKGRSDPRQLGVPVIARDIEIKPSVELPFHTFNVKAREQLKIDVPFKGRPQATVNWRKDGQTLKETTRVNVSSSKTVTSLSIKEASKEDVGTYELCVSNSAGSITVPITIIVLDRPGPPGPIRIDEVSCDSITISWNPPEYDGGCQISNYIVEKKETTSTTWHIVSQAVARTSIKIVRLTTGSEYQFRVCAENRYGKSSYSESSAVVAEYPFSPPGPPGTPKVVHATKSTMLVTWQVPVNDGGSRVIGYHLEYKERSSILWSKANKILIADTQMKVSGLDEGLMYEYRVYAENIAGIGKCSKSCEPVPARDPCDPPGQPEVTNITRKSVSLKWSKPHYDGGAKITGYIVERRELPDGRWLKCNYTNIQETYFEVTELTEDQRYEFRVFARNAADSVSEPSESTGPIIVKDDVEPPRVMMDVKFRDVIVVKAGEVLKINADIAGRPLPVISWAKDGIEIEERARTEIISTDNHTLLTVKDCIRRDTGQYVLTLKNVAGTRSVAVNCKVLDKPGPPAGPLEINGLTAEKCSLSWGRPQEDGGADIDYYIVEKRETSHLAWTICEGELQMTSCKVTKLLKGNEYIFRVTGVNKYGVGEPLESVAIKALDPFTVPSPPTSLEITSVTKESMTLCWSRPESDGGSEISGYIIERREKNSLRWVRVNKKPVYDLRVKSTGLREGCEYEYRVYAENAAGLSLPSETSPLIRAEDPVFLPSPPSKPKIVDSGKTTITIAWVKPLFDGGAPITGYTVEYKKSDDTDWKTSIQSLRGTEYTISGLTTGAEYVFRVKSVNKVGASDPSDSSDPQIAKEREEEPLFDIDSEMRKTLIVKAGASFTMTVPFRGRPVPNVLWSKPDTDLRTRAYVDTTDSRTSLTIENANRNDSGKYTLTIQNVLSAASLTLVVKVLDTPGPPTNITVQDVTKESAVLSWDVPENDGGAPVKNYHIEKREASKKAWVSVTNNCNRLSYKVTNLQEGAIYYFRVSGENEFGVGIPAETKEGVKITEKPSPPEKLGVTSISKDSVSLTWLKPEHDGGSRIVHYVVEALEKGQKNWVKCAVAKSTHHVVSGLRENSEYFFRVFAENQAGLSDPRELLLPVLIKEQLEPPEIDMKNFPSHTVYVRAGSNLKVDIPISGKPLPKVTLSRDGVPLKATMRFNTEITAENLTINLKESVTADAGRYEITAANSSGTTKAFINIVVLDRPGPPTGPVVISDITEESVTLKWEPPKYDGGSQVTNYILLKRETSTAVWTEVSATVARTMMKVMKLTTGEEYQFRIKAENRFGISDHIDSACVTVKLPYTTPGPPSTPWVTNVTRESITVGWHEPVSNGGSAVVGYHLEMKDRNSILWQKANKLVIRTTHFKVTTISAGLIYEFRVYAENAAGVGKPSHPSEPVLAIDACEPPRNVRITDISKNSVSLSWQQPAFDGGSKITGYIVERRDLPDGRWTKASFTNVTETQFIISGLTQNSQYEFRVFARNAVGSISNPSEVVGPITCIDSYGGPVIDLPLEYTEVVKYRAGTSVKLRAGISGKPAPTIEWYKDDKELQTNALVCVENTTDLASILIKDADRLNSGCYELKLRNAMGSASATIRVQILDKPGPPGGPIEFKTVTAEKITLLWRPPADDGGAKITHYIVEKRETSRVVWSMVSEHLEECIITTTKIIKGNEYIFRVRAVNKYGIGEPLESDSVVAKNAFVTPGPPGIPEVTKITKNSMTVVWSRPIADGGSDISGYFLEKRDKKSLGWFKVLKETIRDTRQKVTGLTENSDYQYRVCAVNAAGQGPFSEPSEFYKAADPIDPPGPPAKIRIADSTKSSITLGWSKPVYDGGSAVTGYVVEIRQGEEEEWTTVSTKGEVRTTEYVVSNLKPGVNYYFRVSAVNCAGQGEPIEMNEPVQAKDILEAPEIDLDVALRTSVIAKAGEDVQVLIPFKGRPPPTVTWRKDEKNLGSDARYSIENTDSSSLLTIPQVTRNDTGKYILTIENGVGEPKSSTVSVKVLDTPAACQKLQVKHVSRGTVTLLWDPPLIDGGSPIINYVIEKRDATKRTWSVVSHKCSSTSFKLIDLSEKTPFFFRVLAENEIGIGEPCETTEPVKAAEVPAPIRDLSMKDSTKTSVILSWTKPDFDGGSVITEYVVERKGKGEQTWSHAGISKTCEIEVSQLKEQSVLEFRVFAKNEKGLSDPVTIGPITVKELIITPEVDLSDIPGAQVTVRIGHNVHLELPYKGKPKPSISWLKDGLPLKESEFVRFSKTENKITLSIKNAKKEHGGKYTVILDNAVCRIAVPITVITLGPPSKPKGPIRFDEIKADSVILSWDVPEDNGGGEITCYSIEKRETSQTNWKMVCSSVARTTFKVPNLVKDAEYQFRVRAENRYGVSQPLVSSIIVAKHQFRIPGPPGKPVIYNVTSDGMSLTWDAPVYDGGSEVTGFHVEKKERNSILWQKVNTSPISGREYRATGLVEGLDYQFRVYAENSAGLSSPSDPSKFTLAVSPVDPPGTPDYIDVTRETITLKWNPPLRDGGSKIVGYSIEKRQGNERWVRCNFTDVSECQYTVTGLSPGDRYEFRIIARNAVGTISPPSQSSGIIMTRDENVPPIVEFGPEYFDGLIIKSGESLRIKALVQGRPVPRVTWFKDGVEIEKRMNMEITDVLGSTSLFVRDATRDHRGVYTVEAKNASGSAKAEIKVKVQDTPGKVVGPIRFTNITGEKMTLWWDAPLNDGCAPITHYIIEKRETSRLAWALIEDKCEAQSYTAIKLINGNEYQFRVSAVNKFGVGRPLDSDPVVAQIQYTVPDAPGIPEPSNITGNSITLTWARPESDGGSEIQQYILERREKKSTRWVKVISKRPISETRFKVTGLTEGNEYEFHVMAENAAGVGPASGISRLIKCREPVNPPGPPTVVKVTDTSKTTVSLEWSKPVFDGGMEIIGYIIEMCKADLGDWHKVNAEACVKTRYTVTDLQAGEEYKFRVSAINGAGKGDSCEVTGTIKAVDRLTAPELDIDANFKQTHVVRAGASIRLFIAYQGRPTPTAVWSKPDSNLSLRADIHTTDSFSTLTVENCNRNDAGKYTLTVENNSGSKSITFTVKVLDTPGPPGPITFKDVTRGSATLMWDAPLLDGGARIHHYVVEKREASRRSWQVISEKCTRQIFKVNDLAEGVPYYFRVSAVNEYGVGEPYEMPEPIVATEQPAPPRRLDVVDTSKSSAVLAWLKPDHDGGSRITGYLLEMRQKGSDFWVEAGHTKQLTFTVERLVEKTEYEFRVKAKNDAGYSEPREAFSSVIIKEPQIEPTADLTGITNQLITCKAGSPFTIDVPISGRPAPKVTWKLEEMRLKETDRVSITTTKDRTTLTVKDSMRGDSGRYFLTLENTAGVKTFSVTVVVIGRPGPVTGPIEVSSVSAESCVLSWGEPKDGGGTEITNYIVEKRESGTTAWQLVNSSVKRTQIKVTHLTKYMEYSFRVSSENRFGVSKPLESAPIIAEHPFVPPSAPTRPEVYHVSANAMSIRWEEPYHDGGSKIIGYWVEKKERNTILWVKENKVPCLECNYKVTGLVEGLEYQFRTYALNAAGVSKASEASRPIMAQNPVDAPGRPEVTDVTRSTVSLIWSAPAYDGGSKVVGYIIERKPVSEVGDGRWLKCNYTIVSDNFFTVTALSEGDTYEFRVLAKNAAGVISKGSESTGPVTCRDEYAPPKAELDARLHGDLVTIRAGSDLVLDAAVGGKPEPKIIWTKGDKELDLCEKVSLQYTGKRATAVIKFCDRSDSGKYTLTVKNASGTKAVSVMVKVLDSPGPCGKLTVSRVTQEKCTLAWSLPQEDGGAEITHYIVERRETSRLNWVIVEGECPTLSYVVTRLIKNNEYIFRVRAVNKYGPGVPVESEPIVARNSFTIPSPPGIPEEVGTGKEHIIIQWTKPESDGGNEISNYLVDKREKKSLRWTRVNKDYVVYDTRLKVTSLMEGCDYQFRVTAVNAAGNSEPSEASNFISCREPSYTPGPPSAPRVVDTTKHSISLAWTKPMYDGGTDIVGYVLEMQEKDTDQWYRVHTNATIRNTEFTVPDLKMGQKYSFRVAAVNVKGMSEYSESIAEIEPVERIEIPDLELADDLKKTVTIRAGASLRLMVSVSGRPPPVITWSKQGIDLASRAIIDTTESYSLLIVDKVNRYDAGKYTIEAENQSGKKSATVLVKVYDTPGPCPSVKVKEVSRDSVTITWEIPTIDGGAPVNNYIVEKREAAMRAFKTVTTKCSKTLYRISGLVEGTMYYFRVLPENIYGIGEPCETSDAVLVSEVPLVPAKLEVVDVTKSTVTLAWEKPLYDGGSRLTGYVLEACKAGTERWMKVVTLKPTVLEHTVTSLNEGEQYLFRIRAQNEKGVSEPRETVTAVTVQDLRVLPTIDLSTMPQKTIHVPAGRPVELVIPIAGRPPPAASWFFAGSKLRESERVTVETHTKVAKLTIRETTIRDTGEYTLELKNVTGTTSETIKVIILDKPGPPTGPIKIDEIDATSITISWEPPELDGGAPLSGYVVEQRDAHRPGWLPVSESVTRSTFKFTRLTEGNEYVFRVAATNRFGIGSYLQSEVIECRSSIRIPGPPETLQIFDVSRDGMTLTWYPPEDDGGSQVTGYIVERKEVRADRWVRVNKVPVTMTRYRSTGLTEGLEYEHRVTAINARGSGKPSRPSKPIVAMDPIAPPGKPQNPRVTDTTRTSVSLAWSVPEDEGGSKVTGYLIEMQKVDQHEWTKCNTTPTKIREYTLTHLPQGAEYRFRVLACNAGGPGEPAEVPGTVKVTEMLEYPDYELDERYQEGIFVRQGGVIRLTIPIKGKPFPICKWTKEGQDISKRAMIATSETHTELVIKEADRGDSGTYDLVLENKCGKKAVYIKVRVIGSPNSPEGPLEYDDIQVRSVRVSWRPPADDGGADILGYILERREVPKAAWYTIDSRVRGTSLVVKGLKENVEYHFRVSAENQFGISKPLKSEEPVTPKTPLNPPEPPSNPPEVLDVTKSSVSLSWSRPKDDGGSRVTGYYIERKETSTDKWVRHNKTQITTTMYTVTGLVPDAEYQFRIIAQNDVGLSETSPASEPVVCKDPFDKPSQPGELEILSISKDSVTLQWEKPECDGGKEILGYWVEYRQSGDSAWKKSNKERIKDKQFTIGGLLEATEYEFRVFAENETGLSRPRRTAMSIKTKLTSGEAPGIRKEMKDVTTKLGEAAQLSCQIVGRPLPDIKWYRFGKELIQSRKYKMSSDGRTHTLTVMTEEQEDEGVYTCIATNEVGEVETSSKLLLQATPQFHPGYPLKEKYYGAVGSTLRLHVMYIGRPVPAMTWFHGQKLLQNSENITIENTEHYTHLVMKNVQRKTHAGKYKVQLSNVFGTVDAILDVEIQDKPDKPTGPIVIEALLKNSAVISWKPPADDGGSWITNYVVEKCEAKEGAEWQLVSSAISVTTCRIVNLTENAGYYFRVSAQNTFGISDPLEVSSVVIIKSPFEKPGAPGKPTITAVTKDSCVVAWKPPASDGGAKIRNYYLEKREKKQNKWISVTTEEIRETVFSVKNLIEGLEYEFRVKCENLGGESEWSEISEPITPKSDVPIQAPHFKEELRNLNVRYQSNATLVCKVTGHPKPIVKWYRQGKEIIADGLKYRIQEFKGGYHQLIIASVTDDDATVYQVRATNQGGSVSGTASLEVEVPAKIHLPKTLEGMGAVHALRGEVVSIKIPFSGKPDPVITWQKGQDLIDNNGHYQVIVTRSFTSLVFPNGVERKDAGFYVVCAKNRFGIDQKTVELDVADVPDPPRGVKVSDVSRDSVNLTWTEPASDGGSKITNYIVEKCATTAERWLRVGQARETRYTVINLFGKTSYQFRVIAENKFGLSKPSEPSEPTITKEDKTRAMNYDEEVDETREVSMTKASHSSTKELYEKYMIAEDLGRGEFGIVHRCVETSSKKTYMAKFVKVKGTDQVLVKKEISILNIARHRNILHLHESFESMEELVMIFEFISGLDIFERINTSAFELNEREIVSYVHQVCEALQFLHSHNIGHFDIRPENIIYQTRRSSTIKIIEFGQARQLKPGDNFRLLFTAPEYYAPEVHQHDVVSTATDMWSLGTLVYVLLSGINPFLAETNQQIIENIMNAEYTFDEEAFKEISIEAMDFVDRLLVKERKSRMTASEALQHPWLKQKIERVSTKVIRTLKHRRYYHTLIKKDLNMVVSAARISCGGAIRSQKGVSVAKVKVASIEIGPVSGQIMHAVGEEGGHVKYVCKIENYDQSTQVTWYFGVRQLENSEKYEITYEDGVAILYVKDITKLDDGTYRCKVVNDYGEDSSYAELFVKGVREVYDYYCRRTMKKIKRRTDTMRLLERPPEFTLPLYNKTAYVGENVRFGVTITVHPEPHVTWYKSGQKIKPGDNDKKYTFESDKGLYQLTINSVTTDDDAEYTVVARNKYGEDSCKAKLTVTLHPPPTDSTLRPMFKRLLANAECQEGQSVCFEIRVSGIPPPTLKWEKDGQPLSLGPNIEIIHEGLDYYALHIRDTLPEDTGYYRVTATNTAGSTSCQAHLQVERLRYKKQEFKSKEEHERHVQKQIDKTLRMAEILSGTESVPLTQVAKEALREAAVLYKPAVSTKTVKGEFRLEIEEKKEERKLRMPYDVPEPRKYKQTTIEEDQRIKQFVPMSDMKWYKKIRDQYEMPGKLDRVVQKRPKRIRLSRWEQFYVMPLPRITDQYRPKWRIPKLSQDDLEIVRPARRRTPSPDYDFYYRPRRRSLGDISDEELLLPIDDYLAMKRTEEERLRLEEELELGFSASPPSRSPPHFELSSLRYSSPQAHVKVEETRKDFRYSTYHIPTKAEASTSYAELRERHAQAAYRQPKQRQRIMAEREDEELLRPVTTTQHLSEYKSELDFMSKEEKSRKKSRRQREVTEITEIEEEYEISKHAQRESSSSASRLLRRRRSLSPTYIELMRPVSELIRSRPQPAEEYEDDTERRSPTPERTRPRSPSPVSSERSLSRFERSARFDIFSRYESMKAALKTQKTSERKYEVLSQQPFTLDHAPRITLRMRSHRVPCGQNTRFILNVQSKPTAEVKWYHNGVELQESSKIHYTNTSGVLTLEILDCHTDDSGTYRAVCTNYKGEASDYATLDVTGGDYTTYASQRRDEEVPRSVFPELTRTEAYAVSSFKKTSEMEASSSVREVKSQMTETRESLSSYEHSASAEMKSAALEEKSLEEKSTTRKIKTTLAARILTKPRSMTVYEGESARFSCDTDGEPVPTVTWLRKGQVLSTSARHQVTTTKYKSTFEISSVQASDEGNYSVVVENSEGKQEAEFTLTIQKARVTEKAVTSPPRVKSPEPRVKSPEAVKSPKRVKSPEPSHPKAVSPTETKPTPTEKVQHLPVSAPPKITQFLKAEASKEIAKLTCVVESSVLRAKEVTWYKDGKKLKENGHFQFHYSADGTYELKINNLTESDQGEYVCEISGEGGTSKTNLQFMGQAFKSIHEKVSKISETKKSDQKTTESTVTRKTEPKAPEPISSKPVIVTGLQDTTVSSDSVAKFAVKATGEPRPTAIWTKDGKAITQGGKYKLSEDKGGFFLEIHKTDTSDSGLYTCTVKNSAGSVSSSCKLTIKAIKDTEAQKVSTQKTSEITPQKKAVVQEEISQKALRSEEIKMSEAKSQEKLALKEEASKVLISEEVKKSAATSLEKSIVHEEITKTSQASEEVRTHAEIKAFSTQMSINEGQRLVLKANIAGATDVKWVLNGVELTNSEEYRYGVSGSDQTLTIKQASHRDEGILTCISKTKEGIVKCQYDLTLSKELSDAPAFISQPRSQNINEGQNVLFTCEISGEPSPEIEWFKNNLPISISSNVSISRSRNVYSLEIRNASVSDSGKYTIKAKNFRGQCSATASLMVLPLVEEPSREVVLRTSGDTSLQGSFSSQSVQMSASKQEASFSSFSSSSASSMTEMKFASMSAQSMSSMQESFVEMSSSSFMGISNMTQLESSTSKMLKAGIRGIPPKIEALPSDISIDEGKVLTVACAFTGEPTPEVTWSCGGRKIHSQEQGRFHIENTDDLTTLIIMDVQKQDGGLYTLSLGNEFGSDSATVNIHIRSI

SEQ ID NO: 7379 - protein, 34484 aa, Homo sapiens
MTTQAPTFTQPLQSVVVLEGSTATFEAHISGFPVPEVSWFRDGQVISTSTLPGVQISFSDGRAKLTIPAVTKANSGRYSLKATNGSGQATSTAELLVKAETAPPNFVQRLQSMTVRQGSQVRLQVRVTGIPTPVVKFYRDGAEIQSSLDFQISQEGDLYSLLIAEAYPEDSGTYSVNATNSVGRATSTAELLVQGEEEVPAKKTKTIVSTAQISESRQTRIEKKIEAHFDARSIATVEMVIDGAAGQQLPHKTPPRIPPKPKSRSPTPPSIAAKAQLARQQSPSPIRHSPSPVRHVRAPTPSPVRSVSPAARISTSPIRSVRSPLLMRKTQASTVATGPEVPPPWKQEGYVASSSEAEMRETTLTTSTQIRTEERWEGRYGVQEQVTISGAAGAAASVSASASYAAEAVATGAKEVKQDADKSAAVATVVAAVDMARVREPVISAVEQTAQRTTTTAVHIQPAQEQVRKEAEKTAVTKVVVAADKAKEQELKSRTKEVITTKQEQMHVTHEQIRKETEKTFVPKVVISAAKAKEQETRISEEITKKQKQVTQEAIRQETEITAASMVVVATAKSTKLETVPGAQEETTTQQDQMHLSYEKIMKETRKTVVPKVIVATPKVKEQDLVSRGREGITTKREQVQITQEKMRKEAEKTALSTIAVATAKAKEQETILRTRETMATRQEQIQVTHGKVDVGKKAEAVATVVAAVDQARVREPREPGHLEESYAQQTTLEYGYKERISAAKVAEPPQRPASEPHVVPKAVKPRVIQAPSETHIKTTDQKGMHISSQIKKTTDLTTERLVHVDKRPRTASPHFTVSKISVPKTEHGYEASIAGSAIATLQKELSATSSAQKITKSVKAPTVKPSETRVRAEPTPLPQFPFADTPDTYKSEAGVEVKKEVGVSITGTTVREERFEVLHGREAKVTETARVPAPVEIPVTPPTLVSGLKNVTVIEGESVTLECHISGYPSPTVTWYREDYQIESSIDFQITFQSGIARLMIREAFAEDSGRFTCSAVNEAGTVSTSCYLAVQVSEEFEKETTAVTEKFTTEEKRFVESRDVVMTDTSLTEEQAGPGEPAAPYFITKPVVQKLVEGGSVVFGCQVGGNPKPHVYWKKSGVPLTTGYRYKVSYNKQTGECKLVISMTFADDAGEYTIVVRNKHGETSASASLLEEADYELLMKSQQEMLYQTQVTAFVQEPKVGETAPGFVYSEYEKEYEKEQALIRKKMAKDTVVVRTYVEDQEFHISSFEERLIKEIEYRIIKTTLEELLEEDGEEKMAVDISESEAVESGFDSRIKNYRILEGMGVTFHCKMSGYPLPKIAWYKDGKRIKHGERYQMDFLQDGRASLRIPVVLPEDEGIYTAFASNIKGNAICSGKLYVEPAAPLGAPTYIPTLEPVSRIRSLSPRSVSRSPIRMSPARMSPARMSPARMSPARMSPGRRLEETDESQLERLYKPVFVLKPVSFKCLEGQTARFDLKVVGRPMPETFWFHDGQQIVNDYTHKVVIKEDGTQSLIIVPATPSDSGEWTVVAQNRAGRSSISVILTVEAVEHQVKPMFVEKLKNVNIKEGSRLEMKVRATGNPNPDIVWLKNSDIIVPHKYPKIRIEGTKGEAALKIDSTVSQDSAWYTATAINKAGRDTTRCKVNVEVEFAEPEPERKLIIPRGTYRAKEIAAPELEPLHLRYGQEQWEEGDLYDKEKQQKPFFKKKLTSLRLKRFGPAHFECRLTPIGDPTMVVEWLHDGKPLEAANRLRMINEFGYCSLDYGVAYSRDSGIITCRATNKYGTDHTSATLIVKDEKSLVEESQLPEGRKGLQRIEELERMAHEGALTGVTTDQKEKQKPDIVLYPEPVRVLEGETARFRCRVTGYPQPKVNWYLNGQLIRKSKRFRVRYDGIHYLDIVDCKSYDTGEVKVTAENPEGVIEHKVKLEIQQREDFRSVLRRAPEPRPEFHVHEPGKLQFEVQKVDRPVDTTETKEVVKLKRAERITHEKVPEESEELRSKFKRRTEEGYYEAITAVELKSRKKDESYEELLRKTKDELLHWTKELTEEEKKALAEEGKITIPTFKPDKIELSPSMEAPKIFERIQSQTVGQGSDAHFRVRVVGKPDPECEWYKNGVKIERSDRIYWYWPEDNVCELVIRDVTAEDSASIMVKAINIAGETSSHAFLLVQAKQLITFTQELQDVVAKEKDTMATFECETSEPFVKVKWYKDGMEVHEGDKYRMHSDRKVHFLSILTIDTSDAEDYSCVLVEDENVKTTAKLIVEGAVVEFVKELQDIEVPESYSGELECIVSPENIEGKWYHNDVELKSNGKYTITSRRGRQNLTVKDVTKEDQGEYSFVIDGKKTTCKLKMKPRPIAILQGLSDQKVCEGDIVQLEVKVSLESVEGVWMKDGQEVQPSDRVHIVIDKQSHMLLIEDMTKEDAGNYSFTIPALGLSTSGRVSVYSVDVITPLKDVNVIEGTKAVLECKVSVPDVTSVKWYLNDEQIKPDDRVQAIVKGTKQRLVINRTHASDEGPYKLIVGRVETNCNLSVEKIKIIRGLRDLTCTETQNVVFEVELSHSGIDVLWNFKDKEIKPSSKYKIEAHGKIYKLTVLNMMKDDEGKYTFYAGENMTSGKLTVAGGAISKPLTDQTVAESQEAVFECEVANPDSKGEWLRDGKHLPLTNNIRSESDGHKRRLIIAATKLDDIGEYTYKVATSKTSAKLKVEAVKIKKTLKNLTVTETQDAVFTVELTHPNVKGVQWIKNGVVLESNEKYAISVKGTIYSLRIKNCAIVDESVYGFRLGRLGASARLHVETVKIIKKPKDVTALENATVAFEVSVSHDTVPVKWFHKSVEIKPSDKHRLVSERKVHKLMLQNISPSDAGEYTAVVGQLECKAKLFVETLHITKTMKNIEVPETKTASFECEVSHFNVPSMWLKNGVEIEMSEKFKIVVQGKLHQLIIMNTSTEDSAEYTFVCGNDQVSATLTVTPIMITSMLKDINAEEKDTITFEVTVNYEGISYKWLKNGVEIKSTDKCQMRTKKLTHSLNIRNVHFGDAADYTFVAGKATSTATLYVEARHIEFRKHIKDIKVLEKKRAMFECEVSEPDITVQWMKDDQELQITDRIKIQKEKYVHRLLIPSTRMSDAGKYTVVAGGNVSTAKLFVEGRDVRIRSIKKEVQVIEKQRAVVEFEVNEDDVDAHWYKDGIEINFQVQERHKYVVERRIHRMFISETRQSDAGEYTFVAGRNRSSVTLYVNAPEPPQVLQELQPVTVQSGKPARFCAVISGRPQPKISWYKEEQLLSTGFKCKFLHDGQEYTLLLIEAFPEDAAVYTCEAKNDYGVATTSASLSVEVPEVVSPDQEMPVYPPAIITPLQDTVTSEGQPARFQCRVSGTDLKVSWYSKDKKIKPSRFFRMTQFEDTYQLEIAEAYPEDEGTYTFVASNAVGQVSSTANLSLEAPESILHERIEQEIEMEMKEFSSSFLSAEEEGLHSAELQLSKINETLELLSESPVYPTKFDSEKEGTGPIFIKEVSNADISMGDVATLSVTVIGIPKPKIQWFFNGVLLTPSADYKFVFDGDDHSLIILFTKLEDEGEYTCMASNDYGKTICSAYLKINSKGEGHKDTETESAVAKSLEKLGGPCPPHFLKELKPIRCAQGLPAIFEYTVVGEPAPTVTWFKENKQLCTSVYYTIIHNPNGSGTFIVNDPQREDSGLYICKAENMLGESTCAAELLVLLEDTDMTDTPCKAKSTPEAPEDFPQTPLKGPAVEALDSEQEIATFVKDTILKAALITEENQQLSYEHIAKANELSSQLPLGAQELQSILEQDKLTPESTREFLCINGSIHFQPLKEPSPNLQLQIVQSQKTFSKEGILMPEEPETQAVLSDTEKIFPSAMSIEQINSLTVEPLKTLLAEPEGNYPQSSIEPPMHSYLTSVAEEVLSPKEKTVSDTNREQRVTLQKQEAQSALILSQSLAEGHVESLQSPDVMISQVNYEPLVPSEHSCTEGGKILIESANPLENAGQDSAVRIEEGKSLRFPLALEEKQVLLKEEHSDNVVMPPDQIIESKREPVAIKKVQEVQGRDLLSKESLLSGIPEEQRLNLKIQICRALQAAVASEQPGLFSEWLRNIEKVEVEAVNITQEPRHIMCMYLVTSAKSVTEEVTIIIEDVDPQMANLKMELRDALCAIIYEEIDILTAEGPRIQQGAKTSLQEEMDSFSGSQKVEPITEPEVESKYLISTEEVSYFNVQSRVKYLDATPVTKGVASAVVSDEKQDESLKPSEEKEESSSESGTEEVATVKIQEAEGGLIKEDGPMIHTPLVDTVSEEGDIVHLTTSITNAKEVNWYFENKLVPSDEKFKCLQDQNTYTLVIDKVNTEDHQGEYVCEALNDSGKTATSAKLTVVKRAAPVIKRKIEPLEVALGHLAKFTCEIQSAPNVRFQWFKAGREIYESDKCSIRSSKYISSLEILRTQVVDCGEYTCKASNEYGSVSCTATLTVTEAYPPTFLSRPKSLTTFVGKAAKFICTVTGTPVIETIWQKDGAALSPSPNWRISDAENKHILELSNLTIQDRGVYSCKASNKFGADICQAELIIIDKPHFIKELEPVQSAINKKVHLECQVDEDRKVTVTWSKDGQKLPPGKDYKICFEDKIATLEIPLAKLKDSGTYVCTASNEAGSSSCSATVTVREPPSFVKKVDPSYLMLPGESARLHCKLKGSPVIQVTWFKNNKELSESNTVRMYFVNSEAILDITDVKVEDSGSYSCEAVNDVGSDSCSTEIVIKEPPSFIKTLEPADIVRGTNALLQCEVSGTGPFEISWFKDKKQIRSSKKYRLFSQKSLVCLEIFSFNSADVGEYECVVANEVGKCGCMATHLLKEPPTFVKKVDDLIALGGQTVTLQAAVRGSEPISVTWMKGQEVIREDGKIKMSFSNGVAVLIIPDVQISFGGKYTCLAENEAGSQTSVGELIVKEPAKIIERAELIQVTAGDPATLEYTVAGTPELKPKWYKDGRPLVASKKYRISFKNNVAQLKFYSAELHDSGQYTFEISNEVGSSSCETTFTVLDRDIAPFFTKPLRNVDSVVNGTCRLDCKIAGSLPMRVSWFKDGKEIAASDRYRIAFVEGTASLEIIRVDMNDAGNFTCRATNSVGSKDSSGALIVQEPPSFVTKPGSKDVLPGSAVCLKSTFQGSTPLTIRWFKGNKELVSGGSCYITKEALESSLELYLVKTSDSGTYTCKVSNVAGGVECSANLFVKEPATFVEKLEPSQLLKKGDATQLACKVTGTPPIKITWFANDREIKESSKHRMSFVESTAVLRLTDVGIEDSGEYMCEAQNEAGSDHCSSIVIVKESPYFTKEFKPIEVLKEYDVMLLAEVAGTPPFEITWFKDNTILRSGRKYKTFIQDHLVSLQILKFVAADAGEYQCRVTNEVGSSICSARVTLREPPSFIKKIESTSSLRGGTAAFQATLKGSLPITVTWLKDSDEITEDDNIRMTFENNVASLYLSGIEVKHDGKYVCQAKNDAGIQRCSALLSVKEPATITEEAVSIDVTQGDPATLQVKFSGTKEITAKWFKDGQELTLGSKYKISVTDTVSILKIISTEKKDSGEYTFEVQNDVGRSSCKARINVLDLIIPPSFTKKLKKMDSIKGSFIDLECIVAGSHPISIQWFKDDQEISASEKYKFSFHDNTAFLEISQLEGTDSGTYTCSATNKAGHNQCSGHLTVKEPPYFVEKPQSQDVNPNTRVQLKALVGGTAPMTIKWFKDNKELHSGAARSVWKDDTSTSLELFAAKATDSGTYICQLSNDVGTATSKATLFVKEPPQFIKKPSPVLVLRNGQSTTFECQITGTPKIRVSWYLDGNEITAIQKHGISFIDGLATFQISGARVENSGTYVCEARNDAGTASCSIELKVKEPPTFIRELKPVEVVKYSDVELECEVTGTPPFEVTWLKNNREIRSSKKYTLTDRVSVFNLHITKCDPSDTGEYQCIVSNEGGSCSCSTRVALKEPPSFIKKIENTTTVLKSSATFQSTVAGSPPISITWLKDDQILDEDDNVYISFVDSVATLQIRSVDNGHSGRYTCQAKNESGVERCYAFLLVQEPAQIVEKAKSVDVTEKDPMTLECVVAGTPELKVKWLKDGKQIVPSRYFSMSFENNVASFRIQSVMKQDSGQYTFKVENDFGSSSCDAYLRVLDQNIPPSFTKKLTKMDKVLGSSIHMECKVSGSLPISAQWFKDGKEISTSAKYRLVCHERSVSLEVNNLELEDTANYTCKVSNVAGDDACSGILTVKEPPSFLVKPGRQQAIPDSTVEFKAILKGTPPFKIKWFKDDVELVSGPKCFIGLEGSTSFLNLYSVDASKTGQYTCHVTNDVGSDSCTTMLLVTEPPKFVKKLEASKIVKAGDSSRLECKIAGSPEIRVVWFRNEHELPASDKYRMTFIDSVAVIQMNNLSTEDSGDFICEAQNPAGSTSCSTKVIVKEPPVFSSFPPIVETLKNAEVSLECELSGTPPFEVVWYKDKRQLRSSKKYKIASKNFHTSIHILNVDTSDIGEYHCKAQNEVGSDTCVCTVKLKEPPRFVSKLNSLTVVAGEPAELQASIEGAQPIFVQWLKEKEEVIRESENIRITFVENVATLQFAKAEPANAGKYICQIKNDGGMRENMATLMVLEPAVIVEKAGPMTVTVGETCTLECKVAGTPELSVEWYKDGKLLTSSQKHKFSFYNKISSLRILSVERQDAGTYTFQVQNNVGKSSCTAVVDVSDRAVPPSFTRRLKNTGGVLGASCILECKVAGSSPISVAWFHEKTKIVSGAKYQTTFSDNVCTLQLNSLDSSDMGNYTCVAANVAGSDECRAVLTVQEPPSFVKEPEPLEVLPGKNVTFTSVIRGTPPFKVNWFRGARELVKGDRCNIYFEDTVAELELFNIDISQSGEYTCVVSNNAGQASCTTRLFVKEPAAFLKRLSDHSVEPGKSIILESTYTGTLPISVTWKKDGFNITTSEKCNIVTTEKTCILEILNSTKRDAGQYSCEIENEAGRDVCGALVSTLEPPYFVTELEPLEAAVGDSVSLQCQVAGTPEITVSWYKGDTKLRPTPEYRTYFTNNVATLVFNKVNINDSGEYTCKAENSIGTASSKTVFRIQERQLPPSFARQLKDIEQTVGLPVTLTCRLNGSAPIQVCWYRDGVLLRDDENLQTSFVDNVATLKILQTDLSHSGQYSCSASNPLGTASSSARLTAREPKKSPFFDIKPVSIDVIAGESADFECHVTGAQPMRITWSKDNKEIRPGGNYTITCVGNTPHLRILKVGKGDSGQYTCQATNDVGKDMCSAQLSVKEPPKFVKKLEASKVAKQGESIQLECKISGSPEIKVSWFRNDSELHESWKYNMSFINSVALLTINEASAEDSGDYICEAHNGVGDASCSTALTVKAPPVFTQKPSPVGALKGSDVILQCEISGTPPFEVVWVKDRKQVRNSKKFKITSKHFDTSLHILNLEASDVGEYHCKATNEVGSDTCSCSVKFKEPPRFVKKLSDTSTLIGDAVELRAIVEGFQPISVVWLKDRGEVIRESENTRISFIDNIATLQLGSPEASNSGKYICQIKNDAGMRECSAVLTVLEPARIIEKPEPMTVTTGNPFALECVVTGTPELSAKWFKDGRELSADSKHHITFINKVASLKIPCAEMSDKGLYSFEVKNSVGKSNCTVSVHVSDRIVPPSFIRKLKDVNAILGASVVLECRVSGSAPISVGWFQDGNEIVSGPKCQSSFSENVCTLNLSLLEPSDTGIYTCVAANVAGSDECSAVLTVQEPPSFEQTPDSVEVLPGMSLTFTSVIRGTPPFKVKWFKGSRELVPGESCNISLEDFVTELELFEVQPLESGDYSCLVTNDAGSASCTTHLFVKEPATFVKRLADFSVETGSPIVLEATYTGTPPISVSWIKDEYLISQSERCSITMTEKSTILEILESTIEDYAQYSCLIENEAGQDICEALVSVLEPPYFIEPLEHVEAVIGEPATLQCKVDGTPEIRISWYKEHTKLRSAPAYKMQFKNNVASLVINKVDHSDVGEYSCKADNSVGAVASSAVLVIKARKLPPFFARKLKDVHETLGFPVAFECRINGSEPLQVSWYKDGVLLKDDANLQTSFVHNVATLQILQTDQSHIGQYNCSASNPLGTASSSAKLILSEHEVPPFFDLKPVSVDLALGESGTFKCHVTGTAPIKITWAKDNREIRPGGNYKMTLVENTATLTVLKVGKGDAGQYTCYASNIAGKDSCSAQLGVQEPPRFIKKLEPSRIVKQDEFTRYECKIGGSPEIKVLWYKDETEIQESSKFRMSFVDSVAVLEMHNLSVEDSGDYTCEAHNAAGSASSSTSLKVKEPPIFRKKPHPIETLKGADVHLECELQGTPPFHVSWYKDKRELRSGKKYKIMSENFLTSIHILNVDAADIGEYQCKATNDVGSDTCVGSIALKAPPRFVKKLSDISTVVGKEVQLQTTIEGAEPISVVWFKDKGEIVRESDNIWISYSENIATLQFSRVEPANAGKYTCQIKNDAGMQECFATLSVLEPATIVEKPESIKVTTGDTCTLECTVAGTPELSTKWFKDGKELTSDNKYKISFFNKVSGLKIINVAPSDSGVYSFEVQNPVGKDSCTASLQVSDRTVPPSFTRKLKETNGLSGSSVVMECKVYGSPPISVSWFHEGNEISSGRKYQTTLTDNTCALTVNMLEESDSGDYTCIATNMAGSDECSAPLTVREPPSFVQKPDPMDVLTGTNVTFTSIVKGTPPFSVSWFKGSSELVPGDRCNVSLEDSVAELELFDVDTSQSGEYTCIVSNEAGKASCTTHLYIKAPAKFVKRLNDYSIEKGKPLILEGTFTGTPPISVTWKKNGINVTPSQRCNITTTEKSAILEIPSSTVEDAGQYNCYIENASGKDSCSAQILILEPPYFVKQLEPVKVSVGDSASLQCQLAGTPEIGVSWYKGDTKLRPTTTYKMHFRNNVATLVFNQVDINDSGEYICKAENSVGEVSASTFLTVQEQKLPPSFSRQLRDVQETVGLPVVFDCAISGSEPISVSWYKDGKPLKDSPNVQTSFLDNTATLNIFKTDRSLAGQYSCTATNPIGSASSSARLILTEGKNPPFFDIRLAPVDAVVGESADFECHVTGTQPIKVSWAKDSREIRSGGKYQISYLENSAHLTVLKVDKGDSGQYTCYAVNEVGKDSCTAQLNIKERLIPPSFTKRLSETVEETEGNSFKLEGRVAGSQPITVAWYKNNIEIQPTSNCEITFKNNTLVLQVRKAGMNDAGLYTCKVSNDAGSALCTSSIVIKEPKKPPVFDQHLTPVTVSEGEYVQLSCHVQGSEPIRIQWLKAGREIKPSDRCSFSFASGTAVLELRDVAKADSGDYVCKASNVAGSDTTKSKVTIKDKPAVAPATKKAAVDGRLFFVSEPQSIRVVEKTTATFIAKVGGDPIPNVKWTKGKWRQLNQGGRVFIHQKGDEAKLEIRDTTKTDSGLYRCVAFNEHGEIESNVNLQVDERKKQEKIEGDLRAMLKKTPILKKGAGEEEEIDIMELLKNVDPKEYEKYARMYGITDFRGLLQAFELLKQSQEEETHRLEIEEIERSERDEKEFEELVSFIQQRLSQTEPVTLIKDIENQTVLKDNDAVFEIDIKINYPEIKLSWYKGTEKLEPSDKFEISIDGDRHTLRVKNCQLKDQGNYRLVCGPHIASAKLTVIEPAWERHLQDVTLKEGQTCTMTCQFSVPNVKSEWFRNGRILKPQGRHKTEVEHKVHKLTIADVRAEDQGQYTCKYEDLETSAELRIEAEPIQFTKRIQNIVVSEHQSATFECEVSFDDAIVTWYKGPTELTESQKYNFRNDGRCHYMTIHNVTPDDEGVYSVIARLEPRGEARSTAELYLTTKEIKLELKPPDIPDSRVPIPTMPIRAVPPEEIPPVVAPPIPLLLPTPEEKKPPPKRIEVTKKAVKKDAKKVVAKPKEMTPREEIVKKPPPPTTLIPAKAPEIIDVSSKAEEVKIMTITRKKEVQKEKEAVYEKKQAVHKEKRVFIESFEEPYDELEVEPYTEPFEQPYYEEPDEDYEEIKVEAKKEVHEEWEEDFEEGQEYYEREEGYDEGEEEWEEAYQEREVIQVQKEVYEESHERKVPAKVPEKKAPPPPKVIKKPVIEKIEKTSRRMEEEKVQVTKVPEVSKKIVPQKPSRTPVQEEVIEVKVPAVHTKKMVISEEKMFFASHTEEEVSVTVPEVQKEIVTEEKIHVAISKRVEPPPKVPELPEKPAPEEVAPVPIPKKVEPPAPKVPEVPKKPVPEEKKPVPVPKKEPAAPPKVPEVPKKPVPEEKIPVPVAKKKEAPPAKVPEVQKGVVTEEKITIVTQREESPPPAVPEIPKKKVPEERKPVPRKEEEVPPPPKVPALPKKPVPEEKVAVPVPVAKKAPPPRAEVSKKTVVEEKRFVAEEKLSFAVPQRVEVTRHEVSAEEEWSYSEEEEGVSISVYREEEREEEEEAEVTEYEVMEEPEEYVVEEKLHIISKRVEAEPAEVTERQEKKIVLKPKIPAKIEEPPPAKVPEAPKKIVPEKKVPAPVPKKEKVPPPKVPEEPKKPVPEKKVPPKVIKMEEPLPAKVTERHMQITQEEKVLVAVTKKEAPPKARVPEEPKRAVPEEKVLKLKPKREEEPPAKVTEFRKRVVKEEKVSIEAPKREPQPIKEVTIMEEKERAYTLEEEAVSVQREEEYEEYEEYDYKEFEEYEPTEEYDQYEEYEEREYERYEEHEEYITEPEKPIPVKPVPEEPVPTKPKAPPAKVLKKAVPEEKVPVPIPKKLKPPPPKVPEEPKKVFEEKIRISITKREKEQVTEPAAKVPMKPKRVVAEEKVPVPRKEVAPPVRVPEVPKELEPEEVAFEEEVVTHVEEYLVEEEEEYIHEEEEFITEEEVVPVIPVKVPEVPRKPVPEEKKPVPVPKKKEAPPAKVPEVPKKPEEKVPVLIPKKEKPPPAKVPEVPKKPVPEEKVPVPVPKKVEAPPAKVPEVPKKPVPEKKVPVPAPKKVEAPPAKVPEVPKKLIPEEKKPTPVPKKVEAPPPKVPKKREPVPVPVALPQEEEVLFEEEIVPEEEVLPEEEEVLPEEEEVLPEEEEVLPEEEEIPPEEEEVPPEEEYVPEEEEFVPEEEVLPEVKPKVPVPAPVPEIKKKVTEKKVVIPKKEEAPPAKVPEVPKKVEEKRIILPKEEEVLPVEVTEEPEEEPISEEEIPEEPPSIEEVEEVAPPRVPEVIKKAVPEAPTPVPKKVEAPPAKVSKKIPEEKVPVPVQKKEAPPAKVPEVPKKVPEKKVLVPKKEAVPPAKGRTVLEEKVSVAFRQEVVVKERLELEVVEAEVEEIPEEEEFHEVEEYFEEGEFHEVEEFIKLEQHRVEEEHRVEKVHRVIEVFEAEEVEVFEKPKAPPKGPEISEKIIPPKKPPTKVVPRKEPPAKVPEVPKKIVVEEKVRVPEEPRVPPTKVPEVLPPKEVVPEKKVPVPPAKKPEAPPPKVPEAPKEVVPEKKVPVPPPKKPEVPPTKVPEVPKAAVPEKKVPEAIPPKPESPPPEVPEAPKEVVPEKKVPAAPPKKPEVTPVKVPEAPKEVVPEKKVPVPPPKKPEVPPTKVPEVPKVAVPEKKVPEAIPPKPESPPPEVFEEPEEVALEEPPAEVVEEPEPAAPPQVTVPPKKPVPEKKAPAVVAKKPELPPVKVPEVPKEVVPEKKVPLVVPKKPEAPPAKVPEVPKEVVPEKKVAVPKKPEVPPAKVPEVPKKPVLEEKPAVPVPERAESPPPEVYEEPEEIAPEEEIAPEEEKPVPVAEEEEPEVPPPAVPEEPKKIIPEKKVPVIKKPEAPPPKEPEMPKKVVPVKKVPTVKKPETPAAKVPEVPKKLVPVKKEPVPVTKKPEVLPEKVPKVPEKIIPEKEVSVPIPAEPEVPPAEVEETPEEIIYEEKASITIGRKETPPVEEREIEKYIKPEEPEPEPQPEEIPVKEPEPEKVIEKPKLKPRPPPPPPAPPKEDVKEKIFQLKAIPKKKVPEKPQVPEKVELTPLKVPGGEKKVRKLLPERKPEPKEEVVLKSVLRKRPEEEEPKVEPKKLEKVKKPAVPEPPPPKPVEEVEVPTVTKRERKIPEPTKVPEIKPAIPLPAPEPKPKPEAEVKTIKPPPVEPEPTPIAAPVTVPVVGKKAEAKAPKEEAAKPKGPIKGVPKKTPSPIEAERRKLRPGSGGEKPPDEAPFTYQLKAVPLKFVKEIKDIILTESEFVGSSAIFECLVSPSTAITTWMKDGSNIRESPKHRFIADGKDRKLHIIDVQLSDAGEYTCVLRLGNKEKTSTAKLVVEELPVRFVKTLEEEVTVVKGQPLYLSCELNKERDVVWRKDGKIVVEKPGRIVPGVIGLMRALTINDADDTDAGTYTVTVENANNLECSSCVKVVEVIRDWLVKPIRDQHVKPKGTAIFACDIAKDTPNIKWFKGYDEIPAEPNDKTEILRDGNHLYLKIKNAMPEDIAEYAVEIEGKRYPAKLTLGEREVELLKPIEDVTIYEKESASFDAEISEADIPGQWKLKGELLRPSPTCEIKAEGGKRFLTLHKVKLDQAGEVLYQALNAITTAILTVKEIELDFAVPLKDVTVPERRQARFECVLTREANVIWSKGPDIIKSSDKFDIIADGKKHILVINDSQFDDEGVYTAEVEGKKTSARLFVTGIRLKFMSPLEDQTVKEGETATFVCELSHEKMHVVWFKNDAKLHTSRTVLISSEGKTHKLEMKEVTLDDISQIKAQVKELSSTAQLKVLEADPYFTVKLHDKTAVEKDEITLKCEVSKDVPVKWFKDGEEIVPSPKYSIKADGLRRILKIKKADLKDKGEYVCDCGTDKTKANVTVEARLIKVEKPLYGVEVFVGETAHFEIELSEPDVHGQWKLKGQPLTASPDCEIIEDGKKHILILHNCQLGMTGEVSFQAANAKSAANLKVKELPLIFITPLSDVKVFEKDEAKFECEVSREPKTFRWLKGTQEITGDDRFELIKDGTKHSMVIKSAAFEDEAKYMFEAEDKHTSGKLIIEGIRLKFLTPLKDVTAKEKESAVFTVELSHDNIRVKWFKNDQRLHTTRSVSMQDEGKTHSITFKDLSIDDTSQIRVEAMGMSSEAKLTVLEGDPYFTGKLQDYTGVEKDEVILQCEISKADAPVKWFKDGKEIKPSKNAVIKADGKKRMLILKKALKSDIGQYTCDCGTDKTSGKLDIEDREIKLVRPLHSVEVMETETARFETEISEDDIHANWKLKGEALLQTPDCEIKEEGKIHSLVLHNCRLDQTGGVDFQAANVKSSAHLRVKPRVIGLLRPLKDVTVTAGETATFDCELSYEDIPVEWYLKGKKLEPSDKVVPRSEGKVHTLTLRDVKLEDAGEVQLTAKDFKTHANLFVKEPPVEFTKPLEDQTVEEGATAVLECEVSRENAKVKWFKNGTEILKSKKYEIVADGRVRKLVIHDCTPEDIKTYTCDAKDFKTSCNLNVVPPHVEFLRPLTDLQVREKEMARFECELSRENAKVKWFKDGAEIKKGKKYDIISKGAVRILVINKCLLDDEAEYSCEVRTARTSGMLTVLEEEAVFTKNLANIEVSETDTIKLVCEVSKPGAEVIWYKGDEEIIETGRYEILTEGRKRILVIQNAHLEDAGNYNCRLPSSRTDGKVKVHELAAEFISKPQNLEILEGEKAEFVCSISKESFPVQWKRDDKTLESGDKYDVIADGKKRVLVVKDATLQDMGTYVVMVGAARAAAHLTVIEKLRIVVPLKDTRVKEQQEVVFNCEVNTEGAKAKWFRNEEAIFDSSKYIILQKDLVYTLRIRDAHLDDQANYNVSLTNHRGENVKSAANLIVEEEDLRIVEPLKDIETMEKKSVTFWCKVNRLNVTLKWTKNGEEVPFDNRVSYRVDKYKHMLTIKDCGFPDEGEYIVTAGQDKSVAELLIIEAPTEFVEHLEDQTVTEFDDAVFSCQLSREKANVKWYRNGREIKEGKKYKFEKDGSIHRLIIKDCRLDDECEYACGVEDRKSRARLFVEEIPVEIIRPPQDILEAPGADVVFLAELNKDKVEVQWLRNNMVVVQGDKHQMMSEGKIHRLQICDIKPRDQGEYRFIAKDKEARAKLELAAAPKIKTADQDLVVDVGKPLTMVVPYDAYPKAEAEWFKENEPLSTKTIDTTAEQTSFRILEAKKGDKGRYKIVLQNKHGKAEGFINLKVIDVPGPVRNLEVTETFDGEVSLAWEEPLTDGGSKIIGYVVERRDIKRKTWVLATDRAESCEFTVTGLQKGGVEYLFRVSARNRVGTGEPVETDNPVEARSKYDVPGPPLNVTITDVNRFGVSLTWEPPEYDGGAEITNYVIELRDKTSIRWDTAMTVRAEDLSATVTDVVEGQEYSFRVRAQNRIGVGKPSAATPFVKVADPIERPSPPVNLTSSDQTQSSVQLKWEPPLKDGGSPILGYIIERCEEGKDNWIRCNMKLVPELTYKVTGLEKGNKYLYRVSAENKAGVSDPSEILGPLTADDAFVEPTMDLSAFKDGLEVIVPNPITILVPSTGYPRPTATWCFGDKVLETGDRVKMKTLSAYAELVISPSERSDKGIYTLKLENRVKTISGEIDVNVIARPSAPKELKFGDITKDSVHLTWEPPDDDGGSPLTGYVVEKREVSRKTWTKVMDFVTDLEFTVPDLVQGKEYLFKVCARNKCGPGEPAYVDEPVNMSTPATVPDPPENVKWRDRTANSIFLTWDPPKNDGGSRIKGYIVERCPRGSDKWVACGEPVAETKMEVTGLEEGKWYAYRVKALNRQGASKPSRPTEEIQAVDTQEAPEIFLDVKLLAGLTVKAGTKIELPATVTGKPEPKITWTKADMILKQDKRITIENVPKKSTVTIVDSKRSDTGTYIIEAVNVCGRATAVVEVNVLDKPGPPAAFDITDVTNESCLLTWNPPRDDGGSKITNYVVERRATDSEVWHKLSSTVKDTNFKATKLIPNKEYIFRVAAENMYGVGEPVQASPITAKYQFDPPGPPTRLEPSDITKDAVTLTWCEPDDDGGSPITGYWVERLDPDTDKWVRCNKMPVKDTTYRVKGLTNKKKYRFRVLAENLAGPGKPSKSTEPILIKDPIDPPWPPGKPTVKDVGKTSVRLNWTKPEHDGGAKIESYVIEMLKTGTDEWVRVAEGVPTTQHLLPGLMEGQEYSFRVRAVNKAGESEPSEPSDPVLCREKLYPPSPPRWLEVINITKNTADLKWTVPEKDGGSPITNYIVEKRDVRRKGWQTVDTTVKDTKCTVTPLTEGSLYVFRVAAENAIGQSDYTEIEDSVLAKDTFTTPGPPYALAVVDVTKRHVDLKWEPPKNDGGRPIQRYVIEKKERLGTRWVKAGKTAGPDCNFRVTDVIEGTEVQFQVRAENEAGVGHPSEPTEILSIEDPTSPPSPPLDLHVTDAGRKHIAIAWKPPEKNGGSPIIGYHVEMCPVGTEKWMRVNSRPIKDLKFKVEEGVVPDKEYVLRVRAVNAIGVSEPSEISENVVAKDPDCKPTIDLETHDIIVIEGEKLSIPVPFRAVPVPTVSWHKDGKEVKASDRLTMKNDHISAHLEVPKSVRADAGIYTITLENKLGSATASINVKVIGLPGPCKDIKASDITKSSCKLTWEPPEFDGGTPILHYVLERREAGRRTYIPVMSGENKLSWTVKDLIPNGEYFFRVKAVNKVGGGEYIELKNPVIAQDPKQPPDPPVDVEVHNPTAEAMTITWKPPLYDGGSKIMGYIIEKIAKGEERWKRCNEHLVPILTYTAKGLEEGKEYQFRVRAENAAGISEPSRATPPTKAVDPIDAPKVILRTSLEVKRGDEIALDASISGSPYPTITWIKDENVIVPEEIKKRAAPLVRRRKGEVQEEEPFVLPLTQRLSIDNSKKGESQLRVRDSLRPDHGLYMIKVENDHGIAKAPCTVSVLDTPGPPINFVFEDIRKTSVLCKWEPPLDDGGSEIINYTLEKKDKTKPDSEWIVVTSTLRHCKYSVTKLIEGKEYLFRVRAENRFGPGPPCVSKPLVAKDPFGPPDAPDKPIVEDVTSNSMLVKWNEPKDNGSPILGYWLEKREVNSTHWSRVNKSLLNALKANVDGLLEGLTYVFRVCAENAAGPGKFSPPSDPKTAHDPISPPGPPIPRVTDTSSTTIELEWEPPAFNGGGEIVGYFVDKQLVGTNEWSRCTEKMIKVRQYTVKEIREGADYKLRVSAVNAAGEGPPGETQPVTVAEPQEPPAVELDVSVKGGIQIMAGKTLRIPAVVTGRPVPTKVWTKEEGELDKDRVVIDNVGTKSELIIKDALRKDHGRYVITATNSCGSKFAAARVEVFDVPGPVLDLKPVVTNRKMCLLNWSDPEDDGGSEITGFIIERKDAKMHTWRQPIETERSKCDITGLLEGQEYKFRVIAKNKFGCGPPVEIGPILAVDPLGPPTSPERLTYTERTKSTITLDWKEPRSNGGSPIQGYIIEKRRHDKPDFERVNKRLCPTTSFLVENLDEHQMYEFRVKAVNEIGESEPSLPLNVVIQDDEVPPTIKLRLSVRGDTIKVKAGEPVHIPADVTGLPMPKIEWSKNETVIEKPTDALQITKEEVSRSEAKTELSIPKAVREDKGTYTVTASNRLGSVFRNVHVEVYDRPSPPRNLAVTDIKAESCYLTWDAPLDNGGSEITHYVIDKRDASRKKAEWEEVTNTAVEKRYGIWKLIPNGQYEFRVRAVNKYGISDECKSDKVVIQDPYRLPGPPGKPKVLARTKGSMLVSWTPPLDNGGSPITGYWLEKREEGSPYWSRVSRAPITKVGLKGVEFNVPRLLEGVKYQFRAMAINAAGIGPPSEPSDPEVAGDPIFPPGPPSCPEVKDKTKSSISLGWKPPAKDGGSPIKGYIVEMQEEGTTDWKRVNEPDKLITTCECVVPNLKELRKYRFRVKAVNEAGESEPSDTTGEIPATDIQEEPEVFIDIGAQDCLVCKAGSQIRIPAVIKGRPTPKSSWEFDGKAKKAMKDGVHDIPEDAQLETAENSSVIIIPECKRSHTGKYSITAKNKAGQKTANCRVKVMDVPGPPKDLKVSDITRGSCRLSWKMPDDDGGDRIKGYVIEKRTIDGKAWTKVNPDCGSTTFVVPDLLSEQQYFFRVRAENRFGIGPPVETIQRTTARDPIYPPDPPIKLKIGLITKNTVHLSWKPPKNDGGSPVTHYIVECLAWDPTGTKKEAWRQCNKRDVEELQFTVEDLVEGGEYEFRVKAVNAAGVSKPSATVGPVTVKDQTCPPSIDLKEFMEVEEGTNVNIVAKIKGVPFPTLTWFKAPPKKPDNKEPVLYDTHVNKLVVDDTCTLVIPQSRRSDTGLYTITAVNNLGTASKEMRLNVLGRPGPPVGPIKFESVSADQMTLSWFPPKDDGGSKITNYVIEKREANRKTWVHVSSEPKECTYTIPKLLEGHEYVFRIMAQNKYGIGEPLDSEPETARNLFSVPGAPDKPTVSSVTRNSMTVNWEEPEYDGGSPVTGYWLEMKDTTSKRWKRVNRDPIKAMTLGVSYKVTGLIEGSDYQFRVYAINAAGVGPASLPSDPATARDPIAPPGPPFPKVTDWTKSSADLEWSPPLKDGGSKVTGYIVEYKEEGKEEWEKGKDKEVRGTKLVVTGLKEGAFYKFRVRAVNIAGIGEPGEVTDVIEMKDRLVSPDLQLDASVRDRIVVHAGGVIRIIAYVSGKPPPTVTWNMNERTLPQEATIETTAISSSMVIKNCQRSHQGVYSLLAKNEAGERKKTIIVDVLDVPGPVGTPFLAHNLTNESCKLTWFSPEDDGGSPITNYVIEKRESDRRAWTPVTYTVTRQNATVQGLIQGKAYFFRIAAENSIGMGPFVETSEALVIREPITVPERPEDLEVKEVTKNTVTLTWNPPKYDGGSEIINYVLESRLIGTEKFHKVTNDNLLSRKYTVKGLKEGDTYEYRVSAVNIVGQGKPSFCTKPITCKDELAPPTLHLDFRDKLTIRVGEAFALTGRYSGKPKPKVSWFKDEADVLEDDRTHIKTTPATLALEKIKAKRSDSGKYCVVVENSTGSRKGFCQVNVVDRPGPPVGPVSFDEVTKDYMVISWKPPLDDGGSKITNYIIEKKEVGKDVWMPVTSASAKTTCKVSKLLEGKDYIFRIHAENLYGISDPLVSDSMKAKDRFRVPDAPDQPIVTEVTKDSALVTWNKPHDGGKPITNYILEKRETMSKRWARVTKDPIHPYTKFRVPDLLEGCQYEFRVSAENEIGIGDPSPPSKPVFAKDPIAKPSPPVNPEAIDTTCNSVDLTWQPPRHDGGSKILGYIVEYQKVGDEEWRRANHTPESCPETKYKVTGLRDGQTYKFRVLAVNAAGESDPAHVPEPVLVKDRLEPPELILDANMAREQHIKVGDTLRLSAIIKGVPFPKVTWKKEDRDAPTKARIDVTPVGSKLEIRNAAHEDGGIYSLTVENPAGSKTVSVKVLVLDKPGPPRDLEVSEIRKDSCYLTWKEPLDDGGSVITNYVVERRDVASAQWSPLSATSKKKSHFAKHLNEGNQYLFRVAAENQYGRGPFVETPKPIKALDPLHPPGPPKDLHHVDVDKTEVSLVWNKPDRDGGSPITGYLVEYQEEGTQDWIKFKTVTNLECVVTGLQQGKTYRFRVKAENIVGLGLPDTTIPIECQEKLVPPSVELDVKLIEGLVVKAGTTVRFPAIIRGVPVPTAKWTTDGSEIKTDEHYTVETDNFSSVLTIKNCLRRDTGEYQITVSNAAGSKTVAVHLTVLDVPGPPTGPINILDVTPEHMTISWQPPKDDGGSPVINYIVEKQDTRKDTWGVVSSGSSKTKLKIPHLQKGCEYVFRVRAENKIGVGPPLDSTPTVAKHKFSPPSPPGKPVVTDITENAATVSWTLPKSDGGSPITGYYMERREVTGKWVRVNKTPIADLKFRVTGLYEGNTYEFRVFAENLAGLSKPSPSSDPIKACRPIKPPGPPINPKLKDKSRETADLVWTKPLSDGGSPILGYVVECQKPGTAQWNRINKDELIRQCAFRVPGLIEGNEYRFRIKAANIVGEGEPRELAESVIAKDILHPPEVELDVTCRDVITVRVGQTIRILARVKGRPEPDITWTKEGKVLVREKRVDLIQDLPRVELQIKEAVRADHGKYIISAKNSSGHAQGSAIVNVLDRPGPCQNLKVTNVTKENCTISWENPLDNGGSEITNFIVEYRKPNQKGWSIVASDVTKRLIKANLLANNEYYFRVCAENKVGVGPTIETKTPILAINPIDRPGEPENLHIADKGKTFVYLKWRRPDYDGGSPNLSYHVERRLKGSDDWERVHKGSIKETHYMVDRCVENQIYEFRVQTKNEGGESDWVKTEEVVVKEDLQKPVLDLKLSGVLTVKAGDTIRLEAGVRGKPFPEVAWTKDKDATDLTRSPRVKIDTRADSSKFSLTKAKRSDGGKYVVTATNTAGSFVAYATVNVLDKPGPVRNLKIVDVSSDRCTVCWDPPEDDGGCEIQNYILEKCETKRMVWSTYSATVLTPGTTVTRLIEGNEYIFRVRAENKIGTGPPTESKPVIAKTKYDKPGRPDPPEVTKVSKEEMTVVWNPPEYDGGKSITGYFLEKKEKHSTRWVPVNKSAIPERRMKVQNLLPDHEYQFRVKAENEIGIGEPSLPSRPVVAKDPIEPPGPPTNFRVVDTTKHSITLGWGKPVYDGGAPIIGYVVEMRPKIADASPDEGWKRCNAAAQLVRKEFTVTSLDENQEYEFRVCAQNQVGIGRPAELKEAIKPKEILEPPEIDLDASMRKLVIVRAGCPIRLFAIVRGRPAPKVTWRKVGIDNVVRKGQVDLVDTMAFLVIPNSTRDDSGKYSLTLVNPAGEKAVFVNVRVLDTPGPVSDLKVSDVTKTSCHVSWAPPENDGGSQVTHYIVEKREADRKTWSTVTPEVKKTSFHVTNLVPGNEYYFRVTAVNEYGPGVPTDVPKPVLASDPLSEPDPPRKLEVTEMTKNSATLAWLPPLRDGGAKIDGYITSYREEEQPADRWTEYSVVKDLSLVVTGLKEGKKYKFRVAARNAVGVSLPREAEGVYEAKEQLLPPKILMPEQITIKAGKKLRIEAHVYGKPHPTCKWKKGEDEVVTSSHLAVHKADSSSILIIKDVTRKDSGYYSLTAENSSGTDTQKIKVVVMDAPGPPQPPFDISDIDADACSLSWHIPLEDGGSNITNYIVEKCDVSRGDWVTALASVTKTSCRVGKLIPGQEYIFRVRAENRFGISEPLTSPKMVAQFPFGVPSEPKNARVTKVNKDCIFVAWDRPDSDGGSPIIGYLIERKERNSLLWVKANDTLVRSTEYPCAGLVEGLEYSFRIYALNKAGSSPPSKPTEYVTARMPVDPPGKPEVIDVTKSTVSLIWARPKHDGGSKIIGYFVEACKLPGDKWVRCNTAPHQIPQEEYTATGLEEKAQYQFRAIARTAVNISPPSEPSDPVTILAENVPPRIDLSVAMKSLLTVKAGTNVCLDATVFGKPMPTVSWKKDGTLLKPAEGIKMAMQRNLCTLELFSVNRKDSGDYTITAENSSGSKSATIKLKVLDKPGPPASVKINKMYSDRAMLSWEPPLEDGGSEITNYIVDKRETSRPNWAQVSATVPITSCSVEKLIEGHEYQFRICAENKYGVGDPVFTEPAIAKNPYDPPGRCDPPVISNITKDHMTVSWKPPADDGGSPITGYLLEKRETQAVNWTKVNRKPIIERTLKATGLQEGTEYEFRVTAINKAGPGKPSDASKAAYARDPQYPPGPPAFPKVYDTTRSSVSLSWGKPAYDGGSPIIGYLVEVKRADSDNWVRCNLPQNLQKTRFEVTGLMEDTQYQFRVYAVNKIGYSDPSDVPDKHYPKDILIPPEGELDADLRKTLILRAGVTMRLYVPVKGRPPPKITWSKPNVNLRDRIGLDIKSTDFDTFLRCENVNKYDAGKYILTLENSCGKKEYTIVVKVLDTPGPPVNVTVKEISKDSAYVTWEPPIIDGGSPIINYVVQKRDAERKSWSTVTTECSKTSFRVANLEEGKSYFFRVFAENEYGIGDPGETRDAVKASQTPGPVVDLKVRSVSKSSCSIGWKKPHSDGGSRIIGYVVDFLTEENKWQRVMKSLSLQYSAKDLTEGKEYTFRVSAENENGEGTPSEITVVARDDVVAPDLDLKGLPDLCYLAKENSNFRLKIPIKGKPAPSVSWKKGEDPLATDTRVSVESSAVNTTLIVYDCQKSDAGKYTITLKNVAGTKEGTISIKVVGKPGIPTGPIKFDEVTAEAMTLKWAPPKDDGGSEITNYILEKRDSVNNKWVTCASAVQKTTFRVTRLHEGMEYTFRVSAENKYGVGEGLKSEPIVARHPFDVPDAPPPPNIVDVRHDSVSLTWTDPKKTGGSPITGYHLEFKERNSLLWKRANKTPIRMRDFKVTGLTEGLEYEFRVMAINLAGVGKPSLPSEPVVALDPIDPPGKPEVINITRNSVTLIWTEPKYDGGHKLTGYIVEKRDLPSKSWMKANHVNVPECAFTVTDLVEGGKYEFRIRAKNTAGAISAPSESTETIICKDEYEAPTIVLDPTIKDGLTIKAGDTIVLNAISILGKPLPKSSWSKAGKDIRPSDITQITSTPTSSMLTIKYATRKDAGEYTITATNPFGTKVEHVKVTVLDVPGPPGPVEISNVSAEKATLTWTPPLEDGGSPIKSYILEKRETSRLLWTVVSEDIQSCRHVATKLIQGNEYIFRVSAVNHYGKGEPVQSEPVKMVDRFGPPGPPEKPEVSNVTKNTATVSWKRPVDDGGSEITGYHVERREKKSLRWVRAIKTPVSDLRCKVTGLQEGSTYEFRVSAENRAGIGPPSEASDSVLMKDAAYPPGPPSNPHVTDTTKKSASLAWGKPHYDGGLEITGYVVEHQKVGDEAWIKDTTGTALRITQFVVPDLQTKEKYNFRISAINDAGVGEPAVIPDVEIVEREMAPDFELDAELRRTLVVRAGLSIRIFVPIKGRPAPEVTWTKDNINLKNRANIENTESFTLLIIPECNRYDTGKFVMTIENPAGKKSGFVNVRVLDTPGPVLNLRPTDITKDSVTLHWDLPLIDGGSRITNYIVEKREATRKSYSTATTKCHKCTYKVTGLSEGCEYFFRVMAENEYGIGEPTETTEPVKASEAPSPPDSLNIMDITKSTVSLAWPKPKHDGGSKITGYVIEAQRKGSDQWTHITTVKGLECVVRNLTEGEEYTFQVMAVNSAGRSAPRESRPVIVKEQTMLPELDLRGIYQKLVIAKAGDNIKVEIPVLGRPKPTVTWKKGDQILKQTQRVNFETTATSTILNINECVRSDSGPYPLTARNIVGEVGDVITIQVHDIPGPPTGPIKFDEVSSDFVTFSWDPPENDGGVPISNYVVEMRQTDSTTWVELATTVIRTTYKATRLTTGLEYQFRVKAQNRYGVGPGITSACIVANYPFKVPGPPGTPQVTAVTKDSMTISWHEPLSDGGSPILGYHVERKERNGILWQTVSKALVPGNIFKSSGLTDGIAYEFRVIAENMAGKSKPSKPSEPMLALDPIDPPGKPVPLNITRHTVTLKWAKPEYTGGFKITSYIVEKRDLPNGRWLKANFSNILENEFTVSGLTEDAAYEFRVIAKNAAGAISPPSEPSDAITCRDDVEAPKIKVDVKFKDTVILKAGEAFRLEADVSGRPPPTMEWSKDGKELEGTAKLEIKIADFSTNLVNKDSTRRDSGAYTLTATNPGGFAKHIFNVKVLDRPGPPEGPLAVTEVTSEKCVLSWFPPLDDGGAKIDHYIVQKRETSRLAWTNVASEVQVTKLKVTKLLKGNEYIFRVMAVNKYGVGEPLESEPVLAVNPYGPPDPPKNPEVTTITKDSMVVCWGHPDSDGGSEIINYIVERRDKAGQRWIKCNKKTLTDLRYKVSGLTEGHEYEFRIMAENAAGISAPSPTSPFYKACDTVFKPGPPGNPRVLDTSRSSISIAWNKPIYDGGSEITGYMVEIALPEEDEWQIVTPPAGLKATSYTITGLTENQEYKIRIYAMNSEGLGEPALVPGTPKAEDRMLPPEIELDADLRKVVTIRACCTLRLFVPIKGRPAPEVKWARDHGESLDKASIESTSSYTLLIVGNVNRFDSGKYILTVENSSGSKSAFVNVRVLDTPGPPQDLKVKEVTKTSVTLTWDPPLLDGGSKIKNYIVEKRESTRKAYSTVATNCHKTSWKVDQLQEGCSYYFRVLAENEYGIGLPAETAESVKASERPLPPGKITLMDVTRNSVSLSWEKPEHDGGSRILGYIVEMQTKGSDKWATCATVKVTEATITGLIQGEEYSFRVSAQNEKGISDPRQLSVPVIAKDLVIPPAFKLLFNTFTVLAGEDLKVDVPFIGRPTPAVTWHKDNVPLKQTTRVNAESTENNSLLTIKDACREDVGHYVVKLTNSAGEAIETLNVIVLDKPGPPTGPVKMDEVTADSITLSWGPPKYDGGSSINNYIVEKRDTSTTTWQIVSATVARTTIKACRLKTGCEYQFRIAAENRYGKSTYLNSEPTVAQYPFKVPGPPGTPVVTLSSRDSMEVQWNEPISDGGSRVIGYHLERKERNSILWVKLNKTPIPQTKFKTTGLEEGVEYEFRVSAENIVGIGKPSKVSECYVARDPCDPPGRPEAIIVTRNSVTLQWKKPTYDGGSKITGYIVEKKELPEGRWMKASFTNIIDTHFEVTGLVEDHRYEFRVIARNAAGVFSEPSESTGAITARDEVDPPRISMDPKYKDTIVVHAGESFKVDADIYGKPIPTIQWIKGDQELSNTARLEIKSTDFATSLSVKDAVRVDSGNYILKAKNVAGERSVTVNVKVLDRPGPPEGPVVISGVTAEKCTLAWKPPLQDGGSDIINYIVERRETSRLVWTVVDANVQTLSCKVTKLLEGNEYTFRIMAVNKYGVGEPLESEPVVAKNPFVVPDAPKAPEVTTVTKDSMIVVWERPASDGGSEILGYVLEKRDKEGIRWTRCHKRLIGELRLRVTGLIENHDYEFRVSAENAAGLSEPSPPSAYQKACDPIYKPGPPNNPKVIDITRSSVFLSWSKPIYDGGCEIQGYIVEKCDVSVGEWTMCTPPTGINKTNIEVEKLLEKHEYNFRICAINKAGVGEHADVPGPIIVEEKLEAPDIDLDLELRKIINIRAGGSLRLFVPIKGRPTPEVKWGKVDGEIRDAAIIDVTSSFTSLVLDNVNRYDSGKYTLTLENSSGTKSAFVTVRVLDTPSPPVNLKVTEITKDSVSITWEPPLLDGGSKIKNYIVEKREATRKSYAAVVTNCHKNSWKIDQLQEGCSYYFRVTAENEYGIGLPAQTADPIKVAEVPQPPGKITVDDVTRNSVSLSWTKPEHDGGSKIIQYIVEMQAKHSEKWSECARVKSLQAVITNLTQGEEYLFRVVAVNEKGRSDPRSLAVPIVAKDLVIEPDVKPAFSSYSVQVGQDLKIEVPISGRPKPTITWTKDGLPLKQTTRINVTDSLDLTTLSIKETHKDDGGQYGITVANVVGQKTASIEIVTLDKPDPPKGPVKFDDVSAESITLSWNPPLYTGGCQITNYIVQKRDTTTTVWDVVSATVARTTLKVTKLKTGTEYQFRIFAENRYGQSFALESDPIVAQYPYKEPGPPGTPFATAISKDSMVIQWHEPVNNGGSPVIGYHLERKERNSILWTKVNKTIIHDTQFKAQNLEEGIEYEFRVYAENIVGVGKASKNSECYVARDPCDPPGTPEPIMVKRNEITLQWTKPVYDGGSMITGYIVEKRDLPDGRWMKASFTNVIETQFTVSGLTEDQRYEFRVIAKNAAGAISKPSDSTGPITAKDEVELPRISMDPKFRDTIVVNAGETFRLEADVHGKPLPTIEWLRGDKEIEESARCEIKNTDFKALLIVKDAIRIDGGQYILRASNVAGSKSFPVNVKVLDRPGPPEGPVQVTGVTSEKCSLTWSPPLQDGGSDISHYVVEKRETSRLAWTVVASEVVTNSLKVTKLLEGNEYVFRIMAVNKYGVGEPLESAPVLMKNPFVLPGPPKSLEVTNIAKDSMTVCWNRPDSDGGSEIIGYIVEKRDRSGIRWIKCNKRRITDLRLRVTGLTEDHEYEFRVSAENAAGVGEPSPATVYYKACDPVFKPGPPTNAHIVDTTKNSITLAWGKPIYDGGSEILGYVVEICKADEEEWQIVTPQTGLRVTRFEISKLTEHQEYKIRVCALNKVGLGEATSVPGTVKPEDKLEAPELDLDSELRKGIVVRAGGSARIHIPFKGRPTPEITWSREEGEFTDKVQIEKGVNYTQLSIDNCDRNDAGKYILKLENSSGSKSAFVTVKVLDTPGPPQNLAVKEVRKDSAFLVWEPPIIDGGAKVKNYVIDKRESTRKAYANVSSKCSKTSFKVENLTEGAIYYFRVMAENEFGVGVPVETVDAVKAAEPPSPPGKVTLTDVSQTSASLMWEKPEHDGGSRVLGYVVEMQPKGTEKWSIVAESKVCNAVVTGLSSGQEYQFRVKAYNEKGKSDPRVLGVPVIAKDLTIQPSLKLPFNTYSIQAGEDLKIEIPVIGRPRPNISWVKDGEPLKQTTRVNVEETATSTVLHIKEGNKDDFGKYTVTATNSAGTATENLSVIVLEKPGPPVGPVRFDEVSADFVVISWEPPAYTGGCQISNYIVEKRDTTTTTWHMVSATVARTTIKITKLKTGTEYQFRIFAENRYGKSAPLDSKAVIVQYPFKEPGPPGTPFVTSISKDQMLVQWHEPVNDGGTKIIGYHLEQKEKNSILWVKLNKTPIQDTKFKTTGLDEGLEYEFKVSAENIVGIGKPSKVSECFVARDPCDPPGRPEAIVITRNNVTLKWKKPAYDGGSKITGYIVEKKDLPDGRWMKASFTNVLETEFTVSGLVEDQRYEFRVIARNAAGNFSEPSDSSGAITARDEIDAPNASLDPKYKDVIVVHAGETFVLEADIRGKPIPDVVWSKDGKELEETAARMEIKSTIQKTTLVVKDCIRTDGGQYILKLSNVGGTKSIPITVKVLDRPGPPEGPLKVTGVTAEKCYLAWNPPLQDGGANISHYIIEKRETSRLSWTQVSTEVQALNYKVTKLLPGNEYIFRVMAVNKYGIGEPLESGPVTACNPYKPPGPPSTPEVSAITKDSMVVTWARPVDDGGTEIEGYILEKRDKEGVRWTKCNKKTLTDLRLRVTGLTEGHSYEFRVAAENAAGVGEPSEPSVFYRACDALYPPGPPSNPKVTDTSRSSVSLAWSKPIYDGGAPVKGYVVEVKEAAADEWTTCTPPTGLQGKQFTVTKLKENTEYNFRICAINSEGVGEPATLPGSVVAQERIEPPEIELDADLRKVVVLRASATLRLFVTIKGRPEPEVKWEKAEGILTDRAQIEVTSSFTMLVIDNVTRFDSGRYNLTLENNSGSKTAFVNVRVLDSPSAPVNLTIREVKKDSVTLSWEPPLIDGGAKITNYIVEKRETTRKAYATITNNCTKTTFRIENLQEGCSYYFRVLASNEYGIGLPAETTEPVKVSEPPLPPGRVTLVDVTRNTATIKWEKPESDGGSKITGYVVEMQTKGSEKWSTCTQVKTLEATISGLTAGEEYVFRVAAVNEKGRSDPRQLGVPVIARDIEIKPSVELPFHTFNVKAREQLKIDVPFKGRPQATVNWRKDGQTLKETTRVNVSSSKTVTSLSIKEASKEDVGTYELCVSNSAGSITVPITIIVLDRPGPPGPIRIDEVSCDSITISWNPPEYDGGCQISNYIVEKKETTSTTWHIVSQAVARTSIKIVRLTTGSEYQFRVCAENRYGKSSYSESSAVVAEYPFSPPGPPGTPKVVHATKSTMLVTWQVPVNDGGSRVIGYHLEYKERSSILWSKANKILIADTQMKVSGLDEGLMYEYRVYAENIAGIGKCSKSCEPVPARDPCDPPGQPEVTNITRKSVSLKWSKPHYDGGAKITGYIVERRELPDGRWLKCNYTNIQETYFEVTELTEDQRYEFRVFARNAADSVSEPSESTGPIIVKDDVEPPRVMMDVKFRDVIVVKAGEVLKINADIAGRPLPVISWAKDGIEIEERARTEIISTDNHTLLTVKDCIRRDTGQYVLTLKNVAGTRSVAVNCKVLDKPGPPAGPLEINGLTAEKCSLSWGRPQEDGGADIDYYIVEKRETSHLAWTICEGELQMTSCKVTKLLKGNEYIFRVTGVNKYGVGEPLESVAIKALDPFTVPSPPTSLEITSVTKESMTLCWSRPESDGGSEISGYIIERREKNSLRWVRVNKKPVYDLRVKSTGLREGCEYEYRVYAENAAGLSLPSETSPLIRAEDPVFLPSPPSKPKIVDSGKTTITIAWVKPLFDGGAPITGYTVEYKKSDDTDWKTSIQSLRGTEYTISGLTTGAEYVFRVKSVNKVGASDPSDSSDPQIAKEREEEPLFDIDSEMRKTLIVKAGASFTMTVPFRGRPVPNVLWSKPDTDLRTRAYVDTTDSRTSLTIENANRNDSGKYTLTIQNVLSAASLTLVVKVLDTPGPPTNITVQDVTKESAVLSWDVPENDGGAPVKNYHIEKREASKKAWVSVTNNCNRLSYKVTNLQEGAIYYFRVSGENEFGVGIPAETKEGVKITEKPSPPEKLGVTSISKDSVSLTWLKPEHDGGSRIVHYVVEALEKGQKNWVKCAVAKSTHHVVSGLRENSEYFFRVFAENQAGLSDPRELLLPVLIKEQLEPPEIDMKNFPSHTVYVRAGSNLKVDIPISGKPLPKVTLSRDGVPLKATMRFNTEITAENLTINLKESVTADAGRYEITAANSSGTTKAFINIVVLDRPGPPTGPVVISDITEESVTLKWEPPKYDGGSQVTNYILLKRETSTAVWTEVSATVARTMMKVMKLTTGEEYQFRIKAENRFGISDHIDSACVTVKLPYTTPGPPSTPWVTNVTRESITVGWHEPVSNGGSAVVGYHLEMKDRNSILWQKANKLVIRTTHFKVTTISAGLIYEFRVYAENAAGVGKPSHPSEPVLAIDACEPPRNVRITDISKNSVSLSWQQPAFDGGSKITGYIVERRDLPDGRWTKASFTNVTETQFIISGLTQNSQYEFRVFARNAVGSISNPSEVVGPITCIDSYGGPVIDLPLEYTEVVKYRAGTSVKLRAGISGKPAPTIEWYKDDKELQTNALVCVENTTDLASILIKDADRLNSGCYELKLRNAMGSASATIRVQILDKPGPPGGPIEFKTVTAEKITLLWRPPADDGGAKITHYIVEKRETSRVVWSMVSEHLEECIITTTKIIKGNEYIFRVRAVNKYGIGEPLESDSVVAKNAFVTPGPPGIPEVTKITKNSMTVVWSRPIADGGSDISGYFLEKRDKKSLGWFKVLKETIRDTRQKVTGLTENSDYQYRVCAVNAAGQGPFSEPSEFYKAADPIDPPGPPAKIRIADSTKSSITLGWSKPVYDGGSAVTGYVVEIRQGEEEEWTTVSTKGEVRTTEYVVSNLKPGVNYYFRVSAVNCAGQGEPIEMNEPVQAKDILEAPEIDLDVALRTSVIAKAGEDVQVLIPFKGRPPPTVTWRKDEKNLGSDARYSIENTDSSSLLTIPQVTRNDTGKYILTIENGVGEPKSSTVSVKVLDTPAACQKLQVKHVSRGTVTLLWDPPLIDGGSPIINYVIEKRDATKRTWSVVSHKCSSTSFKLIDLSEKTPFFFRVLAENEIGIGEPCETTEPVKAAEVPAPIRDLSMKDSTKTSVILSWTKPDFDGGSVITEYVVERKGKGEQTWSHAGISKTCEIEVSQLKEQSVLEFRVFAKNEKGLSDPVTIGPITVKELIITPEVDLSDIPGAQVTVRIGHNVHLELPYKGKPKPSISWLKDGLPLKESEFVRFSKTENKITLSIKNAKKEHGGKYTVILDNAVCRIAVPITVITLGPPSKPKGPIRFDEIKADSVILSWDVPEDNGGGEITCYSIEKRETSQTNWKMVCSSVARTTFKVPNLVKDAEYQFRVRAENRYGVSQPLVSSIIVAKHQFRIPGPPGKPVIYNVTSDGMSLTWDAPVYDGGSEVTGFHVEKKERNSILWQKVNTSPISGREYRATGLVEGLDYQFRVYAENSAGLSSPSDPSKFTLAVSPVDPPGTPDYIDVTRETITLKWNPPLRDGGSKIVGYSIEKRQGNERWVRCNFTDVSECQYTVTGLSPGDRYEFRIIARNAVGTISPPSQSSGIIMTRDENVPPIVEFGPEYFDGLIIKSGESLRIKALVQGRPVPRVTWFKDGVEIEKRMNMEITDVLGSTSLFVRDATRDHRGVYTVEAKNASGSAKAEIKVKVQDTPGKVVGPIRFTNITGEKMTLWWDAPLNDGCAPITHYIIEKRETSRLAWALIEDKCEAQSYTAIKLINGNEYQFRVSAVNKFGVGRPLDSDPVVAQIQYTVPDAPGIPEPSNITGNSITLTWARPESDGGSEIQQYILERREKKSTRWVKVISKRPISETRFKVTGLTEGNEYEFHVMAENAAGVGPASGISRLIKCREPVNPPGPPTVVKVTDTSKTTVSLEWSKPVFDGGMEIIGYIIEMCKADLGDWHKVNAEACVKTRYTVTDLQAGEEYKFRVSAINGAGKGDSCEVTGTIKAVDRLTAPELDIDANFKQTHVVRAGASIRLFIAYQGRPTPTAVWSKPDSNLSLRADIHTTDSFSTLTVENCNRNDAGKYTLTVENNSGSKSITFTVKVLDTPGPPGPITFKDVTRGSATLMWDAPLLDGGARIHHYVVEKREASRRSWQVISEKCTRQIFKVNDLAEGVPYYFRVSAVNEYGVGEPYEMPEPIVATEQPAPPRRLDVVDTSKSSAVLAWLKPDHDGGSRITGYLLEMRQKGSDFWVEAGHTKQLTFTVERLVEKTEYEFRVKAKNDAGYSEPREAFSSVIIKEPQIEPTADLTGITNQLITCKAGSPFTIDVPISGRPAPKVTWKLEEMRLKETDRVSITTTKDRTTLTVKDSMRGDSGRYFLTLENTAGVKTFSVTVVVIGRPGPVTGPIEVSSVSAESCVLSWGEPKDGGGTEITNYIVEKRESGTTAWQLVNSSVKRTQIKVTHLTKYMEYSFRVSSENRFGVSKPLESAPIIAEHPFVPPSAPTRPEVYHVSANAMSIRWEEPYHDGGSKIIGYWVEKKERNTILWVKENKVPCLECNYKVTGLVEGLEYQFRTYALNAAGVSKASEASRPIMAQNPVDAPGRPEVTDVTRSTVSLIWSAPAYDGGSKVVGYIIERKPVSEVGDGRWLKCNYTIVSDNFFTVTALSEGDTYEFRVLAKNAAGVISKGSESTGPVTCRDEYAPPKAELDARLHGDLVTIRAGSDLVLDAAVGGKPEPKIIWTKGDKELDLCEKVSLQYTGKRATAVIKFCDRSDSGKYTLTVKNASGTKAVSVMVKVLDSPGPCGKLTVSRVTQEKCTLAWSLPQEDGGAEITHYIVERRETSRLNWVIVEGECPTLSYVVTRLIKNNEYIFRVRAVNKYGPGVPVESEPIVARNSFTIPSPPGIPEEVGTGKEHIIIQWTKPESDGGNEISNYLVDKREKKSLRWTRVNKDYVVYDTRLKVTSLMEGCDYQFRVTAVNAAGNSEPSEASNFISCREPSYTPGPPSAPRVVDTTKHSISLAWTKPMYDGGTDIVGYVLEMQEKDTDQWYRVHTNATIRNTEFTVPDLKMGQKYSFRVAAVNVKGMSEYSESIAEIEPVERIEIPDLELADDLKKTVTIRAGASLRLMVSVSGRPPPVITWSKQGIDLASRAIIDTTESYSLLIVDKVNRYDAGKYTIEAENQSGKKSATVLVKVYDTPGPCPSVKVKEVSRDSVTITWEIPTIDGGAPVNNYIVEKREAAMRAFKTVTTKCSKTLYRISGLVEGTMYYFRVLPENIYGIGEPCETSDAVLVSEVPLVPAKLEVVDVTKSTVTLAWEKPLYDGGSRLTGYVLEACKAGTERWMKVVTLKPTVLEHTVTSLNEGEQYLFRIRAQNEKGVSEPRETVTAVTVQDLRVLPTIDLSTMPQKTIHVPAGRPVELVIPIAGRPPPAASWFFAGSKLRESERVTVETHTKVAKLTIRETTIRDTGEYTLELKNVTGTTSETIKVIILDKPGPPTGPIKIDEIDATSITISWEPPELDGGAPLSGYVVEQRDAHRPGWLPVSESVTRSTFKFTRLTEGNEYVFRVAATNRFGIGSYLQSEVIECRSSIRIPGPPETLQIFDVSRDGMTLTWYPPEDDGGSQVTGYIVERKEVRADRWVRVNKVPVTMTRYRSTGLTEGLEYEHRVTAINARGSGKPSRPSKPIVAMDPIAPPGKPQNPRVTDTTRTSVSLAWSVPEDEGGSKVTGYLIEMQKVDQHEWTKCNTTPTKIREYTLTHLPQGAEYRFRVLACNAGGPGEPAEVPGTVKVTEMLEYPDYELDERYQEGIFVRQGGVIRLTIPIKGKPFPICKWTKEGQDISKRAMIATSETHTELVIKEADRGDSGTYDLVLENKCGKKAVYIKVRVIGSPNSPEGPLEYDDIQVRSVRVSWRPPADDGGADILGYILERREVPKAAWYTIDSRVRGTSLVVKGLKENVEYHFRVSAENQFGISKPLKSEEPVTPKTPLNPPEPPSNPPEVLDVTKSSVSLSWSRPKDDGGSRVTGYYIERKETSTDKWVRHNKTQITTTMYTVTGLVPDAEYQFRIIAQNDVGLSETSPASEPVVCKDPFDKPSQPGELEILSISKDSVTLQWEKPECDGGKEILGYWVEYRQSGDSAWKKSNKERIKDKQFTIGGLLEATEYEFRVFAENETGLSRPRRTAMSIKTKLTSGEAPGIRKEMKDVTTKLGEAAQLSCQIVGRPLPDIKWYRFGKELIQSRKYKMSSDGRTHTLTVMTEEQEDEGVYTCIATNEVGEVETSSKLLLQATPQFHPGYPLKEKYYGAVGSTLRLHVMYIGRPVPAMTWFHGQKLLQNSENITIENTEHYTHLVMKNVQRKTHAGKYKVQLSNVFGTVDAILDVEIQDKPDKPTGPIVIEALLKNSAVISWKPPADDGGSWITNYVVEKCEAKEGAEWQLVSSAISVTTCRIVNLTENAGYYFRVSAQNTFGISDPLEVSSVVIIKSPFEKPGAPGKPTITAVTKDSCVVAWKPPASDGGAKIRNYYLEKREKKQNKWISVTTEEIRETVFSVKNLIEGLEYEFRVKCENLGGESEWSEISEPITPKSDVPIQAPHFKEELRNLNVRYQSNATLVCKVTGHPKPIVKWYRQGKEIIADGLKYRIQEFKGGYHQLIIASVTDDDATVYQVRATNQGGSVSGTASLEVEVPAKIHLPKTLEGMGAVHALRGEVVSIKIPFSGKPDPVITWQKGQDLIDNNGHYQVIVTRSFTSLVFPNGVERKDAGFYVVCAKNRFGIDQKTVELDVADVPDPPRGVKVSDVSRDSVNLTWTEPASDGGSKITNYIVEKCATTAERWLRVGQARETRYTVINLFGKTSYQFRVIAENKFGLSKPSEPSEPTITKEDKTRAMNYDEEVDETREVSMTKASHSSTKELYEKYMIAEDLGRGEFGIVHRCVETSSKKTYMAKFVKVKGTDQVLVKKEISILNIARHRNILHLHESFESMEELVMIFEFISGLDIFERINTSAFELNEREIVSYVHQVCEALQFLHSHNIGHFDIRPENIIYQTRRSSTIKIIEFGQARQLKPGDNFRLLFTAPEYYAPEVHQHDVVSTATDMWSLGTLVYVLLSGINPFLAETNQQIIENIMNAEYTFDEEAFKEISIEAMDFVDRLLVKERKSRMTASEALQHPWLKQKIERVSTKVIRTLKHRRYYHTLIKKDLNMVVSAARISCGGAIRSQKGVSVAKVKVASIEIGPVSGQIMHAVGEEGGHVKYVCKIENYDQSTQVTWYFGVRQLENSEKYEITYEDGVAILYVKDITKLDDGTYRCKVVNDYGEDSSYAELFVKGVREVYDYYCRRTMKKIKRRTDTMRLLERPPEFTLPLYNKTAYVGENVRFGVTITVHPEPHVTWYKSGQKIKPGDNDKKYTFESDKGLYQLTINSVTTDDDAEYTVVARNKYGEDSCKAKLTVTLHPPPTDSTLRPMFKRLLANAECQEGQSVCFEIRVSGIPPPTLKWEKDGQPLSLGPNIEIIHEGLDYYALHIRDTLPEDTGYYRVTATNTAGSTSCQAHLQVERLRYKKQEFKSKEEHERHVQKQIDKTLRMAEILSGTESVPLTQVAKEALREAAVLYKPAVSTKTVKGEFRLEIEEKKEERKLRMPYDVPEPRKYKQTTIEEDQRIKQFVPMSDMKWYKKIRDQYEMPGKLDRVVQKRPKRIRLSRWEQFYVMPLPRITDQYRPKWRIPKLSQDDLEIVRPARRRTPSPDYDFYYRPRRRSLGDISDEELLLPIDDYLAMKRTEEERLRLEEELELGFSASPPSRSPPHFELSSLRYSSPQAHVKVEETRKDFRYSTYHIPTKAEASTSYAELRERHAQAAYRQPKQRQRIMAEREDEELLRPVTTTQHLSEYKSELDFMSKEEKSRKKSRRQREVTEITEIEEEYEISKHAQRESSSSASRLLRRRRSLSPTYIELMRPVSELIRSRPQPAEEYEDDTERRSPTPERTRPRSPSPVSSERSLSRFERSARFDIFSRYESMKAALKTQKTSERKYEVLSQQPFTLDHAPRITLRMRSHRVPCGQNTRFILNVQSKPTAEVKWYHNGVELQESSKIHYTNTSGVLTLEILDCHTDDSGTYRAVCTNYKGEASDYATLDVTGGDYTTYASQRRDEEVPRSVFPELTRTEAYAVSSFKKTSEMEASSSVREVKSQMTETRESLSSYEHSASAEMKSAALEEKSLEEKSTTRKIKTTLAARILTKPRSMTVYEGESARFSCDTDGEPVPTVTWLRKGQVLSTSARHQVTTTKYKSTFEISSVQASDEGNYSVVVENSEGKQEAEFTLTIQKARVTEKAVTSPPRVKSPEPRVKSPEAVKSPKRVKSPEPSHPKAVSPTETKPTPTEKVQHLPVSAPPKITQFLKAEASKEIAKLTCVVESSVLRAKEVTWYKDGKKLKENGHFQFHYSADGTYELKINNLTESDQGEYVCEISGEGGTSKTNLQFMGQAFKSIHEKVSKISETKKSDQKTTESTVTRKTEPKAPEPISSKPVIVTGLQDTTVSSDSVAKFAVKATGEPRPTAIWTKDGKAITQGGKYKLSEDKGGFFLEIHKTDTSDSGLYTCTVKNSAGSVSSSCKLTIKAIKDTEAQKVSTQKTSEITPQKKAVVQEEISQKALRSEEIKMSEAKSQEKLALKEEASKVLISEEVKKSAATSLEKSIVHEEITKTSQASEEVRTHAEIKAFSTQMSINEGQRLVLKANIAGATDVKWVLNGVELTNSEEYRYGVSGSDQTLTIKQASHRDEGILTCISKTKEGIVKCQYDLTLSKELSDAPAFISQPRSQNINEGQNVLFTCEISGEPSPEIEWFKNNLPISISSNVSISRSRNVYSLEIRNASVSDSGKYTIKAKNFRGQCSATASLMVLPLVEEPSREVVLRTSGDTSLQGSFSSQSVQMSASKQEASFSSFSSSSASSMTEMKFASMSAQSMSSMQESFVEMSSSSFMGISNMTQLESSTSKMLKAGIRGIPPKIEALPSDISIDEGKVLTVACAFTGEPTPEVTWSCGGRKIHSQEQGRFHIENTDDLTTLIIMDVQKQDGGLYTLSLGNEFGSDSATVNIHIRSI

SEQ ID NO: 7380 - protein, 345 aa, Homo sapiens
MSSYQKELEKYRDIDEDEILRTLSPEELEQLDCELQEMDPENMLLPAGLRQRDQTKKSPTGPLDREALLQYLEQQALEVKERDDLVPFTGEKKGKPYIQPKREIPAEEQITLEPELEEALAHATDAEMCDIAAILDMYTLMSNKQYYDALCSGEICNTEGISSVVQPDKYKPVPDEPPNPTNIEEILKRVRSNDKELEEVNLNNIQDIPIPMLSELCEAMKANTYVRSFSLVATRSGDPIANAVADMLRENRSLQSLNIESNFISSTGLMAVLKAVRENATLTELRVDNQRQWPGDAVEMEMATVLEQCPSIVRFGYHFTQQGPRARAAQAMTRNNELRRQQKKR

SEQ ID NO: 7381 - protein, 276 aa, Homo sapiens
MSSYQKELEKYRDIDEDEILRTLSPEELEQLDCELQEMDPENMLLPAGLRQRDQTKKSPTGPLDREALLQYLEQQALEVKERDDLVPFTGEKKGVVQPDKYKPVPDEPPNPTNIEEILKRVRSNDKELEEVNLNNIQDIPIPMLSELCEAMKANTYVRSFSLVATRSGDPIANAVADMLRENRSLQSLNIESNFISSTGLMAVLKAVRENATLTELRVDNQRQWPGDAVEMEMATVLEQCPSIVRFGYHFTQQGPRARAAQAMTRNNELRRQQKKR

SEQ ID NO: 7382 - protein, 352 aa, Homo sapiens
MALPFRKDLEKYKDLDEDELLGNLSETELKQLETVLDDLDPENALLPAGFRQKNQTSKSTTGPFDREHLLSYLEKEALEHKDREDYVPYTGEKKGKIFIPKQKPVQTFTEEKVSLDPELEEALTSASDTELCDLAAILGMHNLITNTKFCNIMGSSNGVDQEHFSNVVKGEKILPVFDEPPNPTNVEESLKRTKENDAHLVEVNLNNIKNIPIPTLKDFAKALETNTHVKCFSLAATRSNDPVATAFAEMLKVNKTLKSLNVESNFITGVGILALIDALRDNETLAELKIDNQRQQLGTAVELEMAKMLEENTNILKFGYQFTQQGPRTRAANAITKNNDLVRKRRVEGDHQ

SEQ ID NO: 7383 - protein, 204 aa, Homo sapiens
MEAQAQGLLETEPLQGTDEDAVASADFSSMLSEEEKEELKAELVQLEDEITTLRQVLSAKERHLVEIKQKLGMNLMNELKQNFSKSWHDMQTTTAYKKTHETLSHAGQKATAAFSNVGTAISKKFGDMSYSIRHSISMPAMRNSPTFKSFEERVETTVTSLKTKVGGTNPNGGSFEEVLSSTAHASAQSLAGGSRRTKEEELQC

SEQ ID NO: 7384 - protein, 144 aa, Homo sapiens
MEAQAQGLLETEPLQGTDEDAVASADFSSMLSEEEKEELKAELVQLEDEITTLRQVLSAKERHLVEIKQKLGMNLMNELKQNFSKSWHDMQTTTAYKKTHETLSHAGQKATAAFSNVGTAISKKFGDMSYSIRHSISMPAMRRK

SEQ ID NO: 7385 - protein, 131 aa, Homo sapiens
MEAQAQGLLETEPLQGTDEDAVASADFSSMLSEEEKEELKAELVQLEDEITTLRQVLSAKERHLVEIKQKLGMNLMNELKQNFSKSWHDMQTTTAYKKTHETLSHAGQKATAAFSNVGTAISKKFGDMRRK

SEQ ID NO: 7386 - protein, 102 aa, Homo sapiens
MLSEEEKEELKAELVQLEDEITTLRQVLSAKERHLVEIKQKLGMNLMNELKQNFSKSWHDMQTTTAYKKTHETLSHAGQKATAAFSNVGTAISKKFGDMRRK

SEQ ID NO: 7387 - protein, 175 aa, Homo sapiens
MLSEEEKEELKAELVQLEDEITTLRQVLSAKERHLVEIKQKLGMNLMNELKQNFSKSWHDMQTTTAYKKTHETLSHAGQKATAAFSNVGTAISKKFGDMSYSIRHSISMPAMRNSPTFKSFEERVETTVTSLKTKVGGTNPNGGSFEEVLSSTAHASAQSLAGGSRRTKEEELQC

SEQ ID NO: 7388 - protein, 118 aa, Homo sapiens
MEDFATRTYGTSGLDNRPLFGETSAKDRIINLVVGSLTSLLILVTLISAFVFPQLPPKPLNIFFAVCISLSSITACILIYWYRQGDLEPKFRKLIYYIIFSIIMLCICANLYFHDVGR

SEQ ID NO: 7389 - protein, 608 aa, Homo sapiens
MAASKPVEAAVVAAAVPSSGSGVGGGGTAGPGTGGLPRWQLALAVGAPLLLGAGAIYLWSRQQRRREARGRGDASGLKRNSERKTPEGRASPAPGSGHPEGPGAHLDMNSLDRAQAAKNKGNKYFKAGKYEQAIQCYTEAISLCPTEKNVDLSTFYQNRAAAFEQLQKWKEVAQDCTKAVELNPKYVKALFRRAKAHEKLDNKKECLEDVTAVCILEGFQNQQSMLLADKVLKLLGKEKAKEKYKNREPLMPSPQFIKSYFSSFTDDIISQPMLKGEKSDEDKDKEGEALEVKENSGYLKAKQYMEEENYDKIISECSKEIDAEGKYMAEALLLRATFYLLIGNANAAKPDLDKVISLKEANVKLRANALIKRGSMYMQQQQPLLSTQDFNMAADIDPQNADVYHHRGQLKILLDQVEEAVADFDECIRLRPESALAQAQKCFALYRQAYTGNNSSQIQAAMKGFEEVIKKFPRCAEGYALYAQALTDQQQFGKADEMYDKCIDLEPDNATTYVHKGLLQLQWKQDLDRGLELISKAIEIDNKCDFAYETMGTIEVQRGNMEKAIDMFNKAINLAKSEMEMAHLYSLCDAAHAQTEVAKKYGLKPPTL

SEQ ID NO: 7390 - protein, 1059 aa, Homo sapiens
MEPTVADVHLVPRTTKEVPALDAACCRAASIGVVATSLVVLTLGVLLAFLSTQGFHVDHTAELRGIRWTSSLRRETSDYHRTLTPTLEALLHFLLRPLQTLSLGLEEELLQRGIRARLREHGISLAAYGTIVSAELTGRHKGPLAERDFKSGRCPGNSFSCGNSQCVTKVNPECDDQEDCSDGSDEAHCECGLQPAWRMAGRIVGGMEASPGEFPWQASLRENKEHFCGAAIINARWLVSAAHCFNEFQDPTKWVAYVGATYLSGSEASTVRAQVVQIVKHPLYNADTADFDVAVLELTSPLPFGRHIQPVCLPAATHIFPPSKKCLISGWGYLKEDFLVKPEVLQKATVELLDQALCASLYGHSLTDRMVCAGYLDGKVDSCQGDSGGPLVCEEPSGRFFLAGIVSWGIGCAEARRPGVYARVTRLRDWILEATTKASMPLAPTMAPAPAAPSTAWPTSPESPVVSTPTKSMQALSTVPLDWVTVPKLQECGARPAMEKPTRVVGGFGAASGEVPWQVSLKEGSRHFCGATVVGDRWLLSAAHCFNHTKVEQVRAHLGTASLLGLGGSPVKIGLRRVVLHPLYNPGILDFDLAVLELASPLAFNKYIQPVCLPLAIQKFPVGRKCMISGWGNTQEGNATKPELLQKASVGIIDQKTCSVLYNFSLTDRMICAGFLEGKVDSCQGDSGGPLACEEAPGVFYLAGIVSWGIGCAQVKKPGVYTRITRLKGWILEIMSSQPLPMSPPSTTRMLATTSPRTTAGLTVPGATPSRPTPGAASRVTGQPANSTLSAVSTTARGQTPFPDAPEATTHTQLPDCGLAPAALTRIVGGSAAGRGEWPWQVSLWLRRREHRCGAVLVAERWLLSAAHCFDVYGDPKQWAAFLGTPFLSGAEGQLERVARIYKHPFYNLYTLDYDVALLELAGPVRRSRLVRPICLPEPAPRPPDGTRCVITGWGSVREGGSMARQLQKAAVRLLSEQTCRRFYPVQISSRMLCAGFPQGGVDSCSGDAGGPLACREPSGRWVLTGVTSWGYGCGRPHFPGVYTRVAAVRGWIGQHIQE

SEQ ID NO: 7391 - protein, 626 aa, Homo sapiens
MMANDAKPDVKTVQVLRDTANRLRIHSIRATCASGSGQLTSCCSAAEVVSVLFFHTMKYKQTDPEHPDNDRFILSRGHAAPILYAAWVEVGDISESDLLNLRKLHSDLERHPTPRLPFVDVATGSLGQGLGTACGMAYTGKYLDKASYRVFCLMGDGESSEGSVWEAFAFASHYNLDNLVAVFDVNRLGQSGPAPLEHGADIYQNCCEAFGWNTYLVDGHDVEALCQAFWQASQVKNKPTAIVAKTFKGRGIPNIEDAENWHGKPVPKERADAIVKLIESQIQTNENLIPKSPVEDSPQISITDIKMTSPPAYKVGDKIATQKTYGLALAKLGRANERVIVLSGDTMNSTFSEIFRKEHPERFIECIIAEQNMVSVALGCATRGRTIAFAGAFAAFFTRAFDQLRMGAISQANINLIGSHCGVSTGEDGVSQMALEDLAMFRSIPNCTVFYPSDAISTEHAIYLAANTKGMCFIRTSQPETAVIYTPQENFEIGQAKVVRHGVNDKVTVIGAGVTLHEALEAADHLSQQGISVRVIDPFTIKPLDAATIISSAKATGGRVITVEDHYREGGIGEAVCAAVSREPDILVHQLAVSGVPQRGKTSELLDMFGISTRHIIAAVTLTLMK

SEQ ID NO: 7392 - protein, 321 aa, Homo sapiens
MISRHLQNNLMSVDPASSQAMELSDVTLIEGVGNEVMVVAGVVVLILALVLAWLSTYVADSGSNQLLGAIVSAGDTSVLHLGHVDHLVAGQGNPEPTELPHPSEGNDEKAEEAGEGRGDSTGEAGAGGGVEPSLEHLLDIQGLPKRQAGAGSSSPEAPLRSEDSTCLPPSPGLITVRLKFLNDTEELAVARPEDTVGALKSKYFPGQESQMKLIYQGRLLQDPARTLRSLNITDNCVIHCHRSPPGSAVPGPSASLAPSATEPPSLGVNVGSLMVPVFVVLLGVVWYFRINYRQFFTAPATVSLVGVTVFFSFLVFGMYGR

SEQ ID NO: 7393 - protein, 301 aa, Homo sapiens
MELSDVTLIEGVGNEVMVVAGVVVLILALVLAWLSTYVADSGSNQLLGAIVSAGDTSVLHLGHVDHLVAGQGNPEPTELPHPSEGNDEKAEEAGEGRGDSTGEAGAGGGVEPSLEHLLDIQGLPKRQAGAGSSSPEAPLRSEDSTCLPPSPGLITVRLKFLNDTEELAVARPEDTVGALKSKYFPGQESQMKLIYQGRLLQDPARTLRSLNITDNCVIHCHRSPPGSAVPGPSASLAPSATEPPSLGVNVGSLMVPVFVVLLGVVWYFRINYRQFFTAPATVSLVGVTVFFSFLVFGMYGR

SEQ ID NO: 7394 - protein, 181 aa, Homo sapiens
MELSDVTLIEGVGNEVMVVAGVVVLILALVLAWLSTYVADSGSNQLLGAIVSAGDTSVLHLGHVDHLVAGQGNPEPTELPHPSEGNDEKAEEAGEGRGDSTGEAGAGGGVEPSLEHLLDIQGLPKRQAGAGSSSPEAPLRSEDSTCLPPSPGLITVRLKFLNDTEELAVARPEDTVGALKR

SEQ ID NO: 7395 - protein, 94 aa, Homo sapiens
MELSDVTLIEGVGNEVMVVAGVVVLILALVLAWLSTYVADSGSNQLLGAIVSAGDTSVLHLGHVDHLVAGQGNPEPTELPHPSEANTSLDKKAR

SEQ ID NO: 7396 - protein, 182 aa, Homo sapiens
MSTSSSSSWDNLLESLSLSTVWNWIQASFLGETSAPQQTSLGLLDNLAPAVQIILRISFLILLGIGIYALWKRSIQSIQKTLLFVITLYKLYKKGSHIFEALLANPEGSGLRIQDNNNLFLSLGLQEKILKKLKTVENKMKNLEGIIVAQKPATKRDCSSEPYCSCSDCQSPLSTSGFTSPI

SEQ ID NO: 7397 - protein, 215 aa, Homo sapiens
MASETEKTHALLQTCSTESLISSLGLGAFCLVADRLLQFSTIQQNDWLRALSDNAVHCVIGMWSWAVVTGIKKKTDFGEIILAGFLASVIDVDHFFLAGSMSLKAALTLPRRPFLHCSTVIPVVVLTLKFTMHLFKLKDSWCFLPWMLFISWTSHHIRDGIRHGLWICPFGKTSPLPFWLYVIITSSLPHICSFVMYLTGTRQMMSSKHGVRIDV

SEQ ID NO: 7398 - protein, 317 aa, Homo sapiens
MAARTLASALVLTLWVWALAPAGAVDAMGPHAAVRLAELLTPEECGHFRSLLEAPEPDVEAELSRLSEDRLARPEPLNTTSGSPSRRRRREAAEDPAGRVAGPGEVSDGCREALAAWLAPQAASLSWDRLARALRRSGRPDVARELGKNLHQQATLQLRKFGQRFLPRPGAAARVPFAPAPRPRRAAVPAPDWDALQLIVERLPQPLYERSPMGWAGPLALGLLTGFVGALGTGALVVLLTLWITGGDGDRASPGSPGPLATVQGWWETKLLLPKERRAPPGAWAADGPDSPSPHSALALSCKMGAQSWGSGALDGL

SEQ ID NO: 7399 - protein, 772 aa, Homo sapiens
MMEELHSLDPRRQELLEARFTGVGVSKGPLNSESSNQSLCSVGSLSDKEVETPEKKQNDQRNRKRKAEPYETSQGKGTPRGHKISDYFEFAGGSAPGTSPGRSVPPVARSSPQHSLSNPLPRRVEQPLYGLDGSAAKEATEEQSALPTLMSVMLAKPRLDTEQLAQRGAGLCFTFVSAQQNSPSSTGSGNTEHSCSSQKQISIQHRQTQSDLTIEKISALENSKNSDLEKKEGRIDDLLRANCDLRRQIDEQQKMLEKYKERLNRCVTMSKKLLIEKSKQEKMACRDKSMQDRLRLGHFTTVRHGASFTEQWTDGYAFQNLIKQQERINSQREEIERQRKMLAKRKPPAMGQAPPATNEQKQRKSKTNGAENETPSSGNTELKDTAPALGAHSLLRLTLAEYHEQEEIFKLRLGHLKKEEAEIQAELERLERVRNLHIRELKRIHNEDNSQFKDHPTLNDRYLLLHLLGRGGFSEVYKAFDLTEQRYVAVKIHQLNKNWRDEKKENYHKHACREYRIHKELDHPRIVKLYDYFSLDTDSFCTVLEYCEGNDLDFYLKQHKLMSEKEARSIIMQIVNALKYLNEIKPPIIHYDLKPGNILLVNGTACGEIKITDFGLSKIMDDDSYNSVDGMELTSQGAGTYWYLPPECFVVGKEPPKISNKVDVWSVGVIFYQCLYGRKPFGHNQSQQDILQENTILKATEVQFPPKPVVTPEAKAFIRRCLAYRKEDRIDVQQLACDPYLLPHIRKSVSTSSPAGAAIASTSGASNNSSSN

SEQ ID NO: 7400 - protein, 750 aa, Homo sapiens
MMEELHSLDPRRQELLEARFTGVGVSKGPLNSESSNQSLCSVGSLSDKEVETPEKKQNDQRNRKRKAEPYETSQGKGTPRGHKISDYFEFAGGSAPGTSPGRSVPPVARSSPQHSLSNPLPRRVEQPLYGLDGSAAKEATEEQSALPTLMSVMLAKPRLDTEQLAQRGAGLCFTFVSAQQNSPSSTGSGNTEHSCSSQKQISIQHRQTQSDLTIEKISALENSKNSDLEKKEGRIDDLLRANCDLRRQIDEQQKMLEKYKERLNRCVTMSKKLLIEKSKQEKMACRDKSMQDRLRLGHFTTVRHGASFTEQWTDGYAFQNLIKQQERINSQREEIERQRKMLAKRKPPAMGQAPPATNEQKQRKSKTNGAENETLTLAEYHEQEEIFKLRLGHLKKEEAEIQAELERLERVRNLHIRELKRIHNEDNSQFKDHPTLNDRYLLLHLLGRGGFSEVYKAFDLTEQRYVAVKIHQLNKNWRDEKKENYHKHACREYRIHKELDHPRIVKLYDYFSLDTDSFCTVLEYCEGNDLDFYLKQHKLMSEKEARSIIMQIVNALKYLNEIKPPIIHYDLKPGNILLVNGTACGEIKITDFGLSKIMDDDSYNSVDGMELTSQGAGTYWYLPPECFVVGKEPPKISNKVDVWSVGVIFYQCLYGRKPFGHNQSQQDILQENTILKATEVQFPPKPVVTPEAKAFIRRCLAYRKEDRIDVQQLACDPYLLPHIRKSVSTSSPAGAAIASTSGASNNSSSN

SEQ ID NO: 7401 - protein, 718 aa, Homo sapiens
MMEELHSLDPRRQELLEARFTGVGVSKGPLNSESSNQSLCSVGSLSDKEVETPEKKQNDQRNRKRKAEPYETSQGKGTPRGHKISDYFERRVEQPLYGLDGSAAKEATEEQSALPTLMSVMLAKPRLDTEQLAQRGAGLCFTFVSAQQNSPSSTGSGNTEHSCSSQKQISIQHRQTQSDLTIEKISALENSKNSDLEKKEGRIDDLLRANCDLRRQIDEQQKMLEKYKERLNRCVTMSKKLLIEKSKQEKMACRDKSMQDRLRLGHFTTVRHGASFTEQWTDGYAFQNLIKQQERINSQREEIERQRKMLAKRKPPAMGQAPPATNEQKQRKSKTNGAENETLTLAEYHEQEEIFKLRLGHLKKEEAEIQAELERLERVRNLHIRELKRIHNEDNSQFKDHPTLNDRYLLLHLLGRGGFSEVYKAFDLTEQRYVAVKIHQLNKNWRDEKKENYHKHACREYRIHKELDHPRIVKLYDYFSLDTDSFCTVLEYCEGNDLDFYLKQHKLMSEKEARSIIMQIVNALKYLNEIKPPIIHYDLKPGNILLVNGTACGEIKITDFGLSKIMDDDSYNSVDGMELTSQGAGTYWYLPPECFVVGKEPPKISNKVDVWSVGVIFYQCLYGRKPFGHNQSQQDILQENTILKATEVQFPPKPVVTPEAKAFIRRCLAYRKEDRIDVQQLACDPYLLPHIRKSVSTSSPAGAAIASTSGASNNSSSN

SEQ ID NO: 7402 - protein, 349 aa, Homo sapiens
MAASEAAVVSSPSLKTDTSPVLETAGTVAAMAATPSARAAAAVVAAAARTGSEARVSKAALATKLLSLSGVFAVHKPKGPTSAELLNRLKEKLLAEAGMPSPEWTKRKKQTLKIGHGGTLDSAARGVLVVGIGSGTKMLTSMLSGSKRYTAIGELGKATDTLDSTGRVTEEKPYDKITQEDIEGILQKFTGNIMQVPPLYSALKKDGQRLSTLMKRGEVVEAKPARPVTVYSISLQKFQPPFFTLDVECGGGFYIRSLVSDIGKELSSCANVLELTRTKQGPFTLEEHALPEDKWTIDDIAQSLEHCSSLFPAELALKKSKPESNEQVLSCEYITLNEPKREDDVIKTC

SEQ ID NO: 7403 - protein, 336 aa, Homo sapiens
MTDLNDNICKRYIKMITNIVILSLIICISLAFWIISMTASTYYGNLRPISPWRWLFSVVVPVLIVSNGLKKKSLDHSGALGGLVVGFILTIANFSFFTSLLMFFLSSSKLTKWKGEVKKRLDSEYKEGGQRNWVQVFCNGAVPTELALLYMIENGPGEIPVDFSKQYSASWMCLSLLAALACSAGDTWASEVGPVLSKSSPRLITTWEKVPVGTNGGVTVVGLVSSLLGGTFVGIAYFLTQLIFVNDLDISAPQWPIIAFGGLAGLLGSIVDSYLGATMQYTGLDESTGMVVNSPTNKARHIAGKPILDNNAVNLFSSVLIALLLPTAAWGFWPRG

SEQ ID NO: 7404 - protein, 298 aa, Homo sapiens
MTDLNDNICKRYIKMITNIVILSLIICISLAFWIISMTASTYYGNLRPISPWRWLFSVVVPVLIVSNGLKKKSLDHSGALGGLVVGFILTIANFSFFTSLLMFFLSSSKLTKWKGEVKKRLDSEYKEGGQRNWVQVFCNGAVPTELALLYMIENGPGEIPVDFSKQYSASWMCLSLLAALACSAGDTWASEVGPVLSKSSPRLITTWEKVPVGTNGGVTVVGLVSSLLGGTFVGIAYFLTQLIFVNDLDISAPQWPIIAFGGLAGLLGSIVDSYLGATMQYTGKNIPSFLQLIGMLKK

SEQ ID NO: 7405 - protein, 331 aa, Homo sapiens
MGSAGLSRLHGLFAVYKPPGLKWKHLRDTVELQLLKGLNARKPPAPKQRVRFLLGPMEGSEEKELTLTATSVPSFINHPLVCGPAFAHLKVGVGHRLDAQASGVLVLGVGHGCRLLTDMYNAHLTKDYTVRGLLGKATDDFREDGRLVEKTTYDHVTREKLDRILAVIQGSHQKALVMYSNLDLKTQEAYEMAVRGLIRPMNKSPMLITGIRCLYFAPPEFLLEVQCMHETQKELRKLVHEIGLELKTTAVCTQVRRTRDGFFTLDSALLRTQWDLTNIQDAIRAATPQVAAELEKSLSPGLDTKQLPSPGWSWDSQGPSSTLGLERGAGQ

SEQ ID NO: 7406 - protein, 275 aa, Homo sapiens
MEGSEEKELTLTATSVPSFINHPLVCGPAFAHLKVGVGHRLDAQASGVLVLGVGHGCRLLTDMYNAHLTKDYTVRGLLGKATDDFREDGRLVEKTTYDHVTREKLDRILAVIQGSHQKALVMYSNLDLKTQEAYEMAVRGLIRPMNKSPMLITGIRCLYFAPPEFLLEVQCMHETQKELRKLVHEIGLELKTTAVCTQVRRTRDGFFTLDSALLRTQWDLTNIQDAIRAATPQVAAELEKSLSPGLDTKQLPSPGWSWDSQGPSSTLGLERGAGQ

SEQ ID NO: 7407 - protein, 427 aa, Homo sapiens
MGLQLRALLGAFGRWTLRLGPRPSCSPRMAGNAEPPPAGAACPQDRRSCSGRAGGDRVWEDGEHPAKKLKSGGDEERREKPPKRKIVLLMAYSGKGYHGMQRNVGSSQFKTIEDDLVSALVRSGCIPENHGEDMRKMSFQRCARTDKGVSAAGQVVSLKVWLIDDILEKINSHLPSHIRILGLKRVTGGFNSKNRCDARTYCYLLPTFAFAHKDRDVQDETYRLSAETLQQVNRLLACYKGTHNFHNFTSQKGPQDPSACRYILEMYCEEPFVREGLEFAVIRVKGQSFMMHQIRKMVGLVVAIVKGYAPESVLERSWGTEKVDVPKAPGLGLVLERVHFEKYNQRFGNDGLHEPLDWAQEEGKVAAFKEEHIYPTIIGTERDERSMAQWLSTLPIHNFSATALTAGGTGAKVPSPLEGSEGDGDTD

SEQ ID NO: 7408 - protein, 399 aa, Homo sapiens
MAGNAEPPPAGAACPQDRRSCSGRAGGDRVWEDGEHPAKKLKSGGDEERREKPPKRKIVLLMAYSGKGYHGMQRNVGSSQFKTIEDDLVSALVRSGCIPENHGEDMRKMSFQRCARTDKGVSAAGQVVSLKVWLIDDILEKINSHLPSHIRILGLKRVTGGFNSKNRCDARTYCYLLPTFAFAHKDRDVQDETYRLSAETLQQVNRLLACYKGTHNFHNFTSQKGPQDPSACRYILEMYCEEPFVREGLEFAVIRVKGQSFMMHQIRKMVGLVVAIVKGYAPESVLERSWGTEKVDVPKAPGLGLVLERVHFEKYNQRFGNDGLHEPLDWAQEEGKVAAFKEEHIYPTIIGTERDERSMAQWLSTLPIHNFSATALTAGGTGAKVPSPLEGSEGDGDTD

SEQ ID NO: 7409 - protein, 1164 aa, Homo sapiens
MAQQANVGELLAMLDSPMLGVRDDVTAVFKENLNSDRGPMLVNTLVDYYLETSSQPALHILTTLQEPHDKHLLDRINEYVGKAATRLSILSLLGHVIRLQPSWKHKLSQAPLLPSLLKCLKMDTDVVVLTTGVLVLITMLPMIPQSGKQHLLDFFDIFGRLSSWCLKKPGHVAEVYLVHLHASVYALFHRLYGMYPCNFVSFLRSHYSMKENLETFEEVVKPMMEHVRIHPELVTGSKDHELDPRRWKRLETHDVVIECAKISLDPTEASYEDGYSVSHQISARFPHRSADVTTSPYADTQNSYGCATSTPYSTSRLMLLNMPGQLPQTLSSPSTRLITEPPQATLWSPSMVCGMTTPPTSPGNVPPDLSHPYSKVFGTTAGGKGTPLGTPATSPPPAPLCHSDDYVHISLPQATVTPPRKEERMDSARPCLHRQHHLLNDRGSEEPPGSKGSVTLSDLPGFLGDLASEEDSIEKDKEEAAISRELSEITTAEAEPVVPRGGFDSPFYRDSLPGSQRKTHSAASSSQGASVNPEPLHSSLDKLGPDTPKQAFTPIDLPCGSADESPAGDRECQTSLETSIFTPSPCKIPPPTRVGFGSGQPPPYDHLFEVALPKTAHHFVIRKTEELLKKAKGNTEEDGVPSTSPMEVLDRLIQQGADAHSKELNKLPLPSKSVDWTHFGGSPPSDEIRTLRDQLLLLHNQLLYERFKRQQHALRNRRLLRKVIKAAALEEHNAAMKDQLKLQEKDIQMWKVSLQKEQARYNQLQEQRDTMVTKLHSQIRQLQHDREEFYNQSQELQTKLEDCRNMIAELRIELKKANNKVCHTELLLSQVSQKLSNSESVQQQMEFLNRQLLVLGEVNELYLEQLQNKHSDTTKEVEMMKAAYRKELEKNRSHVLQQTQRLDTSQKRILELESHLAKKDHLLLEQKKYLEDVKLQARGQLQAAESRYEAQKRITQVFELEILDLYGRLEKDGLLKKLEEEKAEAAEAAEERLDCCNDGCSDSMVGHNEEASGHNGETKTPRPSSARGSSGSRGGGGSSSSSSELSTPEKPPHQRAGPFSSRWETTMGEASASIPTTVGSLPSSKSFLGMKARELFRNKSESQCDEDGMTSSLSESLKTELGKDLGVEAKIPLNLDGPHPSPPTPDSVGQLHIMDYNETHHEHS

SEQ ID NO: 7410 - protein, 1113 aa, Homo sapiens
MAQQANVGELLAMLDSPMLGVRDDVTAVFKENLNSDRGPMLVNTLVDYYLETSSQPALHILTTLQEPHDKMDTDVVVLTTGVLVLITMLPMIPQSGKQHLLDFFDIFGRLSSWCLKKPGHVAEVYLVHLHASVYALFHRLYGMYPCNFVSFLRSHYSMKENLETFEEVVKPMMEHVRIHPELVTGSKDHELDPRRWKRLETHDVVIECAKISLDPTEASYEDGYSVSHQISARFPHRSADVTTSPYADTQNSYGCATSTPYSTSRLMLLNMPGQLPQTLSSPSTRLITEPPQATLWSPSMVCGMTTPPTSPGNVPPDLSHPYSKVFGTTAGGKGTPLGTPATSPPPAPLCHSDDYVHISLPQATVTPPRKEERMDSARPCLHRQHHLLNDRGSEEPPGSKGSVTLSDLPGFLGDLASEEDSIEKDKEEAAISRELSEITTAEAEPVVPRGGFDSPFYRDSLPGSQRKTHSAASSSQGASVNPEPLHSSLDKLGPDTPKQAFTPIDLPCGSADESPAGDRECQTSLETSIFTPSPCKIPPPTRVGFGSGQPPPYDHLFEVALPKTAHHFVIRKTEELLKKAKGNTEEDGVPSTSPMEVLDRLIQQGADAHSKELNKLPLPSKSVDWTHFGGSPPSDEIRTLRDQLLLLHNQLLYERFKRQQHALRNRRLLRKVIKAAALEEHNAAMKDQLKLQEKDIQMWKVSLQKEQARYNQLQEQRDTMVTKLHSQIRQLQHDREEFYNQSQELQTKLEDCRNMIAELRIELKKANNKVCHTELLLSQVSQKLSNSESVQQQMEFLNRQLLVLGEVNELYLEQLQNKHSDTTKEVEMMKAAYRKELEKNRSHVLQQTQRLDTSQKRILELESHLAKKDHLLLEQKKYLEDVKLQARGQLQAAESRYEAQKRITQVFELEILDLYGRLEKDGLLKKLEEEKAEAAEAAEERLDCCNDGCSDSMVGHNEEASGHNGETKTPRPSSARGSSGSRGGGGSSSSSSELSTPEKPPHQRAGPFSSRWETTMGEASASIPTTVGSLPSSKSFLGMKARELFRNKSESQCDEDGMTSSLSESLKTELGKDLGVEAKIPLNLDGPHPSPPTPDSVGQLHIMDYNETHHEHS

SEQ ID NO: 7411 - protein, 174 aa, Homo sapiens
MFLTVKLLLGQRCSLKVSGQESVATLKRLVSRRLKVPEEQQHLLFRGQLLEDDKHLSDYCIGPNASINVIMQPLEKMALKEAHQPQTQPLWHQLGLVLAKHFEPQDAKAVLQLLRQEHEERLQKISLEHLEQLAQYLLAEEPHVEPAGERELEAKARPQSSCDMEEKEEAAADQ

SEQ ID NO: 7412 - protein, 367 aa, Homo sapiens
MDDAAVLKRRGYLLGINLGEGSYAKVKSAYSERLKFNVAIKIIDRKKAPADFLEKFLPREIEILAMLNHCSIIKTYEIFETSHGKVYIVMELAVQGDLLELIKTRGALHEDEARKKFHQLSLAIKYCHDLDVVHRDLKCDNLLLDKDFNIKLSDFSFSKRCLRDDSGRMALSKTFCGSPAYAAPEVLQGIPYQPKVYDIWSLGVILYIMVCGSMPYDDSNIKKMLRIQKEHRVNFPRSKHLTGECKDLIYHMLQPDVNRRLHIDEILSHCWMQPKARGSPSVAINKEGESSRGTEPLWTPEPGSDKKSATKLEPEGEAQPQAQPETKPEGTAMQMSRQSEILGFPSKPSTMETEEGPPQQPPETRAQ

SEQ ID NO: 7413 - protein, 858 aa, Homo sapiens
MAAKGAHGSYLKVESELERCRAEGHWDRMPELVRQLQTLSMPGGGGNRRGSPSAAFTFPDTDDFGKLLLAEALLEQCLKENHAKIKDSMPLLEKNEPKMSEAKNYLSSILNHGRLSPQYMCEAMLILGKLHYVEGSYRDAISMYARAGIDDMSMENKPLYQMRLLSEAFVIKGLSLERLPNSIASRFRLTEREEEVITCFERASWIAQVFLQELEKTTNNSTSRHLKGCHPLDYELTYFLEAALQSAYVKNLKKGNIVKGMRELREVLRTVETKATQNFKVMAAKHLAGVLLHSLSEECYWSPLSHPLPEFMGKEESSFATQALRKPHLYEGDNLYCPKDNIEEALLLLLISESMATRDVVLSRVPEQEEDRTVSLQNAAAIYDLLSITLGRRGQYVMLSECLERAMKFAFGEFHLWYQVALSMVACGKSAYAVSLLRECVKLRPSDPTVPLMAAKVCIGSLRWLEEAEHFAMMVISLGEEAGEFLPKGYLALGLTYSLQATDATLKSKQDELHRKALQTLERAQQLAPSDPQVILYVSLQLALVRQISSAMEQLQEALKVRKDDAHALHLLALLFSAQKHHQHALDVVNMAITEHPENFNLMFTKVKLEQVLKGPEEALVTCRQVLRLWQTLYSFSQLGGLEKDGSFGEGLTMKKQSGMHLTLPDAHDADSGSRRASSIAASRLEEAMSELTMPSSVLKQGPMQLWTTLEQIWLQAAELFMEQQHLKEAGFCIQEAAGLFPTSHSVLYMRGRLAEVKGNLEEAKQLYKEALTVNPDGVRIMHSLGLMLSRLGHKSLAQKVLRDAVERQSTCHEAWQGLGEVLQAQGQNEAAVDCFLTALELEASSPVLPFSIIPREL

SEQ ID NO: 7414 - protein, 146 aa, Homo sapiens
MAAKGAHGSYLKVESELERCRAEGHWDRMPELVRQLQTLSMPGGGGNRRGSPSAAFTFPDTDDFGKLLLAEALLEQCLKENHAKIKDSMPLLEKNEPKMSEAKNYLSSILNHGRLSGLAVLLRLVSNSWAQAILLLQPPEALGLQE

SEQ ID NO: 7415 - protein, 882 aa, Homo sapiens
MAAKGAHGSYLKVESELERCRAEGHWDRMPELVRQLQTLSMPGGGGNRRGSPSAAFTFPDTDDFGKLLLAEALLEQCLKENHAKIKDSMPLLEKNEPKMSEAKNYLSSILNHGRLSPQYMCEAMLILGKLHYVEGSYRDAISMYARAGIDDMSMENKPLYQMRLLSEAFVIKGLSLERLPNSIASRFRLTEREEEVITCFERASWIAQVFLQELEKTTNNSTSRHLKGCHPLDYELTYFLEAALQSAYVKNLKKGNIVKGMRELREVLRTVETKATQNFKVMAAKHLAGVLLHSLSEECYWSPLSHPLPEFMGKEESSFATQALRKPHLYEGDNLYCPKDNIEEALLLLLISESMATRDVVLSRVPEQEEDRTVSLQNAAAIYDLLSITLGRRGQYVMLSECLERAMKFAFGEFHLWYQVALSMVACGKSAYAVSLLRECVKLRPSDPTVPLMAAKVCIGSLRWLEEAEHFAMMVISLGEEAGEFLPKGYLALGLTYSLQATDATLKSKQDELHRKALQTLERAQQLAPSDPQVILYVSLQLALVRQISSAMEQLQEALKVRKDDAHALHLLALLFSAQKHHQHALDVVNMAITEHPENFNLMFTKVKLEQVLKGPEEALVTCRQVLRLWQTLYSFSQLGDFRSPEGFQTPQRNICNSEIYRGGGLEKDGSFGEGLTMKKQSGMHLTLPDAHDADSGSRRASSIAASRLEEAMSELTMPSSVLKQGPMQLWTTLEQIWLQAAELFMEQQHLKEAGFCIQEAAGLFPTSHSVLYMRGRLAEVKGNLEEAKQLYKEALTVNPDGVRIMHSLGLMLSRLGHKSLAQKVLRDAVERQSTCHEAWQGLGEVLQAQGQNEAAVDCFLTALELEASSPVLPFSIIPREL

SEQ ID NO: 7416 - protein, 348 aa, Homo sapiens
MGARGAPSRRRQAGRRLRYLPTGSFPFLLLLLLLCIQLGGGQKKKENLLAEKVEQLMEWSSRRSIFRMNGDKFRKFIKAPPRNYSMIVMFTALQPQRQCSVCRQANEEYQILANSWRYSSAFCNKLFFSMVDYDEGTDVFQQLNMNSAPTFMHFPPKGRPKRADTFDLQRIGFAAEQLAKWIADRTDVHIRVFRPPNYSGTIALALLVSLVGGLLYLRRNNLEFIYNKTGWAMVSLCIVFAMTSGQMWNHIRGPPYAHKNPHNGQVSYIHGSSQAQFVAESHIILVLNAAITMGMVLLNEAATSKGDVGKRRIICLVGLGLVVFFFSFLLSIFRSKYHGYPYSDLDFE

SEQ ID NO: 7417 - protein, 347 aa, Homo sapiens
MGARGAPSRRRQAGRRLRYLPTGSFPFLLLLLLLCIQLGGGQKKKENLLAEKVEQLMEWSSRRSIFRMNGDKFRKFIKAPPRNYSMIVMFTALQPQRQCSVCRQANEEYQILANSWRYSSAFCNKLFFSMVDYDEGTDVFQQLNMNSAPTFMHFPPKGRPKRADTFDLQRIGFAAEQLAKWIADRTDVHIRVFRPPNYSGTIALALLVSLVGGLLYLRRNNLEFIYNKTGWAMVSLCIVFAMTSGQMWNHIRGPPYAHKNPHNGQVSYIHGSSQAQFVAESHIILVLNAAITMGMVLLNEAATSKGDVGKRRIICLVGLGLVVFFFSFLLSIFRSKYHGYPYSFLIK

SEQ ID NO: 7418 - protein, 184 aa, Homo sapiens
MAPLLPIRTLPLILILLALLSPGAADFNISSLSGLLSPALTESLLVALPPCHLTGGNATLMVRRANDSKVVTSSFVVPPCRGRRELVSVVDSGAGFTVTRLSAYQVTNLVPGTKFYISYLVKKGTATESSREIPMSTLPRRNMESIGLGMARTGGMVVITVLLSVAMFLLVLGFIIALALGSRK

SEQ ID NO: 7419 - protein, 350 aa, Homo sapiens
MLEGAELYFNVDHGYLEGLVRGCKASLLTQQDYINLVQCETLEDLKIHLQTTDYGNFLANHTNPLTVSKIDTEMRKRLCGEFEYFRNHSLEPLSTFLTYMTCSYMIDNVILLMNGALQKKSVKEILGKCHPLGRFTEMEAVNIAETPSDLFNAILIETPLAPFFQDCMSENALDELNIELLRNKLYKSYLEAFYKFCKNHGDVTAEVMCPILEFEADRRAFIITLNSFGTELSKEDRETLYPTFGKLYPEGLRLLAQAEDFDQMKNVADHYGVYKPLFEAVGGSGGKTLEDVFYEREVQMNVLAFNRQFHYGVFYAYVKLKEQEIRNIVWIAECISQRHRTKINSYIPIL

SEQ ID NO: 7420 - protein, 511 aa, Homo sapiens
MALRAMRGIVNGAAPELPVPTGGPAVGAREQALAVSRNYLSQPRLTYKTVSGVNGPLVILDHVKFPRYAEIVHLTLPDGTKRSGQVLEVSGSKAVVQVFEGTSGIDAKKTSCEFTGDILRTPVSEDMLGRVFNGSGKPIDRGPVVLAEDFLDIMGQPINPQCRIYPEEMIQTGISAIDGMNSIARGQKIPIFSAAGLPHNEIAAQICRQAGLVKKSKDVVDYSEENFAIVFAAMGVNMETARFFKSDFEENGSMDNVCLFLNLANDPTIERIITPRLALTTAEFLAYQCEKHVLVILTDMSSYAEALREVSAAREEVPGRRGFPGYMYTDLATIYERAGRVEGRNGSITQIPILTMPNDDITHPIPDLTGYITEGQIYVDRQLHNRQIYPPINVLPSLSRLMKSAIGEGMTRKDHADVSNQLYACYAIGKDVQAMKAVVGEEALTSDDLLYLEFLQKFERNFIAQGPYENRTVFETLDIGWQLLRIFPKEMLKRIPQSTLSEFYPRDSAKH

SEQ ID NO: 7421 - protein, 157 aa, Homo sapiens
MATPPKRRAVEATGEKVLRYETFISDVLQRDLRKVLDHRDKVYEQLAKYLQLRNVIERLQEAKHSELYMQVDLGCNFFVDTVVPDTSRIYVALGYGFFLELTLAEALKFIDRKSSLLTELSNSLTKDSMNIKAHIHMLLEGLRELQGLQNFPEKPHH

SEQ ID NO: 7422 - protein, 169 aa, Homo sapiens
MVFPLPTPQEPIMATPPKRRAVEATGEKVLRYETFISDVLQRDLRKVLDHRDKVYEQLAKYLQLRNVIERLQEAKHSELYMQVDLGCNFFVDTVVPDTSRIYVALGYGFFLELTLAEALKFIDRKSSLLTELSNSLTKDSMNIKAHIHMLLEGLRELQGLQNFPEKPHH

SEQ ID NO: 7423 - protein, 518 aa, Homo sapiens
MAGYKPVAIQTYPILGEKITQDTLYWNNYKTPVQIKEFGAVSKVDFSPQPPYNYAVTASSRIHIYGRYSQEPIKTFSRFKDTAYCATFRQDGRLLVAGSEDGGVQLFDISGRAPLRQFEGHTKAVHTVDFTADKYHVVSGADDYTVKLWDIPNSKEILTFKEHSDYVRCGCASKLNPDLFITGSYDHTVKMFDARTSESVLSVEHGQPVESVLLFPSGGLLVSAGGRYVKVWDMLKGGQLLVSLKNHHKTVTCLCLSSSGQRLLSGSLDRKVKVYSTTSYKVVHSFDYAASILSLALAHEDETIVVGMTNGILSVKHRKSEAKKESLPRRRRPAYRTFIKGKNYMKQRDDILINRPAKKHLELYDRDLKHFRISKALDRVLDPTCTIKTPEITVSIIKELNRRGVLANALAGRDEKEISHVLNFLIRNLSQPRFAPVLINAAEIIIDIYLPVIGQSPVVDKKFLLLQGLVEKEIDYQRELLETLGMMDMLFATMRRKEGTSVLEHTSDGFPENKKIES

SEQ ID NO: 7424 - protein, 328 aa, Homo sapiens
MFDARTSESVLSVEHGQPVESVLLFPSGGLLVSAGGRYVKVWDMLKGGQLLVSLKNHHKTVTCLCLSSSGQRLLSGSLDRKVKVYSTTSYKVVHSFDYAASILSLALAHEDETIVVGMTNGILSVKHRKSEAKKESLPRRRRPAYRTFIKGKNYMKQRDDILINRPAKKHLELYDRDLKHFRISKALDRVLDPTCTIKTPEITVSIIKELNRRGVLANALAGRDEKEISHVLNFLIRNLSQPRFAPVLINAAEIIIDIYLPVIGQSPVVDKKFLLLQGLVEKEIDYQRELLETLGMMDMLFATMRRKEGTSVLEHTSDGFPENKKIES

SEQ ID NO: 7425 - protein, 499 aa, Homo sapiens
MAGYKPVAIQTYPILGEKITQDTLYWNNYKPPYNYAVTASSRIHIYGRYSQEPIKTFSRFKDTAYCATFRQDGRLLVAGSEDGGVQLFDISGRAPLRQFEGHTKAVHTVDFTADKYHVVSGADDYTVKLWDIPNSKEILTFKEHSDYVRCGCASKLNPDLFITGSYDHTVKMFDARTSESVLSVEHGQPVESVLLFPSGGLLVSAGGRYVKVWDMLKGGQLLVSLKNHHKTVTCLCLSSSGQRLLSGSLDRKVKVYSTTSYKVVHSFDYAASILSLALAHEDETIVVGMTNGILSVKHRKSEAKKESLPRRRRPAYRTFIKGKNYMKQRDDILINRPAKKHLELYDRDLKHFRISKALDRVLDPTCTIKTPEITVSIIKELNRRGVLANALAGRDEKEISHVLNFLIRNLSQPRFAPVLINAAEIIIDIYLPVIGQSPVVDKKFLLLQGLVEKEIDYQRELLETLGMMDMLFATMRRKEGTSVLEHTSDGFPENKKIES

SEQ ID NO: 7426 - protein, 118 aa, Homo sapiens
MTSQSQGIHQLLQAEKRAKDKLEEAKKRKGKRLKQAKEEAMVEIDQYRMQRDKEFRLKQSKIMGSQNNLSDEIEEQTLGKIQELNGHYNKYMESVMNQLLSMVCDMKPEIHVNYRATN

SEQ ID NO: 7427 - protein, 59 aa, Homo sapiens
MTSQSQGIHQLLQAEKRAKDKLEEAKKILHLLFLKRRDWDCFWKRKAIEASQGGSNGRN

SEQ ID NO: 7428 - protein, 124 aa, Homo sapiens
MTSQSQGIHQLLQAEKRAKDKLEEAKKKTGTASGKGKRLKQAKEEAMVEIDQYRMQRDKEFRLKQSKIMGSQNNLSDEIEEQTLGKIQELNGHYNKYMESVMNQLLSMVCDMKPEIHVNYRATN

SEQ ID NO: 7429 - protein, 445 aa, Homo sapiens
MLPWTALGLALSLRLALARSGAERGPPASAPRGDLMFLLDSSASVSHYEFSRVREFVGQLVAPLPLGTGALRASLVHVGSRPYTEFPFGQHSSGEAAQDAVRASAQRMGDTHTGLALVYAKEQLFAEASGARPGVPKVLVWVTDGGSSDPVGPPMQELKDLGVTVFIVSTGRGNFLELSAAASAPAEKHLHFVDVDDLHIIVQELRGSILDAMRPQQLHATEITSSGFRLAWPPLLTADSGYYVLELVPSAQPGAARRQQLPGNATDWIWAGLDPDTDYDVALVPESNVRLLRPQILRVRTRPGEAGPGASGPESGAGPAPTQLAALPAPEEAGPERIVISHARPRSLRVSWAPALGSAAALGYHVQFGPLRGGEAQRVEVPAGRNCTTLQGLAPGTAYLVTVTAAFRSGRESALSAKACTPDGPRPRPRPVPRAPTPGTASREP

SEQ ID NO: 7430 - protein, 233 aa, Homo sapiens
MRPQQLHATEITSSGFRLAWPPLLTADSGYYVLELVPSAQPGAARRQQLPGNATDWIWAGLDPDTDYDVALVPESNVRLLRPQILRVRTRPGEAGPGASGPESGAGPAPTQLAALPAPEEAGPERIVISHARPRSLRVSWAPALGSAAALGYHVQFGPLRGGEAQRVEVPAGRNCTTLQGLAPGTAYLVTVTAAFRSGRESALSAKACTPDGPRPRPRPVPRAPTPGTASREP

SEQ ID NO: 7431 - protein, 64 aa, Homo sapiens
MLPWTALGLALSLRLALARSGAERGAQGPGRHRVHCQHRPRQLPGAVSRCLSPCREAPALCGRG

SEQ ID NO: 7432 - protein, 1333 aa, Homo sapiens
MTADKLVFFVNGRKVVEKNADPETTLLAYLRRKLGLSGTKLGCGEGGCGACTVMLSKYDRLQNKIVHFSANACLAPICSLHHVAVTTVEGIGSTKTRLHPVQERIAKSHGSQCGFCTPGIVMSMYTLLRNQPEPTMEEIENAFQGNLCRCTGYRPILQGFRTFARDGGCCGGDGNNPNCCMNQKKDHSVSLSPSLFKPEEFTPLDPTQEPIFPPELLRLKDTPRKQLRFEGERVTWIQASTLKELLDLKAQHPDAKLVVGNTEIGIEMKFKNMLFPMIVCPAWIPELNSVEHGPDGISFGAACPLSIVEKTLVDAVAKLPAQKTEVFRGVLEQLRWFAGKQVKSVASVGGNIITASPISDLNPVFMASGAKLTLVSRGTRRTVQMDHTFFPGYRKTLLSPEEILLSIEIPYSREGEYFSAFKQASRREDDIAKVTSGMRVLFKPGTTEVQELALCYGGMANRTISALKTTQRQLSKLWKEELLQDVCAGLAEELHLPPDAPGGMVDFRCTLTLSFFFKFYLTVLQKLGQENLEDKCGKLDPTFASATLLFQKDPPADVQLFQEVPKGQSEEDMVGRPLPHLAADMQASGEAVYCDDIPRYENELSLRLVTSTRAHAKIKSIDTSEAKKVPGFVCFISADDVPGSNITGICNDETVFAKDKVTCVGHIIGAVVADTPEHTQRAAQGVKITYEELPAIITIEDAIKNNSFYGPELKIEKGDLKKGFSEADNVVSGEIYIGGQEHFYLETHCTIAVPKGEAGEMELFVSTQNTMKTQSFVAKMLGVPANRIVVRVKRMGGGFGGKETRSTVVSTAVALAAYKTGRPVRCMLDRDEDMLITGGRHPFLARYKVGFMKTGTVVALEVDHFSNVGNTQDLSQSIMERALFHMDNCYKIPNIRGTGRLCKTNLPSNTAFRGFGGPQGMLIAECWMSEVAVTCGMPAEEVRRKNLYKEGDLTHFNQKLEGFTLPRCWEECLASSQYHARKSEVDKFNKENCWKKRGLCIIPTKFGISFTVPFLNQAGALLHVYTDGSVLLTHGGTEMGQGLHTKMVQVASRALKIPTSKIYISETSTNTVPNTSPTAASVSADLNGQAVYAACQTILKRLEPYKKKNPSGSWEDWVTAAYMDTVSLSATGFYRTPNLGYSFETNSGNPFHYFSYGVACSEVEIDCLTGDHKNLRTDIVMDVGSSLNPAIDIGQVEGAFVQGLGLFTLEELHYSPEGSLHTRGPSTYKIPAFGSIPIEFRVSLLRDCPNKKAIYASKAVGEPPLFLAASIFFAIKDAIRAARAQHTGNNVKELFRLDSPATPEKIRNACVDKFTTLCVTGVPENCKPWSVRV

SEQ ID NO: 7433 - protein, 1341 aa, Homo sapiens
MMNRTTPDQELAPASEPVWERPWSVEEIRRSSQSWSLAADAGLLQFLQEFSQQTISRTHEIKKQVDGLIRETKATDCRLHNVFNDFLMLSNTQFIENRVYDEEVEEPVLKAEAEKTEQEKTREQKEVDLIPKVQEAVNYGLQVLDSAFEQLDIKAGNSDSEEDDANGRVELILEPKDLYIDRPLPYLIGSKLFMEQEDVGLGELSSEEGSVGSDRGSIVDTEEEKEEEESDEDFAHHSDNEQNRHTTQMSDEEEDDDGCDLFADSEKEEEDIEDIEENTRPKRSRPTSFADELAARIKGDAVGRVDEEPTTLPSGEAKPRKTLKEKKERRTPSDDEEDNLFAPPKLTDEDFSPFGSGGGLFSGGKGLFDDEDEESDLFTEAPQDRQAGASVKEESSSSKPGKKIPAGAVSVFLGDTDVFGAASVPSMKEPQKPEQPTPRKSPYGPPPTGLFDDDDGDDDDDFFSAPHSKPSKTGKVQSTADIFGDEEGDLFKEKAVASPEATVSQTDENKARAEKKVTLSSSKNLKPSSETKTQKGLFSDEEDSEDLFSSQSASKLKGASLLPGKLPTLVSLFDDEDEEDNLFGGTAAKKQTLCLQAQREEKAKASELSKKKASALLFSSDEEDQWNIPASQTHLASDSRSKGEPRDSGTLQSQEAKAVKKTSLFEEDEEDDLFAIAKDSQKKTQRVSLLFEDDVDSGGSLFGSPPTSVPPATKKKETVSEAPPLLFSDEEEKEAQLGVKSVDKKVESAKESLKFGRTDVAESEKEGLLTRSAQETVKHSDLFSSSSPWDKGTKPRTKTVLSLFDEEEDKMEDQNIIQAPQKEVGKGRDPDAHPKSTGVFQDEELLFSHKLQKDNDPDVDLFAGTKKTKLLEPSVGSLFGDDEDDDLFSSAKSQPLVQEKKRVVKKDHSVDSFKNQKHPESIQGSKEKGIWKPETPQDSSGLAPFKTKEPSTRIGKIQANLAINPAALLPTAASQISEVKPVLPELAFPSSEHRRSHGLESVPVLPGSGEAGVSFDLPAQADTLHSANKSRVKMRGKRRPQTRAARRLAAQESSETEDMSVPRGPIAQWADGAISPNGHRPQLRAASGEDSTEEALAAAAAPWEGGPVPGVDRSPFAKSLGHSRGEADLFDSGDIFSTGTGSQSVERTKPKAKIAENPANPPVGGKAKSPMFPALGEASSDDDLFQSAKPKPAKKTNPFPLLEDEDDLFTDQKVKKNETKSNSQQDVILTTQDIFEDDIFATEAIKPSQKTREKEKTLESNLFDDNIDIFADLTVKPKEKSKKKVEAKSIFDDDMDDIFSSGIQAKTTKPKSRSAQAAPEPRFEHKVSNIFDDPLNAFGGQ

SEQ ID NO: 7434 - protein, 1320 aa, Homo sapiens
MMNRTTPDQELAPASEPVWERPWSVEEIRRSSQSWSLAADAGLLQFLQEFSQQTISRTHEIKKQVDGLIRETKATDCRLHNVFNDFLMLSNTQFIENRVYDEEVEEPVLKAEAEKTEQEKTREQKEVDLIPKVQEAVNYGLQVLDSAFEQLDIKAGNSDSEEDDANGRVELILEPKDLYIDRPLPYLIGSKLFMEQEDVGLGELSSEEGSVGSDRGSIVDTEEEKEEEESDEDFAHHSDNEQNRHTTQMSDEEEDDDGCDLFADSEKEEEDIEDIEENTRPKRSRPTSFADELAARIKGDAVGRVDEEPTTLPSGEAKPRKTLKEKKERRTPSDDEEDNLFAPPKLTDEDFSPFGSGGGLFSGGKGLFDDEDEESDLFTEAPQDRQAGASVKEESSSSKPGKKIPAGAVSVFLGDTDVFGAASVPSMKEPQKPEQPTPRKSPYGPPPTGLFDDDDGDDDDDFFSAPHSKPSKTGKVQSTADIFGDEEGDLFKEKAVASPEATVSQTDENKARAEKKVTLSSSKNLKPSSETKTQKGLFSDEEDSEDLFSSQSASKLKGASLLPGKLPTLVSLFDDEDEEDNLFGGTAAKKQTLCLQAQREEKAKASELSKKKASALLFSSDEEDQWNIPASQTHLASDSRSKGEPRDSGTLQSQEAKAVKKTSLFEEDEEDDLFAIAKDSQKKTQRVSLLFEDDVDSGGSLFGSPPTSVPPATKKKETVSEAPPLLFSDEEEKEAQLGVKSVDKKVESAKESLKFGRTDVAESEKEGLLTRSAQETVKHSDLFSSSSPWDKGTKPRTKTVLSLFDEEEDKMEDQNIIQAPQKEVGKGRDPDAHPKSTGVFQDEELLFSHKLQKDNDPDVDLFAGTKKTKLLEPSVGSLFGDDEDDDLFSSAKSQPLVQEKKRVVKKDHSVDSFKNQKHPESIQGSKEKGIWKPETPQANLAINPAALLPTAASQISEVKPVLPELAFPSSEHRRSHGLESVPVLPGSGEAGVSFDLPAQADTLHSANKSRVKMRGKRRPQTRAARRLAAQESSETEDMSVPRGPIAQWADGAISPNGHRPQLRAASGEDSTEEALAAAAAPWEGGPVPGVDRSPFAKSLGHSRGEADLFDSGDIFSTGTGSQSVERTKPKAKIAENPANPPVGGKAKSPMFPALGEASSDDDLFQSAKPKPAKKTNPFPLLEDEDDLFTDQKVKKNETKSNSQQDVILTTQDIFEDDIFATEAIKPSQKTREKEKTLESNLFDDNIDIFADLTVKPKEKSKKKVEAKSIFDDDMDDIFSSGIQAKTTKPKSRSAQAAPEPRFEHKVSNIFDDPLNAFGGQ

SEQ ID NO: 7435 - protein, 430 aa, Homo sapiens
MQRSRAGADEAALLLAGLALRELEPGCGSPGRGRRGPRPGPGDEAAPALGRRGKGSGGPEAGADGLSRGERGPRRAAVPELSAQPAGSPRASLAGSDGGGGGGSARSSGISLGYDQRHGSPRSGRSDPRPGPGPPSVGSARSSVSSLGSRGSAGAYADFLPPGACPAPARSPEPAGPAPFPLPALPLPPGREGGPSAAERRLEALTRELERALEARTARDYFGICIKCGLGIYGAQQACQAMGSLYHTDCFTCDSCGRRLRGKAFYNVGEKVYCQEDFLYSGFQQTADKCSVCGHLIMEMILQALGKSYHPGCFRCSVCNECLDGVPFTVDVENNIYCVRDYHTVFAPKCASCARPILPAQGCETTIRVVSMDRDYHVACYHCEDCGLQLSGEEGRRCYPLAGHLLCRRCHLRRLQPGPLPSPTVHVTEL

SEQ ID NO: 7436 - protein, 444 aa, Homo sapiens
MKFPASVLASVFLFVAETTAALSLSSTYRSGGDRMWQALTLLFSLLPCALVQLTLLFVHRDLSRDRPLVLLLHLLQLGPLFRCFEVFCIYFQSGNNEEPYVSITKKRQMPKNGLSEEIEKEVGQAEGKLITHRSAFSRASVIQAFLGSAPQLTLQLYISVMQQDVTVGRSLLMTISLLSIVYGALRCNILAIKIKYDEYEVKVKPLAYVCIFLWRSFEIATRVVVLVLFTSVLKTWVVVIILINFFSFFLYPWILFWCSGSPFPENIEKALSRVGTTIVLCFLTLLYTGINMFCWSAVQLKIDSPDLISKSHNWYQLLVYYMIRFIENAILLLLWYLFKTDIYMYVCAPLLVLQLLIGYCTAILFMLVFYQFFHPCKKLFSSSVSEGFQRWLRCFCWACRQQKPCEPIGKEDLQSSRDRDETPSSSKTSPEPGQFLNAEDLCSA

SEQ ID NO: 7437 - protein, 395 aa, Homo sapiens
MPWSSRGALLRDLVLGVLGTAAFLLDLGTDLWAAVQYALGGRYLWAALVLALLGLASVALQLFSWLWLRADPAGLHGSQPPRRCLALLHLLQLGYLYRCVQELRQGLLVWQQEEPSEFDLAYADFLALDISMLRLFETFLETAPQLTLVLAIMLQSGRAEYYQWVGICTSFLGISWALLDYHRALRTCLPSKPLLGLGSSVIYFLWNLLLLWPRVLAVALFSALFPSYVALHFLGLWLVLLLWVWLQGTDFMPDPSSEWLYRVTVATILYFSWFNVAEGRTRGRAIIHFAFLLSDSILLVATWVTHSSWLPSGIPLQLWLPVGCGCFFLGLALRLVYYHWLHPSCCWKPDPDQVDGARSLLSPEGYQLPQNRRMTHLAQKFFPKAKDEAASPVKG

SEQ ID NO: 7438 - protein, 474 aa, Homo sapiens
MKRVLVLLLAVAFGHALERGRDYEKNKVCKEFSHLGKEDFTSLSLVLYSRKFPSGTFEQVSQLVKEVVSLTEACCAEGADPDCYDTRTSALSAKSCESNSPFPVHPGTAECCTKEGLERKLCMAALKHQPQEFPTYVEPTNDEICEAFRKDPKEYANQFMWEYSTNYGQAPLSLLVSYTKSYLSMVGSCCTSASPTVCFLKERLQLKHLSLLTTLSNRVCSQYAAYGEKKSRLSNLIKLAQKVPTADLEDVLPLAEDITNILSKCCESASEDCMAKELPEHTVKLCDNLSTKNSKFEDCCQEKTAMDVFVCTYFMPAAQLPELPDVELPTNKDVCDPGNTKVMDKYTFELSRRTHLPEVFLSKVLEPTLKSLGECCDVEDSTTCFNAKGPLLKKELSSFIDKGQELCADYSENTFTEYKKKLAERLKAKLPDATPTELAKLVNKHSDFASNCCSINSPPLYCDSEIDAELKNIL

SEQ ID NO: 7439 - protein, 352 aa, Homo sapiens
MAALKHQPQEFPTYVEPTNDEICEAFRKDPKEYANQFMWEYSTNYGQAPLSLLVSYTKSYLSMVGSCCTSASPTVCFLKERLQLKHLSLLTTLSNRVCSQYAAYGEKKSRLSNLIKLAQKVPTADLEDVLPLAEDITNILSKCCESASEDCMAKELPEHTVKLCDNLSTKNSKFEDCCQEKTAMDVFVCTYFMPAAQLPELPDVELPTNKDVCDPGNTKVMDKYTFELSRRTHLPEVFLSKVLEPTLKSLGECCDVEDSTTCFNAKGPLLKKELSSFIDKGQELCADYSENTFTEYKKKLAERLKAKLPDATPTELAKLVNKHSDFASNCCSINSPPLYCDSEIDAELKNIL

SEQ ID NO: 7440 - protein, 493 aa, Homo sapiens
MLWSWSEERGGAARLSGRKMKRVLVLLLAVAFGHALERGRDYEKNKVCKEFSHLGKEDFTSLSLVLYSRKFPSGTFEQVSQLVKEVVSLTEACCAEGADPDCYDTRTSALSAKSCESNSPFPVHPGTAECCTKEGLERKLCMAALKHQPQEFPTYVEPTNDEICEAFRKDPKEYANQFMWEYSTNYGQAPLSLLVSYTKSYLSMVGSCCTSASPTVCFLKERLQLKHLSLLTTLSNRVCSQYAAYGEKKSRLSNLIKLAQKVPTADLEDVLPLAEDITNILSKCCESASEDCMAKELPEHTVKLCDNLSTKNSKFEDCCQEKTAMDVFVCTYFMPAAQLPELPDVELPTNKDVCDPGNTKVMDKYTFELSRRTHLPEVFLSKVLEPTLKSLGECCDVEDSTTCFNAKGPLLKKELSSFIDKGQELCADYSENTFTEYKKKLAERLKAKLPDATPTELAKLVNKHSDFASNCCSINSPPLYCDSEIDAELKNIL

SEQ ID NO: 7441 - protein, 736 aa, Homo sapiens
MEIGTEISRKIRSAIKGKLQELGAYVDEELPDYIMVMVANKKSQDQMTEDLSLFLGNNTIRFTVWLHGVLDKLRSVTTEPSSLKSSDTNIFDSNVPSNKSNFSRGDERRHEAAVPPLAIPSARPEKRDSRVSTSSQESKTTNVRQTYDDGAATRLMSTVKPLREPAPSEDVIDIKPEPDDLIDEDLNFVQENPLSQKKPTVTLTYGSSRPSIEIYRPPASRNADSGVHLNRLQFQQQQNSIHAAKQLDMQSSWVYETGRLCEPEVLNSLEETYSPFFRNNSEKMSMEDENFRKRKLPVVSSVVKVKKFNHDGEEEEEDDDYGSRTGSISSSVSVPAKPERRPSLPPSKQANKNLILKAISEAQESVTKTTNYSTVPQKQTLPVAPRTRTSQEELLAEVVQGQSRTPRISPPIKEEETKGDSVEKNQGTQQRQLLSRLQIDPVMAETLQMSQDYYDMESMVHADTRSFILKKPKLSEEVVVAPNQESGMKTADSLRVLSGHLMQTRDLVQPDKPASPKFIVTLDGVPSPPGYMSDQEEDMCFEGMKPVNQTAASNKGLRGLLHPQQLHLLSRQLEDPNGSFSNAEMSELSVAQKPEKLLERCKYWPACKNGDECAYHHPISPCKAFPNCKFAEKCLFVHPNCKYDAKCTKPDCPFTHVSRRIPVLSPKPAVAPPAPPSSSQLCRYFPACKKMECPFYHPKHCRFNTQCTRPDCTFYHPTINVPPRHALKWIRPQTSE

SEQ ID NO: 7442 - protein, 735 aa, Homo sapiens
MEIGTEISRKIRSAIKGKLQELGAYVDEELPDYIMVMVANKKSQDQMTEDLSLFLGNNTIRFTVWLHGVLDKLRSVTTEPSSLKSSDTNIFDSNVPSNKSNFSRGDERRHEAAVPPLAIPSARPEKRDSRVSTSSQESKTTNVRQTYDDGAATRLMSTVKPLREPAPSEDVIDIKPEPDDLIDEDLNFVQENPLSQKKPTVTLTYGSSRPSIEIYRPPASRNADSGVHLNRLQFQQQQNSIHAAKQLDMQSSWVYETGRLCEPEVLNSLEETYSPFFRNNSEKMSMEDENFRKRKLPVVSSVVKVKKFNHDGEEEEEDDDYGSRTGSISSSVSVPAKPERRPSLPPSKQANKNLILKAISEAQESVTKTTNYSTVPQKQTLPVAPRTRTSQEELLAEVVQGQSRTPRISPPIKEEETKGDSVEKNQGTQQRQLLSRLQIDPVMAETLQMSQDYYDMESMVHADTRSFILKKPKLSEEVVVAPNQESGMKTADSLRVLSGHLMQTRDLVQPDKPASPKFIVTLDGVPSPPGYMSDQEEDMCFEGMKPVNQTAASNKGLRGLLHPQQLHLLSRQLEDPNGSFSNAEMSELSVAQKPEKLLERCKYWPACKNGDECAYHHPISPCKAFPNCKFAEKCLFVHPNCKYDAKCTKPDCPFTHVSRRIPVLSPKPVAPPAPPSSSQLCRYFPACKKMECPFYHPKHCRFNTQCTRPDCTFYHPTINVPPRHALKWIRPQTSE

SEQ ID NO: 7443 - protein, 579 aa, Homo sapiens
MEIGTEISRKIRSAIKGKLQELGAYVDEELPDYIMVMVANKKSQDQMTEDLSLFLGNNTIRFTVWLHGVLDKLRSVTTEPSSLKSSDTNIFDSNVPSNKSNFSRGDERRHEAAVPPLAIPSARPEKRDSRVSTSSQESKTTNVRQTYDDGAATRLMSTVKPLREPAPSEDVIDIKPEPDDLIDEDLNFVQENPLSQKKPTVTLTYGSSRPSIEIYRPPASRNADSGVHLNRLQFQQQQNSIHAAKQLDMQSSWVYETGRLCEPEVLNSLEETYSPFFRNNSEKMSMEDENFRKRKLPVVSSVVKVKKFNHDGEEEEEDDDYGSRTGSISSSVSVPAKPERRPSLPPSKQANKNLILKAISEAQESVTKTTNYSTVPQKQTLPVAPRTRTSQEELLAEVVQGQSRTPRISPPIKEEETKGDSVEKNQAEMSELSVAQKPEKLLERCKYWPACKNGDECAYHHPISPCKAFPNCKFAEKCLFVHPNCKYDAKCTKPDCPFTHVSRRIPVLSPKPVAPPAPPSSSQLCRYFPACKKMECPFYHPKHCRFNTQCTRPDCTFYHPTINVPPRHALKWIRPQTSE

SEQ ID NO: 7444 - protein, 571 aa, Homo sapiens
MVMVANKKSQDQMTEDLSLFLGNNTIRFTVWLHGVLDKLRSVTTEPSSLKSSDTNIFDSNVPSNKSNFSRGDERRHEAAVPPLAIPSARPEKRDSRVSTSSQESKTTNVRQTYDDGAATRLMSTVKPLREPAPSEDVIDIKPEPDDLIDEDLNFVQENPLSQKKPTVTLTYGSSRPSIEIYRPPASRNADSGVHLNRLQFQQQQNSIHAAKQLDMQSSWVYETGRLCEPEVLNSLEETYSPFFRNNSEKMSMEDENFRKRKLPVVSSVVKVKKFNHDGEEEEEDDDYGSRTGSISSSVSVPAKPERRPSLPPSKQANKNLILKAISEAQESVTKTTNYSTVPQKQTLPVAPRTRTSQEELLAEVVQGQSRTPRISPPIKEEETKGDSVEKNQGTQQRQLLSRLQIDPVMAETLQMSQAEMSELSVAQKPEKLLERCKYWPACKNGDECAYHHPISPCKAFPNCKFAEKCLFVHPNCKYDAKCTKPDCPFTHVSRRIPVLSPKPAVAPPAPPSSSQLCRYFPACKKMECPFYHPKHCRFNTQCTRPDCTFYHPTINVPPRHALKWIRPQTSE

SEQ ID NO: 7445 - protein, 711 aa, Homo sapiens
MEIGTEISRKIRSAIKGKLQELGAYVDEELPDYIMVMVANKKSQDQMTEDLSLFLGNNTIRFTVWLHGVLDKLRSVTTEPSSLKSSDTNIFDSNVPSNKSNFSRGDERRHEAAVPPLAIPSARPEKRDSRVSTSSQESKTTNVRQTYDDGAATRLMSTVKPLREPAPSEDVIDIKPEPDDLIDEDLNFVQENPLSQKKPTVTLTYGSSRPSIEIYRPPASRNADSGVHLNRLQFQQQQNSIHAAKQLDMQSSWVYETGRLCEPEVLNSLEETYSPFFRNNSEKMSMEDENFRKRKLPVVSSVVKVKKFNHDGEEEEEDDDYGSRTGSISSSVSVPAKPERRPSLPPSKQANKNLILKAISEAQESVTKTTNYSTVPQKQTLPVAPRTRTSQEELLAEVVQGQSRTPRISPPIKEEETKGDSVEKNQDYYDMESMVHADTRSFILKKPKLSEEVVVAPNQESGMKTADSLRVLSGHLMQTRDLVQPDKPASPKFIVTLDGVPSPPGYMSDQEEDMCFEGMKPVNQTAASNKGLRGLLHPQQLHLLSRQLEDPNGSFSNAEMSELSVAQKPEKLLERCKYWPACKNGDECAYHHPISPCKAFPNCKFAEKCLFVHPNCKYDAKCTKPDCPFTHVSRRIPVLSPKPAVAPPAPPSSSQLCRYFPACKKMECPFYHPKHCRFNTQCTRPDCTFYHPTINVPPRHALKWIRPQTSE

SEQ ID NO: 7446 - protein, 306 aa, Homo sapiens
MRMSSKFPSPPLPIFLPPEPVDLGSITSSSCSLNELDNISHLLRKISADINEIKGMKAAILTVEANLFDLNVRVSKNEAKISSLEVKMNEYSTTYECNRQFEDQEEDTESQSRTTDVKIIGFLRNVEKGTQQRQLLSRLQIDPVMAETLQMSQAEMSELSVAQKPEKLLERCKYWPACKNGDECAYHHPISPCKAFPNCKFAEKCLFVHPNCKYDAKCTKPDCPFTHVSRRIPVLSPKPVAPPAPPSSSQLCRYFPACKKMECPFYHPKHCRFNTQCTRPDCTFYHPTINVPPRHALKWIRPQTSE

SEQ ID NO: 7447 - protein, 282 aa, Homo sapiens
MRMSSKFPSPPLPIFLPPEPVDLGSITSSSCSLNELDNISHLLRKISADINEIKGMKAAILTVEANLFDLNVRVSKNEAKISSLEVKMNEYSTTYECNRQFEDQEEDTESQSRTTDVKIIGFLRNVEKAEMSELSVAQKPEKLLERCKYWPACKNGDECAYHHPISPCKAFPNCKFAEKCLFVHPNCKYDAKCTKPDCPFTHVSRRIPVLSPKPAVAPPAPPSSSQLCRYFPACKKMECPFYHPKHCRFNTQCTRPDCTFYHPTINVPPRHALKWIRPQTSE

SEQ ID NO: 7448 - protein, 730 aa, Homo sapiens
MEIGTEISRKIRSAIKGKLQELGAYVDEELPDYIMVMVANKKSQDQMTEDLSLFLGNNTIRFTVWLHGVLDKLRSVTTEPSSLKSSDTNIFDSNVPSNKSNFSRGDERRHEAAVPPLAIPSARPEKRDSRVSTSSQESKTTNVRQTYDDGAATRLMSTVKPLREPAPSEDVIDIKPEPDDLIDEDLNFVQENPLSQKKPTVTLTYGSSRPSIEIYRPPASRNADSGVHLNRLQFQQQQNSIHAAKQLDMQSSWVYETGRLCEPEVLNSLEETYSPFFRNNSEKMSMEDENFRKRKLPVVSSVVKVKKFNHDGEEEEEDDDYGSRTGSISSSVSVPAKPERRPSLPPSKQANKNLILKAISEAQESVTKTTNYSTVPQKQTLPVAPRTRTSQEELLAEVVQGQSRTPRISPPIKEEETKGDSVEKNQGTQQRQLLSRLQIDPVMAETLQMSQDYYDMESMVHADTRSFILKKPKLSEEVVVAPNQESGMKTADSLRVLSGHLMQTRDLVQPDKPASPKFIVTLDGVPSPPGYMSDQEEDMCFEGMKPVNQTAASNKGLRGLLHPQQLHLLSRQLEDPNAEMSELSVAQKPEKLLERCKYWPACKNGDECAYHHPISPCKAFPNCKFAEKCLFVHPNCKYDAKCTKPDCPFTHVSRRIPVLSPKPVAPPAPPSSSQLCRYFPACKKMECPFYHPKHCRFNTQCTRPDCTFYHPTINVPPRHALKWIRPQTSE

SEQ ID NO: 7449 - protein, 543 aa, Homo sapiens
MEIGTEISRKIRSAIKGKLQELGAYVDEELPDYIMVMVANKKSQDQMTEDLSLFLGNNTIRFTVWLHGVLDKLRSVTTEPSSLKSSDTNIFDSNVPSNKSNFSRGDERRHEAAVPPLAIPSAKPLREPAPSEDVIDIKPEPDDLIDEDLNFVQENPLSQKKPTVTLTYGSSRPSIEIYRPPASRNADSGVHLNRLQFQQQQNSIHAAKQLDMQSSWVYETGRLCEPEVLNSLEETYSPFFRNNSEKMSMEDENFRKRKLPVVSSVVKVKKFNHDGEEEEEDDDYGSRTGSISSSVSVPAKPERRPSLPPSKQANKNLILKAISEAQESVTKTTNYSTVPQKQTLPVAPRTRTSQEELLAEVVQGQSRTPRISPPIKEEETKGDSVEKNQAEMSELSVAQKPEKLLERCKYWPACKNGDECAYHHPISPCKAFPNCKFAEKCLFVHPNCKYDAKCTKPDCPFTHVSRRIPVLSPKPAVAPPAPPSSSQLCRYFPACKKMECPFYHPKHCRFNTQCTRPDCTFYHPTINVPPRHALKWIRPQTSE

SEQ ID NO: 7450 - protein, 585 aa, Homo sapiens
MEIGTEISRKIRSAIKGKLQELGAYVDEELPDYIMVMVANKKSQDQMTEDLSLFLGNNTIRFTVWLHGVLDKLRSVTTEPSSLKSSDTNIFDSNVPPLAIPSARPEKRDSRVSTSSQESKTTNVRQTYDDGAATRLMSTVKPLREPAPSEDVIDIKPEPDDLIDEDLNFVQENPLSQKKPTVTLTYGSSRPSIEIYRPPASRNADSGVHLNRLQFQQQQNSIHAAKQLDMQSSWVYETGRLCEPEVLNSLEETYSPFFRNNSEKMSMEDENFRKRKLPVVSSVVKVKKFNHDGEEEEEDDDYGSRTGSISSSVSVPAKPERRPSLPPSKQANKNLILKAISEAQESVTKTTNYSTVPQKQTLPVAPRTRTSQEELLAEVVQGQSRTPRISPPIKEEETKGDSVEKNQGTQQRQLLSRLQIDPVMAETLQMSQAEMSELSVAQKPEKLLERCKYWPACKNGDECAYHHPISPCKAFPNCKFAEKCLFVHPNCKYDAKCTKPDCPFTHVSRRIPVLSPKPVAPPAPPSSSQLCRYFPACKKMECPFYHPKHCRFNTQCTRPDCTFYHPTINVPPRHALKWIRPQTSE

SEQ ID NO: 7451 - protein, 273 aa, Homo sapiens
MAAADGALPEAAALEQPAELPASVRASIERKRQRALMLRQARLAARPYSATAAAATGGMANVKAAPKIIDTGGGFILEEEEEEEQKIGKVVHQPGPVMEFDYVICEECGKEFMDSYLMNHFDLPTCDNCRDADDKHKLITKTEAKQEYLLKDCDLEKREPPLKFIVKKNPHHSQWGDMKLYLKLQIVKRSLEVWGSQEALEEAKEVRQENREKMKQKKFDKKVKELRRAVRSSVWKRETIVHQHEYGPEENLEDDMYRKTCTMCGHELTYEKM

SEQ ID NO: 7452 - protein, 1204 aa, Homo sapiens
MAMDQVNALCEQLVKAVTVMMDPNSTQRYRLEALKFCEEFKEKCPICVPCGLRLAEKTQVAIVRHFGLQILEHVVKFRWNGMSRLEKVYLKNSVMELIANGTLNILEEENHIKDALSRIVVEMIKREWPQHWPDMLIELDTLSKQGETQTELVMFILLRLAEDVVTFQTLPPQRRRDIQQTLTQNMERIFSFLLNTLQENVNKYQQVKTDTSQESKAQANCRVGVAALNTLAGYIDWVSMSHITAENCKLLEILCLLLNEQELQLGAAECLLIAVSRKGKLEDRKPLMVLFGDVAMHYILSAAQTADGGGLVEKHYVFLKRLCQVLCALGNQLCALLGADSDVETPSNFGKYLESFLAFTTHPSQFLRSSTQMTWGALFRHEILSRDPLLLAIIPKYLRASMTNLVKMGFPSKTDSPSCEYSRFDFDSDEDFNAFFNSSRAQQGEVMRLACRLDPKTSFQMAGEWLKYQLSTFLDAGSVNSCSAVGTGEGSLCSVFSPSFVQWEAMTLFLESVITQMFRTLNREEIPVNDGIELLQMVLNFDTKDPLILSCVLTNVSALFPFVTYRPEFLPQVFSKLFSSVTFETVEESKAPRTRAVRNVRRHACSSIIKMCRDYPQLVLPNFDMLYNHVKQLLSNELLLTQMEKCALMEALVLISNQFKNYERQKVFLEELMAPVASIWLSQDMHRVLSDVDAFIAYVGTDQKSCDPGLEDPCGLNRARMSFCVYSILGVVKRTCWPTDLEEAKAGGFVVGYTSSGNPIFRNPCTEQILKLLDNLLALIRTHNTLYAPEMLAKMAEPFTKALDMLDAEKSAILGLPQPLLELNDSPVFKTVLERMQRFFSTLYENCFHILGKAGPSMQQDFYTVEDLATQLLSSAFVNLNNIPDYRLRPMLRVFVKPLVLFCPPEHYEALVSPILGPLFTYLHMRLSQKWQVINQRSLLCGEDEAADENPESQEMLEEQLVRMLTREVMDLITVCCVSKKGADHSSAPPADGDDEEMMATEVTPSAMAELTDLGKCLMKHEDVCTALLITAFNSLAWKDTLSCQRTTSQLCWPLLKQVLSGTLLADAVTWLFTSVLKGLQMHGQHDGCMASLVHLAFQIYEALRPRYLEIRAVMEQIPEIQKDSLDQFDCKLLNPSLQKVADKRRKDQFKRLIAGCIGKPLGEQFRKEVHIKNLPSLFKKTKPMLETEVLDNDGGGLATIFEP

SEQ ID NO: 7453 - protein, 164 aa, Homo sapiens
MMKEFSSTAQGNTEVIHTGTLQRHESHHIRDFCFQEIEKDIHNFEFQWQEEERNGHEAPMTEIKELTGSTDRHDQRHAGNKPIKDQLGSSFHSHLPELHIFQPEWKIGNQVEKSIINASLILTSQRISCSPKTRISNNYGNNSLHSSLPIQKLGSTHERKIFPM

SEQ ID NO: 7454 - protein, 387 aa, Homo sapiens
MVFAFWKVFLILSCLAGQVSVVQVTIPDGFVNVTVGSNVTLICIYTTTVASREQLSIQWSFFHKKEMEPISIYFSQGGQAVAIGQFKDRITGSNDPGNASITISHMQPADSGIYICDVNNPPDFLGQNQGILNVSVLVKPSKPLCSVQGRPETGHTISLSCLSALGTPSPVYYWHKLEGRDIVPVKENFNPTTGILVIGNLTNFEQGYYQCTAINRLGNSSCEIDLTSSHPEVGIIVGALIGSLVGAAIIISVVCFARNKAKAKAKERNSKTIAELEPMTKINPRGESEAMPREDATQLEVTLPSSIHETGPDTIQEPDYEPKPTQEPAPEPAPGSEPMAVPDLDIELELEPETQSELEPEPEPEPESEPGVVVEPLSEDEKGVVKA

SEQ ID NO: 7455 - protein, 423 aa, Homo sapiens
MVFAFWKVFLILSCLAGQVSVVQVTIPDGFVNVTVGSNVTLICIYTTTVASREQLSIQWSFFHKKEMEPISHSSCLSTEGMEEKAVSQCLKMTHARDARGRCSWTSEIYFSQGGQAVAIGQFKDRITGSNDPGNASITISHMQPADSGIYICDVNNPPDFLGQNQGILNVSVLVKPSKPLCSVQGRPETGHTISLSCLSALGTPSPVYYWHKLEGRDIVPVKENFNPTTGILVIGNLTNFEQGYYQCTAINRLGNSSCEIDLTSSHPEVGIIVGALIGSLVGAAIIISVVCFARNKAKAKAKERNSKTIAELEPMTKINPRGESEAMPREDATQLEVTLPSSIHETGPDTIQEPDYEPKPTQEPAPEPAPGSEPMAVPDLDIELELEPETQSELEPEPEPEPESEPGVVVEPLSEDEKGVVKA

SEQ ID NO: 7456 - protein, 250 aa, Homo sapiens
MCDQQKQPQFPPSCVKGSGLGAGQGSNGASVKCPVPCQTQTVCVTGPAPCPTQTYVKYQVPCQTQTYVKCPAPCQRTYVKYPTPCQTYVKCPAPCQTTYVKCPTPCQTYVKCPAPCQMTYIKSPAPCQTQTCYVQGASPCQSYYVQAPASGSTSQYCVTDPCSAPCSTSYCCLAPRTFGVSPLRRWIQRPQNCNTGSSGCCENSGSSGCCGSGGCGCSCGCGSSGCCCLGIIPMRSRGPACCDHEDDCCC

SEQ ID NO: 7457 - protein, 208 aa, Homo sapiens
MAQETNHSQVPMLCSTGCGFYGNPRTNGMCSVCYKEHLQRQNSSNGRISPPATSVSSLSESLPVQCTDGSVPEAQSALDSTSSSMQPSPVSNQSLLSESVASSQLDSTSVDKAVPETEDVQASVSDTAQQPSEEQSKSLEKPKQKKNRCFMCRKKVGLTGFECRCGNVYCGVHRYSDVHNCSYNYKADAAEKIRKENPVVVGEKIQKI

SEQ ID NO: 7458 - protein, 196 aa, Homo sapiens
MAQETNHSQVPMLCSTGCGFYGNPRTNGMCSVCYKEHLQRQNSSNGRISPPVQCTDGSVPEAQSALDSTSSSMQPSPVSNQSLLSESVASSQLDSTSVDKAVPETEDVQASVSDTAQQPSEEQSKSLEKPKQKKNRCFMCRKKVGLTGFECRCGNVYCGVHRYSDVHNCSYNYKADAAEKIRKENPVVVGEKIQKI

SEQ ID NO: 7459 - protein, 467 aa, Homo sapiens
MTMLLDGGPQFPGLGVGSFGAPRHHEMPNREPAGMGLNPFGDSTHAAAAAAAAAAFKLSPAAAHDLSSGQSSAFTPQGSGYANALGHHHHHHHHHHHTSQVPSYGGAASAAFNSTREFLFRQRSSGLSEAASGGGQHGLFAGSASSLHAPAGIPEPPSYLLFPGLHEQGAGHPSPTGHVDNNQVHLGLRGELFGRADPYRPVASPRTDPYAAGAQFPNYSPMNMNMGVNVAAHHGPGAFFRYMRQPIKQELSCKWIDEAQLSRPKKSCDRTFSTMHELVTHVTMEHVGGPEQNNHVCYWEECPREGKSFKAKYKLVNHIRVHTGEKPFPCPFPGCGKIFARSENLKIHKRTHTGEKPFKCEFEGCDRRFANSSDRKKHMHVHTSDKPYICKVCDKSYTHPSSLRKHMKVHESQGSDSSPAASSGYESSTPPAIASANSKDTTKTPSAVQTSTSHNPGLPPNFNEWYV

SEQ ID NO: 7460 - protein, 457 aa, Homo sapiens
MTMLLDGGPQFPGLGVGSFGAPRHHEMPNREPAGMGLNPFGDSTHAAAAAAAAAAFKLSPAAAHDLSSGQSSAFTPQGSGYANALGHHHHHHHHHHHTSQVPSYGGAASAAFNSTREFLFRQRSSGLSEAASGGGQHGLFAGSASSLHAPAGIPEPPSYLLFPGLHEQGAGHPSPTGHVDNNQVHLGLRGELFGRADPYRPVASPRTDPYAAGAQFPNYSPMNMNMGVNVAAHHGPGAFFRYMRQPIKQELSCKWIDEAQLSRPKKSCDRTFSTMHELVTHVTMEHVGGPEQNNHVCYWEECPREGKSFKAKYKLVNHIRVHTGEKPFPCPFPGCGKIFARSENLKIHKRTHTGEKPFKCEFEGCDRRFANSSDRKKHMHVHTSDKPYICKVCDKSYTHPSSLRKHMKCCPAWYPGQSLIPDEELDTDVGMQQPALHNTTYPKCRVNAEPTVQEMIY

SEQ ID NO: 7461 - protein, 1342 aa, Homo sapiens
MEENEVESSSDAAPGPGRPEEPSESGLGVGTSEAVSADSSDAAAAPGQAEADDSGVGQSSDRGSRSQEEVSESSSSADPLPNSYLPDSSSVSHGPVAGVTGGPPALVHSSALPDPNMLVSDCTASSSDLGSAIDKIIESTIGPDLIQNCITVTSAEDGGAETTRYLILQGPDDGAPMTSPMSSSTLAHSLAAIEALADGPTSTSTCLEAQGGPSSPVQLPPASGAEEPDLQSLEAMMEVVVVQQFKCKMCQYRSSTKATLLRHMRERHFRPVAAAAAAAGKKGRLRKWSTSTKSQEEEGPEEEDDDDIVDAGAIDDLEEDSDYNPAEDEPRGRQLRLQRPTPSTPRPRRRPGRPRKLPRLEISDLPDGVEGEPLVSSQSGQSPPEPQDPEAPSSSGPGHLVAMGKVSRTPVEAGVSQSDAENAAPSCPDEHDTLPRRRGRPSRRFLGKKYRKYYYKSPKPLLRPFLCRICGSRFLSHEDLRFHVNSHEAGDPQLFKCLQCSYRSRRWSSLKEHMFNHVGSKPYKCDECSYTSVYRKDVIRHAAVHSRDRKKRPDPTPKLSSFPCPVCGRVYPMQKRLTQHMKTHSTEKPHMCDKCGKSFKKRYTFKMHLLTHIQAVANRRFKCEFCEFVCEDKKALLNHQLSHVSDKPFKCSFCPYRTFREDFLLSHVAVKHTGAKPFACEYCHFSTRHKKNLRLHVRCRHASSFEEWGRRHPEEPPSRRRPFFSLQQIEELKQQHSAAPGPPPSSPGPPEIPPEATTFQSSEAPSLLCSDTLGGATIIYQQGAEESTAMATQTALDLLLNMSAQRELGGTALQVAVVKSEDVEAGLASPGGQPSPEGATPQVVTLHVAEPGGGAAAESQLGPPDLPQITLAPGPFGGTGYSVITAPPMEEGTSAPGTPYSEEPAGEAAQAVVVSDTLKEAGTHYIMATDGTQLHHIELTADGSISFPSPDALASGAKWPLLQCGGLPRDGPEPPSPAKTHCVGDSQSSASSPPATSKALGLAVPPSPPSAATAASKKFSCKICAEAFPGRAEMESHKRAHAGPGAFKCPDCPFSARQWPEVRAHMAQHSSLRPHQCSQCSFASKNKKDLRRHMLTHTKEKPFACHLCGQRFNRNGHLKFHIQRLHSPDGRKSGTPTARAPTQTPTQTIILNSDDETLATLHTALQSSHGVLGPERLQQALSQEHIIVAQEQTVTNQEEAAYIQEITTADGQTVQHLVTSDNQVQYIISQDGVQHLLPQEYVVVPEGHHIQVQEGQITHIQYEQGAPFLQESQIQYVPVSPGQQLVTQAQLEAAAHSAVTAVADAAMAQAQGLFGTDETVPEHIQQLQHQGIEYDVITLADD

SEQ ID NO: 7462 - protein, 1187 aa, Homo sapiens
MATSSMPESERNVATKASGAPMTSPMSSSTLAHSLAAIEALADGPTSTSTCLEAQGGPSSPVQLPPASGAEEPDLQSLEAMMEVVVVQQFKCKMCQYRSSTKATLLRHMRERHFRPVAAAAAAAGKKGRLRKWSTSTKSQEEEGPEEEDDDDIVDAGAIDDLEEDSDYNPAEDEPRGRQLRLQRPTPSTPRPRRRPGRPRKLPRLEISDLPDGVEGEPLVSSQSGQSPPEPQDPEAPSSSGPGHLVAMGKVSRTPVEAGVSQSDAENAAPSCPDEHDTLPRRRGRPSRRFLGKKYRKYYYKSPKPLLRPFLCRICGSRFLSHEDLRFHVNSHEAGDPQLFKCLQCSYRSRRWSSLKEHMFNHVGSKPYKCDECSYTSVYRKDVIRHAAVHSRDRKKRPDPTPKLSSFPCPVCGRVYPMQKRLTQHMKTHSTEKPHMCDKCGKSFKKRYTFKMHLLTHIQAVANRRFKCEFCEFVCEDKKALLNHQLSHVSDKPFKCSFCPYRTFREDFLLSHVAVKHTGAKPFACEYCHFSTRHKKNLRLHVRCRHASSFEEWGRRHPEEPPSRRRPFFSLQQIEELKQQHSAAPGPPPSSPGPPEIPPEATTFQSSEAPSLLCSDTLGGATIIYQQGAEESTAMATQTALDLLLNMSAQRELGGTALQVAVVKSEDVEAGLASPGGQPSPEGATPQVVTLHVAEPGGGAAAESQLGPPDLPQITLAPGPFGGTGYSVITAPPMEEGTSAPGTPYSEEPAGEAAQAVVVSDTLKEAGTHYIMATDGTQLHHIELTADGSISFPSPDALASGAKWPLLQCGGLPRDGPEPPSPAKTHCVGDSQSSASSPPATSKALGLAVPPSPPSAATAASKKFSCKICAEAFPGRAEMESHKRAHAGPGAFKCPDCPFSARQWPEVRAHMAQHSSLRPHQCSQCSFASKNKKDLRRHMLTHTKEKPFACHLCGQRFNRNGHLKFHIQRLHSPDGRKSGTPTARAPTQTPTQTIILNSDDETLATLHTALQSSHGVLGPERLQQALSQEHIIVAQEQTVTNQEEAAYIQEITTADGQTVQHLVTSDNQVQYIISQDGVQHLLPQEYVVVPEGHHIQVQEGQITHIQYEQGAPFLQESQIQYVPVSPGQQLVTQAQLEAAAHSAVTAVADAAMAQAQGLFGTDETVPEHIQQLQHQGIEYDVITLADD

SEQ ID NO: 7463 - protein, 192 aa, Homo sapiens
MATPMHRLIARRQAFDTELQPVKTFWILIQPSIVISEANKQHVRCQKCLEFGHWTYECTGKRKYLHRPSRTAELKKALKEKENRLLLQQSIGETNVERKAKKKRSKSVTSSSSSSSDSSASDSSSESEETSTSSSSEDSDTDESSSSSSSSASSTTSSSSSDSDSDSSSSSSSSTSTDSSSDDEPPKKKKKK

SEQ ID NO: 7464 - protein, 170 aa, Homo sapiens
MATPMHRLIARRQAEANKQHVRCQKCLEFGHWTYECTGKRKYLHRPSRTAELKKALKEKENRLLLQQSIGETNVERKAKKKRSKSVTSSSSSSSDSSASDSSSESEETSTSSSSEDSDTDESSSSSSSSASSTTSSSSSDSDSDSSSSSSSSTSTDSSSDDEPPKKKKKK

SEQ ID NO: 7465 - protein, 122 aa, Homo sapiens
MVPGPPESVVRFFLWFCFLLPPTRKASCDPRDLKSCNRPCVWSRLLKPNSSLSNLETAYFPQILRFLRPWYFSRSHLNYHQKAPARWEWLYSIYRKGTKAQRRNVLRSPCAPPQPSWPCSVI

SEQ ID NO: 7466 - protein, 334 aa, Homo sapiens
MRYKTSLVMRKRLRLYRNTLKESSSSSGHHGPQLTAASSPSVFPGLHEEPPQASPSRPLNGLLRLGLPGDMYARPEPFPPGPAARSDALAAAAALHGYGGMNLTVNLAAPHGPGAFFRYMRQPIKQELICKWLAADGTATPSLCSKTFSTMHELVTHVTVEHVGGPEQANHICFWEECPRQGKPFKAKYKLVNHIRVHTGEKPFPCPFPGCGKVFARSENLKIHKRTHTGEKPFRCEFEGCERRFANSSDRKKHSHVHTSDKPYTCKVRGCDKCYTHPSSLRKHMKVHGRSPPPSSGYDSATPSALVSPSSDCGHKSQVASSAAVAARTADLSE

SEQ ID NO: 7467 - protein, 256 aa, Homo sapiens
MRYKTSLVMRKRLRLYRNTLKESSSSSGHHGPQLTAASSPSVFPGLHEEPPQASPSRPLNGLLRLGLPGDMYARPEPFPPGPAARSDALAAAAALHGYGGMNLTVNLAAPHGPGAFFRYMRQPIKQELICKWLAADGTATPSLCSKTFSTMHELVTHVTVEHVGGPEQANHICFWEECPRQGKPFKAKYKLVNHIRVHTGEKPFPCPFPGCGKVFARSENLKIHKRTHTGQYSALSVACGPSGEAGPRVWISSSPN

SEQ ID NO: 7468 - protein, 384 aa, Homo sapiens
MPPFCRNAKLGLLSFLICAGRSLLPLGKNAFWLERIENNNTLWEKAQSQKMRYKTSLVMRKRLRLYRNTLKESSSSSGHHGPQLTAASSPSVFPGLHEEPPQASPSRPLNGLLRLGLPGDMYARPEPFPPGPAARSDALAAAAALHGYGGMNLTVNLAAPHGPGAFFRYMRQPIKQELICKWLAADGTATPSLCSKTFSTMHELVTHVTVEHVGGPEQANHICFWEECPRQGKPFKAKYKLVNHIRVHTGEKPFPCPFPGCGKVFARSENLKIHKRTHTGEKPFRCEFEGCERRFANSSDRKKHSHVHTSDKPYTCKVRGCDKCYTHPSSLRKHMKVHGRSPPPSSGYDSATPSALVSPSSDCGHKSQVASSAAVAARTADLSE

SEQ ID NO: 7469 - protein, 128 aa, Homo sapiens
MRYKTSLVMRKRLRLYRNTLKESSEKPFRCEFEGCERRFANSSDRKKHSHVHTSDKPYTCKVRGCDKCYTHPSSLRKHMKVHGRSPPPSSGYDSATPSALVSPSSDCGHKSQVASSAAVAARTADLSE

SEQ ID NO: 7470 - protein, 372 aa, Homo sapiens
MNGPCQSLRKAEGLLEGCTSAVTVFRKLPLDSKAQSQKMRYKTSLVMRKRLRLYRNTLKESSSSSGHHGPQLTAASSPSVFPGLHEEPPQASPSRPLNGLLRLGLPGDMYARPEPFPPGPAARSDALAAAAALHGYGGMNLTVNLAAPHGPGAFFRYMRQPIKQELICKWLAADGTATPSLCSKTFSTMHELVTHVTVEHVGGPEQANHICFWEECPRQGKPFKAKYKLVNHIRVHTGEKPFPCPFPGCGKVFARSENLKIHKRTHTGEKPFRCEFEGCERRFANSSDRKKHSHVHTSDKPYTCKVRGCDKCYTHPSSLRKHMKVHGRSPPPSSGYDSATPSALVSPSSDCGHKSQVASSAAVAARTADLSE

SEQ ID NO: 7471 - protein, 751 aa, Homo sapiens
MGPQGARRQAFLAFGDVTVDFTQKEWRLLSPAQRALYREVTLENYSHLVSLGILHSKPELIRRLEQGEVPWGEERRRRPGPCAGIYAEHVLRPKNLGLAHQRQQQLQFSDQSFQSDTAEGQEKEKSTKPMAFSSPPLRHAVSSRRRNSVVEIESSQGQRENPTEIDKVLKGIENSRWGAFKCAERGQDFSRKMMVIIHKKAHSRQKLFTCRECHQGFRDESALLLHQNTHTGEKSYVCSVCGRGFSLKANLLRHQRTHSGEKPFLCKVCGRGYTSKSYLTVHERTHTGEKPYECQECGRRFNDKSSYNKHLKAHSGEKPFVCKECGRGYTNKSYFVVHKRIHSGEKPYRCQECGRGFSNKSHLITHQRTHSGEKPFACRQCKQSFSVKGSLLRHQRTHSGEKPFVCKDCERSFSQKSTLVYHQRTHSGEKPFVCRECGQGFIQKSTLVKHQITHSEEKPFVCKDCGRGFIQKSTFTLHQRTHSEEKPYGCRECGRRFRDKSSYNKHLRAHLGEKRFFCRDCGRGFTLKPNLTIHQRTHSGEKPFMCKQCEKSFSLKANLLRHQWTHSGERPFNCKDCGRGFILKSTLLFHQKTHSGEKPFICSECGQGFIWKSNLVKHQLAHSGKQPFVCKECGRGFNWKGNLLTHQRTHSGEKPFVCNVCGQGFSWKRSLTRHHWRIHSKEKPFVCQECKRGYTSKSDLTVHERIHTGERPYECQECGRKFSNKSYYSKHLKRHLREKRFCTGSVGEASS

SEQ ID NO: 7472 - protein, 719 aa, Homo sapiens
MGPQGARRQAFLAFGDVTVDFTQKEWRLLSPAQRALYREVTLENYSHLVSLGIYAEHVLRPKNLGLAHQRQQQLQFSDQSFQSDTAEGQEKEKSTKPMAFSSPPLRHAVSSRRRNSVVEIESSQGQRENPTEIDKVLKGIENSRWGAFKCAERGQDFSRKMMVIIHKKAHSRQKLFTCRECHQGFRDESALLLHQNTHTGEKSYVCSVCGRGFSLKANLLRHQRTHSGEKPFLCKVCGRGYTSKSYLTVHERTHTGEKPYECQECGRRFNDKSSYNKHLKAHSGEKPFVCKECGRGYTNKSYFVVHKRIHSGEKPYRCQECGRGFSNKSHLITHQRTHSGEKPFACRQCKQSFSVKGSLLRHQRTHSGEKPFVCKDCERSFSQKSTLVYHQRTHSGEKPFVCRECGQGFIQKSTLVKHQITHSEEKPFVCKDCGRGFIQKSTFTLHQRTHSEEKPYGCRECGRRFRDKSSYNKHLRAHLGEKRFFCRDCGRGFTLKPNLTIHQRTHSGEKPFMCKQCEKSFSLKANLLRHQWTHSGERPFNCKDCGRGFILKSTLLFHQKTHSGEKPFICSECGQGFIWKSNLVKHQLAHSGKQPFVCKECGRGFNWKGNLLTHQRTHSGEKPFVCNVCGQGFSWKRSLTRHHWRIHSKEKPFVCQECKRGYTSKSDLTVHERIHTGERPYECQECGRKFSNKSYYSKHLKRHLREKRFCTGSVGEASS

SEQ ID NO: 7473 - protein, 1243 aa, Homo sapiens
METRAAENTAIFMCKCCNLFSPNQSELLSHVSEKHMEEGVNVDEIIIPLRPLSTPEPPNSSKTGDEFLVMKRKRGRPKGSTKKSSTEEELAENIVSPTEDSPLAPEEGNSLPPSSLECSKCCRKFSNTRQLRKHICIIVLNLGEEEGEAGNESDLELEKKCKEDDREKASKRPRSQKTEKVQKISGKEARQLSGAKKPIISVVLTAHEAIPGATKIVPVEAGPPETGATNSETTSADLVPRRGYQEYAIQQTPYEQPMKSSRLGPTQLKIFTCEYCNKVFKFKHSLQAHLRIHTNEKPYKCPQCSYASAIKANLNVHLRKHTGEKFACDYCSFTCLSKGHLKVHIERVHKKIKQHCRFCKKKYSDVKNLIKHIRDAHDPQDKKVKEALDELCLMTREGKRQLLYDCHICERKFKNELDRDRHMLVHGDKWPFACELCGHGATKYQALELHVRKHPFVYVCAVCRKKFVSSIRLRTHIKEVHGAAQEALVFTSSINQSFCLLEPGGDIQQEALGDQLQLVEEEFALQGVNALKEEACPGDTQLEEGRKEPEAPGEMPAPAVHLASPQAESTALPPCELETTVVSSSDLHSQEVVSDDFLLKNDTSSAEAHAAPEKPPDMQHRSSVQTQGEVITLLLSKAQSAGSDQESHGAQSPLGEGQNMAVLSAGDPDPSRCLRSNPAEASDLLPPVAGGGDTITHQPDSCKAAPEHRSGITAFMKVLNSLQKKQMNTSLCERIRKVYGDLECEYCGKLFWYQVHFDMHVRTHTREHLYYCSQCHYSSITKNCLKRHVIQKHSNILLKCPTDGCDYSTPDKYKLQAHLKVHTALDKRSYSCPVCEKSFSEDRLIKSHIKTNHPEVSMSTISEVLGRRVQLKGLIGKRAMKCPYCDFYFMKNGSDLQRHIWAHEGVKPFKCSLCEYATRSKSNLKAHMNRHSTEKTHLCDMCGKKFKSKGTLKSHKLLHTADGKQFKCTVCDYTAAQKPQLLRHMEQHVSFKPFRCAHCHYSCNISGSLKRHYNRKHPNEEYANVGTGELAAEVLIQQGGLKCPVCSFVYGTKWEFNRHLKNKHGLKVVEIDGDPKWETATEAPEEPSTQYLHITEAEEDVQGTQAAVAALQDLRYTSESGDRLDPTAVNILQQIIELGAETHDATALASVVAMAPGTVTVVKQVTEEEPSSNHTVMIQETVQQASVELAEQHHLVVSSDDVEGIETVTVYTQGGEASEFIVYVQEAMQPVEEQAVEQPAQEL

SEQ ID NO: 7474 - protein, 1231 aa, Homo sapiens
MCKCCNLFSPNQSELLSHVSEKHMEEGVNVDEIIIPLRPLSTPEPPNSSKTGDEFLVMKRKRGRPKGSTKKSSTEEELAENIVSPTEDSPLAPEEGNSLPPSSLECSKCCRKFSNTRQLRKHICIIVLNLGEEEGEAGNESDLELEKKCKEDDREKASKRPRSQKTEKVQKISGKEARQLSGAKKPIISVVLTAHEAIPGATKIVPVEAGPPETGATNSETTSADLVPRRGYQEYAIQQTPYEQPMKSSRLGPTQLKIFTCEYCNKVFKFKHSLQAHLRIHTNEKPYKCPQCSYASAIKANLNVHLRKHTGEKFACDYCSFTCLSKGHLKVHIERVHKKIKQHCRFCKKKYSDVKNLIKHIRDAHDPQDKKVKEALDELCLMTREGKRQLLYDCHICERKFKNELDRDRHMLVHGDKWPFACELCGHGATKYQALELHVRKHPFVYVCAVCRKKFVSSIRLRTHIKEVHGAAQEALVFTSSINQSFCLLEPGGDIQQEALGDQLQLVEEEFALQGVNALKEEACPGDTQLEEGRKEPEAPGEMPAPAVHLASPQAESTALPPCELETTVVSSSDLHSQEVVSDDFLLKNDTSSAEAHAAPEKPPDMQHRSSVQTQGEVITLLLSKAQSAGSDQESHGAQSPLGEGQNMAVLSAGDPDPSRCLRSNPAEASDLLPPVAGGGDTITHQPDSCKAAPEHRSGITAFMKVLNSLQKKQMNTSLCERIRKVYGDLECEYCGKLFWYQVHFDMHVRTHTREHLYYCSQCHYSSITKNCLKRHVIQKHSNILLKCPTDGCDYSTPDKYKLQAHLKVHTALDKRSYSCPVCEKSFSEDRLIKSHIKTNHPEVSMSTISEVLGRRVQLKGLIGKRAMKCPYCDFYFMKNGSDLQRHIWAHEGVKPFKCSLCEYATRSKSNLKAHMNRHSTEKTHLCDMCGKKFKSKGTLKSHKLLHTADGKQFKCTVCDYTAAQKPQLLRHMEQHVSFKPFRCAHCHYSCNISGSLKRHYNRKHPNEEYANVGTGELAAEVLIQQGGLKCPVCSFVYGTKWEFNRHLKNKHGLKVVEIDGDPKWETATEAPEEPSTQYLHITEAEEDVQGTQAAVAALQDLRYTSESGDRLDPTAVNILQQIIELGAETHDATALASVVAMAPGTVTVVKQVTEEEPSSNHTVMIQETVQQASVELAEQHHLVVSSDDVEGIETVTVYTQGGEASEFIVYVQEAMQPVEEQAVEQPAQEL

SEQ ID NO: 7475 - protein, 846 aa, Homo sapiens
MCKCCNLFSPNQSELLSHVSEKHMEEGVNVDEIIIPLRPLSTPEPPNSSKTGDEFLVMKRKRGRPKGSTKKSSTEEELAENIVSPTEDSPLAPEEGNSLPPSSLECSKCCRKFSNTRQLRKHICIIVLNLGEEEGEAGNESDLELEKKCKEDDREKASKRPRSQKTEKVQKISGKEARQLSGAKKPIISVVLTAHEAIPGATKIVPVEAGPPETGATNSETTSADLVPRRGYQEYAIQQTPYEQPMKSSRLGPTQLKIFTCEYCNKVFKFKHSLQAHLRIHTNEKPYKCPQCSYASAIKANLNVHLRKHTGEKFACDYCSFTCLSKGHLKVHIERVHKKIKQHCRFCKKKYSDVKNLIKHIRDAHDPQDKKVKEALDELCLMTREGKRQLLYDCHICERKFKNELDRDRHMLVHGDKWPFACELCGHGATKYQALELHVRKHPFVYVCAVCRKKFVSSIRLRTHIKEVHGAAQEALVFTSSINQSFCLLEPGGDIQQEALGDQLQLVEEEFALQGVNALKEEACPGDTQLEEGRKEPEAPGEMPAPAVHLASPQAESTALPPCELETTVVSSSDLHSQEVVSDDFLLKNDTSSAEAHAAPEKPPDMQHRSSVQTQGEVITLLLSKAQSAGSDQESHGAQSPLGEGQNMAVLSAGDPDPSRCLRSNPAEASDLLPPVAGGGDTITHQPDSCKAAPEHRSGITAFMKVLNSLQKKQMNTSLCERIRKVYGDLECEYCGKLFWYQVHFDMHVRTHTREHLYYCSQCHYSSITKNCLKRHVIQKHSNILLKCPTDGCDYSTPDKYKLQAHLKVHTALVSSKPKRQPRLPWVLIAFSSLCLYVGVSAAGQP

SEQ ID NO: 7476 - protein, 1181 aa, Homo sapiens
METRAAENTAIFMCKCCNLFSPNQSELLSHVSEKHMEEGVNVDEIIIPLRPLSTPEPPNSSKTGDEFLVMKRKRGRPKGSTKKSSTEEELAENIVSPTEDSPLAPEEGNSLPPSSLECSKCCRKFSNTRQLRKHICIIVLNLGEEEGEAGATKIVPVEAGPPETGATNSETTSADLVPRRGYQEYAIQQTPYEQPMKSSRLGPTQLKIFTCEYCNKVFKFKHSLQAHLRIHTNEKPYKCPQCSYASAIKANLNVHLRKHTGEKFACDYCSFTCLSKGHLKVHIERVHKKIKQHCRFCKKKYSDVKNLIKHIRDAHDPQDKKVKEALDELCLMTREGKRQLLYDCHICERKFKNELDRDRHMLVHGDKWPFACELCGHGATKYQALELHVRKHPFVYVCAVCRKKFVSSIRLRTHIKEVHGAAQEALVFTSSINQSFCLLEPGGDIQQEALGDQLQLVEEEFALQGVNALKEEACPGDTQLEEGRKEPEAPGEMPAPAVHLASPQAESTALPPCELETTVVSSSDLHSQEVVSDDFLLKNDTSSAEAHAAPEKPPDMQHRSSVQTQGEVITLLLSKAQSAGSDQESHGAQSPLGEGQNMAVLSAGDPDPSRCLRSNPAEASDLLPPVAGGGDTITHQPDSCKAAPEHRSGITAFMKVLNSLQKKQMNTSLCERIRKVYGDLECEYCGKLFWYQVHFDMHVRTHTREHLYYCSQCHYSSITKNCLKRHVIQKHSNILLKCPTDGCDYSTPDKYKLQAHLKVHTALDKRSYSCPVCEKSFSEDRLIKSHIKTNHPEVSMSTISEVLGRRVQLKGLIGKRAMKCPYCDFYFMKNGSDLQRHIWAHEGVKPFKCSLCEYATRSKSNLKAHMNRHSTEKTHLCDMCGKKFKSKGTLKSHKLLHTADGKQFKCTVCDYTAAQKPQLLRHMEQHVSFKPFRCAHCHYSCNISGSLKRHYNRKHPNEEYANVGTGELAAEVLIQQGGLKCPVCSFVYGTKWEFNRHLKNKHGLKVVEIDGDPKWETATEAPEEPSTQYLHITEAEEDVQGTQAAVAALQDLRYTSESGDRLDPTAVNILQQIIELGAETHDATALASVVAMAPGTVTVVKQVTEEEPSSNHTVMIQETVQQASVELAEQHHLVVSSDDVEGIETVTVYTQGGEASEFIVYVQEAMQPVEEQAVEQPAQEL

SEQ ID NO: 7477 - protein, 810 aa, Homo sapiens
MNKVEQKSQESVSFKDVTVGFTQEEWQHLDPSQRALYRDVMLENYSNLVSVGYCVHKPEVIFRLQQGEEPWKQEEEFPSQSFPVWTADHLKERSQENQSKHLWEVVFINNEMLTKEQGDVIGIPFNVDVSSFPSRKMFCQCDSCGMSFNTVSELVISKINYLGKKSDEFNACGKLLLNIKHDETHTQEKNEVLKNRNTLSHHEETLQHEKIQTLEHNFEYSICQETLLEKAVFNTQKRENAEENNCDYNEFGRTLCDSSSLLFHQISPSRDNHYEFSDCEKFLCVKSTLSKPHGVSMKHYDCGESGNNFRRKLCLSHLQKGDKGEKHFECNECGKAFWEKSHLTRHQRVHTGQKPFQCNECEKAFWDKSNLTKHQRSHTGEKPFECNECGKAFSHKSALTLHQRTHTGEKPYQCNACGKTFCQKSDLTKHQRTHTGLKPYECYECGKSFRVTSHLKVHQRTHTGEKPFECLECGKSFSEKSNLTQHQRIHIGDKSYECNACGKTFYHKSLLTRHQIIHTGWKPYECYECGKTFCLKSDLTVHQRTHTGQKPFACPECGKFFSHKSTLSQHYRTHTGEKPYECHECGKIFYNKSYLTKHNRTHTGEKPYECNECGKAFYQKSQLTQHQRIHIGEKPYKCNECGKAFCHKSALIVHQRTHTQEKPYKCNECGKSFCVKSGLIFHERKHTGEKPYECNECGKFFRHKSSLTVHHRAHTGEKSCQCNECGKIFYRKSELAQHQRSHTGEKPYECNTCRKTFSQKSNLIVHQRRHIGENLMNEMDIRNFQPQVSLHNASEYSHCGESPDDILNVQ

SEQ ID NO: 7478 - protein, 811 aa, Homo sapiens
MNKVEQKSQESVSFKDVTVGFTQEEWQHLDPSQRALYRDVMLENYSNLVSVGYCVHKPEVIFRLQQGEEPWKQEEEFPSQSFPEVWTADHLKERSQENQSKHLWEVVFINNEMLTKEQGDVIGIPFNVDVSSFPSRKMFCQCDSCGMSFNTVSELVISKINYLGKKSDEFNACGKLLLNIKHDETHTQEKNEVLKNRNTLSHHEETLQHEKIQTLEHNFEYSICQETLLEKAVFNTQKRENAEENNCDYNEFGRTLCDSSSLLFHQISPSRDNHYEFSDCEKFLCVKSTLSKPHGVSMKHYDCGESGNNFRRKLCLSHLQKGDKGEKHFECNECGKAFWEKSHLTRHQRVHTGQKPFQCNECEKAFWDKSNLTKHQRSHTGEKPFECNECGKAFSHKSALTLHQRTHTGEKPYQCNACGKTFCQKSDLTKHQRTHTGLKPYECYECGKSFRVTSHLKVHQRTHTGEKPFECLECGKSFSEKSNLTQHQRIHIGDKSYECNACGKTFYHKSLLTRHQIIHTGWKPYECYECGKTFCLKSDLTVHQRTHTGQKPFACPECGKFFSHKSTLSQHYRTHTGEKPYECHECGKIFYNKSYLTKHNRTHTGEKPYECNECGKAFYQKSQLTQHQRIHIGEKPYKCNECGKAFCHKSALIVHQRTHTQEKPYKCNECGKSFCVKSGLIFHERKHTGEKPYECNECGKFFRHKSSLTVHHRAHTGEKSCQCNECGKIFYRKSELAQHQRSHTGEKPYECNTCRKTFSQKSNLIVHQRRHIGENLMNEMDIRNFQPQVSLHNASEYSHCGESPDDILNVQ

SEQ ID NO: 7479 - protein, 817 aa, Homo sapiens
MANATRRGSGVEQKSQESVSFKDVTVGFTQEEWQHLDPSQRALYRDVMLENYSNLVSVGYCVHKPEVIFRLQQGEEPWKQEEEFPSQSFPVWTADHLKERSQENQSKHLWEVVFINNEMLTKEQGDVIGIPFNVDVSSFPSRKMFCQCDSCGMSFNTVSELVISKINYLGKKSDEFNACGKLLLNIKHDETHTQEKNEVLKNRNTLSHHEETLQHEKIQTLEHNFEYSICQETLLEKAVFNTQKRENAEENNCDYNEFGRTLCDSSSLLFHQISPSRDNHYEFSDCEKFLCVKSTLSKPHGVSMKHYDCGESGNNFRRKLCLSHLQKGDKGEKHFECNECGKAFWEKSHLTRHQRVHTGQKPFQCNECEKAFWDKSNLTKHQRSHTGEKPFECNECGKAFSHKSALTLHQRTHTGEKPYQCNACGKTFCQKSDLTKHQRTHTGLKPYECYECGKSFRVTSHLKVHQRTHTGEKPFECLECGKSFSEKSNLTQHQRIHIGDKSYECNACGKTFYHKSLLTRHQIIHTGWKPYECYECGKTFCLKSDLTVHQRTHTGQKPFACPECGKFFSHKSTLSQHYRTHTGEKPYECHECGKIFYNKSYLTKHNRTHTGEKPYECNECGKAFYQKSQLTQHQRIHIGEKPYKCNECGKAFCHKSALIVHQRTHTQEKPYKCNECGKSFCVKSGLIFHERKHTGEKPYECNECGKFFRHKSSLTVHHRAHTGEKSCQCNECGKIFYRKSELAQHQRSHTGEKPYECNTCRKTFSQKSNLIVHQRRHIGENLMNEMDIRNFQPQVSLHNASEYSHCGESPDDILNVQ

SEQ ID NO: 7480 - protein, 402 aa, Homo sapiens
MASIIARVGNSRRLNAPLPPWAHSMLRSLGRSLGPIMASMADRNMKLFSGRVVPAQGEETFENWLTQVNGVLPDWNMSEEEKLKRLMKTLRGPAREVMRVLQATNPNLSVADFLRAMKLVFGESESSVTAHGKFFNTLQAQGEKASLYVIRLEVQLQNAIQAGIIAEKDANRTRLQQLLLGGELSRDLRLRLKDFLRMYANEQERLPNFLELIRMVREEEDWDDAFIKRKRPKRSESMVERAVSPVAFQGSPPIVIGSADCNVIEIDDTLDDSDEDVILVESQDPPLPSWGAPPLRDRARPQDEVLVIDSPHNSRAQFPSTSGGSGYKNNGPGEMRRARKRKHTIRCSYCGEEGHSKETCDNESDKAQVFENLIITLQELTHTEMERSRVAPGEYNDFSEPL

SEQ ID NO: 7481 - protein, 663 aa, Homo sapiens
MFLKAGRGNKVPPVRVYGPDCVVLMEPPLSKRNPPALRLADLATAQVQPLQNMTGFPALAGPPAHSQLRAAVAHLRLRDLGADPGVATTPLGPEHMAQASTLGLSPPSQAFPAHPEAPAAAARAAALVAHPGAGSYPCGGGSSGAQPSAPPPPAPPLPPTPSPPPPPPPPPPPALSGYTTTNSGGGGSSGKGHSRDFVLRRDLSATAPAAAMHGAPLGGEQRSGTGSPQHPAPPPHSAGMFISASGTYAGPDGSGGPALFPALHDTPGAPGGHPHPLNGQMRLGLAAAAAAAAAELYGRAEPPFAPRSGDAHYGAVAAAAAAALHGYGAVNLNLNLAAAAAAAAAGPGPHLQHHAPPPAPPPPPAPAQHPHQHHPHLPGAAGAFLRYMRQPIKQELICKWIDPDELAGLPPPPPPPPPPPPPPPAGGAKPCSKTFGTMHELVNHVTVEHVGGPEQSSHVCFWEDCPREGKPFKAKYKLINHIRVHTGEKPFPCPFPGCGKVFARSENLKIHKRTHTGEKPFKCEFDGCDRKFANSSDRKKHSHVHTSDKPYYCKIRGCDKSYTHPSSLRKHMKIHCKSPPPSPGPLGYSSVGTPVGAPLSPVLDPARSHSSTLSPQVTNLNEWYVCQASGAPSHLHTPSSNGTTSETEDEEIYGNPEVVRTIH

SEQ ID NO: 7482 - protein, 778 aa, Homo sapiens
MNKVDQKFQGSVSFKDVTVGFTQEEWQHLDPSQRALYRDVMLENYSNLVSVGYCAHKPEVIFRLEQGEEPWRLEEEFPSQSFPEVWTADHLKERSQENQSKHLWEVVFINNEMLTKEQGNVIGIPFNMDVSSFPSRKMFCQYDSRGMSFNTVSELVISKINYLGKKSDEFNACGKLLLNIKHDETHTREKNEVLKNRNTLSHRENTLQHEKIQTLDHNFEYSICQETLLEKAVFNTRKRENAEENNCDYNEFGRTFCDSSSLLFHQIPPSKDSHYEFSDCEKFLCVKSTLSKHDGVPVKHYDCGESGNNFRRKLCLSQLQKGDKGEKHFECNECGKAFWEKSHLTRHQRVHTGEKHFQCNQCGKTFWEKSNLTKHQRSHTGEKPFECNECGKAFSHKSALTLHQRTHTGEKPYQCNACGKTFYQKSDLTKHQRTHTGQKPYECYECGKSFCMNSHLTVHQRTHTGEKPFECLECGKSFCQKSHLTQHQRTHIGDKPYECNACGKTFYHKSVLTRHQIIHTGLKPYECYECGKTFCLKSDLTIHQRTHTGEKPFACPECGKFFSHKSTLSQHYRTHTGEKPYECHECGKIFYNKSYLTKHNRTHTGEKPYECNECGKTFCQKSQLTQHQRIHIGEKPYECNECGKAFCHKSALIVHQRTHTQEKPYKCNECGKSFCVKSGLILHERKHTGEKPYECNECGKSFSHKSSLTVHHRAHTGEKSCQCNECGKIFYRKSDLAKHQRSHTGEKPYECNTCRKTFSQKSNLIVHQRTHIGEKPYE

SEQ ID NO: 7483 - protein, 166 aa, Homo sapiens
MSSKDFFACGHSGHWARGCPRGGAGGRRGGGHGRGSQCGSTTLSYTCYCCGESGRNAKNCVLLGNICYNCGRSGHIAKDCKDPKRERRQHCYTCGRLGHLARDCDRQKEQKCYSCGKLGHIQKDCAQVKCYRCGEIGHVAINCSKARPGQLLPLRQIPTSSQGMSQ

SEQ ID NO: 7484 - protein, 854 aa, Homo sapiens
MAQAIFEALEGMDNQTVLAVQSLLDGQGAVPDPTGQSVNAPPAIQPLDDEDVFLCGKCKKQFNSLPAFMTHKREQCQGNAPALATVSLATNSIYPPSAAPTAVQQAPTPANRQISTYITVPPSPLIQTLVQGNILVSDDVLMSAMSAFTSLDQPMPQGPPPVQSSLNMHSVPSYLTQPPPPPPPPPPLPPPPPPQPPPPPPQSLGPPGRPNPGGNGVVEVYSAAAPLAGSGTVEIQALGMQPYPPLEVPNQCVEPPVYPTPTVYSPGKQGFKPKGPNPAAPMTSATGGTVATFDSPATLKTRRAKGARGLPEAAGKPKAQKLKCSYCDKSFTKNFDLQQHIRSHTGEKPFQCIACGRAFAQKSNVKKHMQTHKVWPPGHSGGTVSRNSVTVQVMALNPSRQEDEESTGLGQPLPGAPQPQALSTAGEEEGDKPESKQVVLIDSSYLCQFCPSKFSTYFQLKSHMTQHKNEQVYKCVVKSCAQTFPKLDTFLEHIKSHQEELSYRCHLCGKDFPSLYDLGVHQYSHSLLPQHSPKKDNAVYKCVKCVNKYSTPEALEHHLQTATHNFPCPHCQKVFPCERYLRRHLPTHGSGGRFKCQVCKKFFRREHYLKLHAHIHSGEKPYKCSVCESAFNRKDKLKRHMLIHEPFKKYKCPFSTHTGCSKEFNRPDKLKAHILSHSGMKLHKCALCSKSFSRRAHLAEHQRAHTGNYKFRCAGCAKGFSRHKYLKDHRCRLGPQKDKDLQTRRPPQRRAAPRSCGSGGRKVLTPLPDPLGLEELKDTGAGLVPEAVPGKPPFAEPDAVLSIVVGGAVGAETELVVPGHAEGLGSNLALAELQAGAEGPCAMLAVPVYIQASE

SEQ ID NO: 7485 - protein, 847 aa, Homo sapiens
MAQAIFEALEGMDNQTVLAVQSLLDGQGAVPDPTGQSVNAPPAIQPLDDEDVFLCGKCKKQFNSLPAFMTHKREQCQGNAPALATVSLATNSIYPPSAAPTAVQQAPTPANRQISTYITVPPSPLIQTLVQGNILVSDDVLMSAMSAFTSLDQPMPQGPPPVQSSLNMHSVPSYLTQPPPPPPPPPPLPPPPPPQPPPPPPQSLGPPGRPNPGGNGVVEVYSAAAPLAGSGTVEIQALGMQPYPPLEVPNQCVEPPVYPTPTVYSPGKQGFKPKGPNPAAPMTSATGGTVATFDSPATLKTRRAKAAGKPKAQKLKCSYCDKSFTKNFDLQQHIRSHTGEKPFQCIACGRAFAQKSNVKKHMQTHKVWPPGHSGGTVSRNSVTVQVMALNPSRQEDEESTGLGQPLPGAPQPQALSTAGEEEGDKPESKQVVLIDSSYLCQFCPSKFSTYFQLKSHMTQHKNEQVYKCVVKSCAQTFPKLDTFLEHIKSHQEELSYRCHLCGKDFPSLYDLGVHQYSHSLLPQHSPKKDNAVYKCVKCVNKYSTPEALEHHLQTATHNFPCPHCQKVFPCERYLRRHLPTHGSGGRFKCQVCKKFFRREHYLKLHAHIHSGEKPYKCSVCESAFNRKDKLKRHMLIHEPFKKYKCPFSTHTGCSKEFNRPDKLKAHILSHSGMKLHKCALCSKSFSRRAHLAEHQRAHTGNYKFRCAGCAKGFSRHKYLKDHRCRLGPQKDKDLQTRRPPQRRAAPRSCGSGGRKVLTPLPDPLGLEELKDTGAGLVPEAVPGKPPFAEPDAVLSIVVGGAVGAETELVVPGHAEGLGSNLALAELQAGAEGPCAMLAVPVYIQASE

SEQ ID NO: 7486 - protein, 949 aa, Homo sapiens
MASNHPAFSFHQKQVLRQELTQIQSSLNGGGGHGGKGAPGPGGALPTCPACHKITPRTEAPVSSVSNSLENALHTSAHSTEESLPKRPLGKHSKVSVEKIDLKGLSHTKNDRNVECSFEVLWSDSSITSVTKSSSEVTEFISKLCQLYPEENLEKLIPCLAGPDAFYVERNHVDLDSGLRYLASLPSHVLKNDHVRRFLSTSSPPQQLQSPSPGNPSLSKVGTVMGVSGRPVCGVAGIPSSQSGAQHHGQHPAGSAAPLPHCSHAGSAGSALAYRTQMDTSPAILMPSSLQTPQTQEQNGILDWLRKLRLHKYYPVFKQLSMEKFLSLTEEDLNKFESLTMGAKKKLKTQLELEKEKSERRCLNPSAPPLVTSSGVARVPPTSHVGPVQSGRGSHAAELRVEVEQPHHQLPREGSSSEYSSSSSSPMGVQAREESSDSAEENDRRVEIHLESSDKEKPVMLLNHFTSSSARPTAQVLPVQNEASSNPSGHHPLPPQMLSAASHITPIRMLNSVHKPERGSADMKLLSSSVHSLLSLEERNKGSGPRSSMKVDKSFGSAMMDVLPASAPHQPVQVLSGLSESSSMSPTVSFGPRTKVVHASTLDRVLKTAQQPALVVETSTAATGTPSTVLHAARPPIKLLLSSSVPADSAISGQTSCPNNVQISVPPAIINPRTALYTANTKVAFSAMSSMPVGPLQGGFCANSNTASPSSHPSTSFANMATLPSCPAPSSSPALSSVPESSFYSSSGGGGSTGNIPASNPNHHHHHHHQQPPAPPQPAPPPPGCIVCTSCGCSGSCGSSGLTVSYANYFQHPFSGPSVFTFPFLPFSPMCSSGYVSAQQYGGGSTFPVVHAPYSSSGTPDPVLSGQSTFAVPPMQNFMAGTAGVYQTQGLVGSSNGSSHKKSGNLSCYNCGATGHRAQDCKQPSMDFNRPGTFRLKYAPPAESLDSTD

SEQ ID NO: 7487 - protein, 962 aa, Homo sapiens
MASNHPAFSFHQKQVLRQELTQIQSSLNGGGGHGGKGAPGPGGALPTCPACHKITPRTEAPVSSVSNSLENALHTSAHSTEESLPKRPLGKHSKVSVEKIDLKGLSHTKNDRNVECSFEVLWSDSSITSVTKSSSEVTEFISKLCQLYPEENLEKLIPCLAGPDAFYVERNHVDLDSGLRYLASLPSHVLKNDHVRRFLSTSSPPQQLQSPSPGNPSLSKVGTVMGVSGRPVCGVAGIPSSQSGAQHHGQHPAGSAAPLPHCSHAGSAGSALAYRTQMDTSPAILMPSSLQTPQTQEQNGILDWLRKLRLHKYYPVFKQLSMEKFLSLTEEDLNKFESLTMGAKKKLKTQLELEKEKSERRCLNPSAPPLVTSSGVARVPPTSHVGPVQSGRGSHAAELRVEVEQPHHQLPREGSSSEYSSSSSSPMGVQAREESSDSAEENDRRVEIHLESSDKEKPVMLLNHFTSSSARPTAQVLPVQNEASSNPSGHHPLPPQMLSAASHITPIRMLNSVHKPERGSADMKLLSSSVHSLLSLEERNKGSGPRSSMKVDKSFGSAMMDVLPASAPHQPVQVLSGLSESSSMSPTVSFGPRTKVVHASTLDRVLKTAQQPALVVETSTAATGTPSTVLHAARPPIKLLLSSSVPADSAISGQTSCPNNVQISVPPAIINPRTALYTANTKVAFSAMSSMPVGPLQGGFCANSNTASPSSHPSTSFANMATLPSCPAPSSSPALSSVPESSFYSSSGGGGSTGNIPASNPNHHHHHHHQQPPAPPQPAPPPPGCIVCTSCGCSGSCGSSGLTVSYANYFQHPFSGPSVFTFPFLPFSPMCSSGYVSAQQYGGGSTFPVVHAPYSSSGTPDPVLSGQSTFAVPPMQNFMAGTAGVYQTQGLVGSSNGSSHKKSGNLSCYNCGATGHRAQDCKQPSMDFNRPGKRAPWPRPPGSRRTSAHKCLVFMKSKLLSL

SEQ ID NO: 7488 - protein, 599 aa, Homo sapiens
MMLPYPSALGDQYWEEILLPKNGENVETMKKLTQNHKAKGLPSNDTDCPQKKEGKAQIVVPVTFRDVTVIFTEAEWKRLSPEQRNLYKEVMLENYRNLLSLAEPKPEIYTCSSCLLAFSCQQFLSQHVLQIFLGLCAENHFHPGNSSPGHWKQQGQQYSHVSCWFENAEGQERGGGSKPWSARTEERETSRAFPSPLQRQSASPRKGNMVVETEPSSAQRPNPVQLDKGLKELETLRFGAINCREYEPDHNLESNFITNPRTLLGKKPYICSDCGRSFKDRSTLIRHHRIHSMEKPYVCSECGRGFSQKSNLSRHQRTHSEEKPYLCRECGQSFRSKSILNRHQWTHSEEKPYVCSECGRGFSEKSSFIRHQRTHSGEKPYVCLECGRSFCDKSTLRKHQRIHSGEKPYVCRECGRGFSQNSDLIKHQRTHLDEKPYVCRECGRGFCDKSTLIIHERTHSGEKPYVCGECGRGFSRKSLLLVHQRTHSGEKHYVCRECRRGFSQKSNLIRHQRTHSNEKPYICRECGRGFCDKSTLIVHERTHSGEKPYVCSECGRGFSRKSLLLVHQRTHSGEKHYVCRECGRGFSHKSNLIRHQRTH

SEQ ID NO: 7489 - protein, 509 aa, Homo sapiens
MLENYRNLLSLAEPKPEIYTCSSCLLAFSCQQFLSQHVLQIFLGLCAENHFHPGNSSPGHWKQQGQQYSHVSCWFENAEGQERGGGSKPWSARTEERETSRAFPSPLQRQSASPRKGNMVVETEPSSAQRPNPVQLDKGLKELETLRFGAINCREYEPDHNLESNFITNPRTLLGKKPYICSDCGRSFKDRSTLIRHHRIHSMEKPYVCSECGRGFSQKSNLSRHQRTHSEEKPYLCRECGQSFRSKSILNRHQWTHSEEKPYVCSECGRGFSEKSSFIRHQRTHSGEKPYVCLECGRSFCDKSTLRKHQRIHSGEKPYVCRECGRGFSQNSDLIKHQRTHLDEKPYVCRECGRGFCDKSTLIIHERTHSGEKPYVCGECGRGFSRKSLLLVHQRTHSGEKHYVCRECRRGFSQKSNLIRHQRTHSNEKPYICRECGRGFCDKSTLIVHERTHSGEKPYVCSECGRGFSRKSLLLVHQRTHSGEKHYVCRECGRGFSHKSNLIRHQRTH

SEQ ID NO: 7490 - protein, 118 aa, Homo sapiens
MMLPYPSALGDQYWEEILLPKNGENVETMKKLTQNHKAKGLPSNDTDCPQKKEGKAQIVVPVTFRDVTVIFTEAEWKRLSPEQRNLYKEVMLENYRNLLSLGQEIETILANIVKSHLY

SEQ ID NO: 7491 - protein, 488 aa, Homo sapiens
MENLTKHSIECSSFRGDWECKNQFERKQGSQEGHFSEMIFTPEDMPTFSIQHQRIHTDEKLLECKECGKDFSFVSVLVRHQRIHTGEKPYECKECGKAFGSGANLAYHQRIHTGEKPFECKECGKAFGSGSNLTHHQRIHTGEKPYECKECGKAFSFGSGLIRHQIIHSGEKPYECKECGKSFSFESALIRHHRIHTGEKPYECIDCGKAFGSGSNLTQHRRIHTGEKPYECKACGMAFSSGSALTRHQRIHTGEKPYICNECGKAFSFGSALTRHQRIHTGEKPYVCKECGKAFNSGSDLTQHQRIHTGEKPYECKECEKAFRSGSKLIQHQRMHTGEKPYECKECGKTFSSGSDLTQHHRIHTGEKPYECKECGKAFGSGSKLIQHQLIHTGERPYECKECGKSFSSGSALNRHQRIHTGEKPYECKECGKAFYSGSSLTQHQRIHTGEKLYECKNCGKAYGRDSEFQQHKKSHNGKKLCELETIN

SEQ ID NO: 7492 - protein, 2572 aa, Homo sapiens
MATLNSASTTGTTPSPGHNAPSLPSDTFSSSTPSDPVTKDPPAASSTSENMRSSEPGGQLLESGCGLVPPKEIGEPQEGPDCGHFPPNDPGVEKDKEQEEEEEGLPPMDLSNHLFFTAGGEAYLVAKLSLPGGSELLLPKGFPWGEAGIKEEPSLPFLAYPPPSHLTALHIQHGFDPIQGFSSSDQILSHDTSAPSPAACEERHGAFWSYQLAPNPPGDPKDGPMGNSGGNHVAVFWLCLLCRLGFSKPQAFMDHTQSHGVKLTPAQYQGLSGSPAVLQEGDEGCKALISFLEPKLPARPSSDIPLDNSSTVNMEANVAQTEDGPPEAEVQALILLDEEVMALSPPSPPTATWDPSPTQAKESPVAAGEAGPDWFPEGQEEDGGLCPPLNQSSPTSKEGGTLPAPVGSPEDPSDPPQPYRLADDYTPAPAAFQGLSLSSHMSLLHSRNSCKTLKCPKCNWHYKYQQTLDVHMREKHPESNSHCSYCSAGGAHPRLARGESYNCGYKPYRCDVCNYSTTTKGNLSIHMQSDKHLANLQGFQAGPGGQGSPPEASLPPSAGDKEPKTKSSWQCKVCSYETNISRNLRIHMTSEKHMQNVLMLHQGLPLGLPPGLMGPGPPPPPGATPTSPPELFQYFGPQALGQPQTPLAGPGLRPDKPLEAQLLLNGFHHVGAPARKFPTSAPGSLSPDAHLPPSQLLGSSSDSLPTSPPPDDSLSLKVFRCLVCQAFSTDSLELLLYHCSIGRSLPEAEWKEVAGDTHRCKLCCYGTQLKANFQLHLKTDKHAQKYQLAAHLREGGGAMGTPSPASLGDGAPYGSVSPLHLRCNICDFESNSKEKMQLHARGAAHEENSQIYKFLLDMEGAEAGAELGLYHCLLCAWETPSRLAVLQHLRTPAHRDAQAQRRLQLLQNGPTTEEGLAALQSILSFSHGQLRTPGKAPVTPLAEPPTPEKDAQNKTEQLASEETENKTGPSRDSANQTTVYCCPYCSFLSPESSQVRAHTLSQHAVQPKYRCPLCQEQLVGRPALHFHLSHLHNVVPECVEKLLLVATTVEMTFTTKVLSAPTLSPLDNGQEPPTHGPEPTPSRDQAAEGPNLTPEASPDPLPEPPLASVEVPDKPSGSPGQPPSPAPSPVPEPDAQAEDVAPPPTMAEEEEGTTGELRSAEPAPADSRHPLTYRKTTNFALDKFLDPARPYKCTVCKESFTQKNILLVHYNSVSHLHKMKKAAIDPSAPARGEAGAPPTTTAATDKPFKCTVCRVSYNQSSTLEIHMRSVLHQTRSRGTKTDSKIEGPERSQEEPKEGETEGEVGTEKKGPDTSGFISGLPFLSPPPPPLDLHRFPAPLFTPPVLPPFPLVPESLLKLQQQQLLLPFYLHDLKVGPKLTLAGPAPVLSLPAATPPPPPQPPKAELAEREWERPPMAKEGNEAGPSSPPDPLPNEAARTAAKALLENFGFELVIQYNEGKQAVPPPPTPPPPEALGGGDKLACGACGKLFSNMLILKTHEEHVHRRFLPFEALSRYAAQFRKSYDSLYPPLAEPPKPPDGSLDSPVPHLGPPFLVPEPEAGGTRAPEERSRAGGHWPIEEEESSRGNLPPLVPAGRRFSRTKFTEFQTQALQSFFETSAYPKDGEVERLASLLGLASRVVVVWFQNARQKARKNACEGGSMPTGGGTGGASGCRRCHATFSCVFELVRHLKKCYDDQTLEEEEEEAERGEEEEEVEEEEVEEEQGLEPPAGPEGPLPEPPDGEELSQAEATKAGGKEPEEKATPSPSPAHTCDQCAISFSSQDLLTSHRRLHFLPSLQPSAPPQLLDLPLLVFGERNPLVAATSPMPGPPLKRKHEDGSLSPTGSEAGGGGEGEPPRDKRLRTTILPEQLEILYRWYMQDSNPTRKMLDCISEEVGLKKRVVQVWFQNTRARERKGQFRSTPGGVPSPAVKPPATATPASLPKFNLLLGKVDDGTGREAPKREAPAFPYPTATLASGPQPFLPPGKEATTPTPEPPLPLLPPPPPSEEEGPEEPPKASPESEACSLSAGDLSDSSASSLAEPESPGAGGTSGGPGGGTGVPDGMGQRRYRTQMSSLQLKIMKACYEAYRTPTMQECEVLGEEIGLPKRVIQVWFQNARAKEKKAKLQGTAAGSTGGSSEGLLAAQRTDCPYCDVKYDFYVSCRGHLFSRQHLAKLKEAVRAQLKSESKCYDLAPAPEAPPALKAPPATTPASMPLGAAPTLPRLAPVLLSGPALAQPPLGNLAPFNSGPAASSGLLGLATSVLPTTTVVQTAGPGRPLPQRPMPDQTNTSTAGTTDPVPGPPTEPLGDKVSSERKPVAGPTSSSNDALKNLKALKTTVPALLGGQFLPFPLPPAGGTAPPAVFGPQLQGAYFQQLYGMKKGLFPMNPMIPQTLIGLLPNALLQPPPQPPEPTATAPPKPPELPAPGEGEAGEVDELLTGSTGISTVDVTHRYLCRQCKMAFDGEAPATAHQRSFCFFGRGSGGSMPPPLRVPICTYHCLACEVLLSGREALASHLRSSAHRRKAAPPQGGPPISITNAATAASAAVAFAKEEARLPHTDSNPKTTTTSTLLAL

SEQ ID NO: 7493 - protein, 862 aa, Homo sapiens
MATLNSASTTGTTPSPGHNAPSLPSDTFSSSTPSDPVTKDPPAASSTSENMRSSEPGGQLLESGCGLVPPKEIGEPQEGPDCGHFPPNDPGVEKDKEQEEEEEGLPPMDLSNHLFFTAGGEAYLVAKLSLPGGSELLLPKGFPWGEAGIKEEPSLPFLAYPPPSHLTALHIQHGFDPIQGFSSSDQILSHDTSAPSPAACEERHGAFWSYQLAPNPPGDPKDGPMGNSGGNHVAVFWLCLLCRLGFSKPQAFMDHTQSHGVKLTPAQYQGLSGSPAVLQEGDEGCKALISFLEPKLPARPSSDIPLDNSSTVNMEANVAQTEDGPPEAEVQALILLDEEVMALSPPSPPTATWDPSPTQAKESPVAAGEAGPDWFPEGQEEDGGLCPPLNQSSPTSKEGGTLPAPVGSPEDPSDPPQPYRLADDYTPAPAAFQGLSLSSHMSLLHSRNSCKTLKCPKCNWHYKYQQTLDVHMREKHPESNSHCSYCSAGGAHPRLARGESYNCGYKPYRCDVCNYSTTTKGNLSIHMQSDKHLANLQGFQAGPGGQGSPPEASLPPSAGDKEPKTKSSWQCKVCSYETNISRNLRIHMTSEKHMQNVLMLHQGLPLGLPPGLMGPGPPPPPGATPTSPPELFQYFGPQALGQPQTPLAGPGLRPDKPLEAQLLLNGFHHVGAPARKFPTSAPGSLSPDAHLPPSQLLGSSSDSLPTSPPPDDSLSLKVFRCLVCQAFSTDSLELLLYHCSIGRSLPEAEWKEVAGDTHRCKLCCYGTQLKANFQLHLKTDKHAQKYQLAAHLREGGGAMGTPSPASLGDGAPYGSVSPLHLRCNICDFESNSKEKMQLHARGAAHEENSQIYKRTETGLLIK

SEQ ID NO: 7494 - protein, 737 aa, Homo sapiens
MDDDKPFQPKNISKMAELFMECEEEELEPWQKKVEETQDEDDDELIFVGEISSSKPAISNILNRGHSSSSSKGIKSEPHSPGIPEIFRTASQRCRDPPSNPVAASPRFHLVSKSSQSSVTVENASKPDFTKNSQVGSDNSSILLFDSTQESLPPSQDIPAIFREGMKNTSYVLKHPSTSKVNSVTPKKPKTSEDVPQINPSTSLPLIGSPPVTSSQVMLSKGTNTSSPYDAGADYLRACPKCNVQFNLLDPLKYHMKHCCPDMITKFLGVIVKSERPCDEDKTDSETGKLIMLVNEFYYGRHEGVTEKEPKTYTTFKCFSCSKVLKNNIRFMNHMKHHLELEKQNNESWENHTTCQHCYRQYPTPFQLQCHIESTHTPHEFSTICKICELSFETEHILLQHMKDTHKPGEMPYVCQVCQFRSSTFSDVEAHFRAAHENTKNLLCPFCLKVSKMATPYMNHYMKHQKKGVHRCPKCRLQFLTSKEKAEHKAQHRTFIKPKELEGLPPGAKVTIRASLGPLQSKLPTAPFGCAPGTSFLQVTPPTSQNTTARNPRKSNASRSKTSKLHATTSTASKVNTSKPRGRIAKSKAKPSYKQKRQRNRKNKMSLALKNIRCRRGIHKCIECHSKIKDFASHFSIYIHCSFCKYNTNCNKAFVNHMMSSHSNHPGKRFCIFKKHSGTLRGITLVCLKCDFLADSSGLDRMAKHLSQRKTHTCQVIIENVSKSTSTSEPTTGCSLK

SEQ ID NO: 7495 - protein, 552 aa, Homo sapiens
MARVPLTFSDVAIDFSQEEWEYLNSDQRDLYRDVMLENYTNLVSLDFNFTTESNKLSSEKRNYEVNAYHQETWKRNKTFNLMRFIFRTDPQYTIEFGRQQRPKVGCFSQMIFKKHKSLPLHKRNNTREKSYECKEYKKGFRKYLHLTEHLRDHTGVIPYECNECGKAFVVFQHFIRHRKIHTDLKPYECNGCEKAFRFYSQLIQHQIIHTGMKPYECKQCGKAFRRHSHLTEHQKIHVGLKPFECKECGETFRLYRHMCLHQKIHHGVKPYKCKECGKAFGHRSSLYQHKKIHSGEKPYKCEQCEKAFVRSYLLVEHQRSHTGEKPHECMECGKAFGKGSSLLKHKRIHSSEKLYDCKDCGKAFCRGSQLTQHQRIHTGEKPHECKECGKTFKLHSYLIQHQIIHTDLKPYECKQCGKAFSRVGDLKTHQSIHAGEKPYECKECGKTFRLNSQLIYHQTIHTGLKPYVCKECKKAFRSISGLSQHKRIHTGEKPYECKECDKAFNRSDRLTQHETIHTGVKPQKCKECGKAFSHCYQLSQHQRFHHGERLLM

SEQ ID NO: 7496 - protein, 502 aa, Homo sapiens
MGTENKEVIPKEEISEESEPHGSLLEKFPKVVYQGHEFGAGCEEDMLEGHSRESMEEVIEQMSPQERDFPSGLMIFKKSPSSEKDRENNESERGCSPSPNLVTHQGDTTEGVSAFATSGQNFLEILESNKTQRSSVGEKPHTCKECGKAFNQNSHLIQHMRVHSGEKPFECKECGKTFGTNSSLRRHLRIHAGEKPFACNECGKAFIQSSHLIHHHRIHTGERPYKCEECGKAFSQNSALILHQRIHTGEKPYECNECGKTFRVSSQLIQHQRIHTEERYHECNECGKAFKHSSGLIRHQKIHTGEKPYLCNECGKGFGQSSELIRHQRIHTGDKPYECNECGKTFGQNSEIIRHIRIHTGEKPYVCKECGKAFRGNSELLRHERIHTGEKPYECFECGKAFRRTSHLIVHQRIHTGEKPHQCNECARTFWDNSELLLHQKIHIGEKPYECSECEKTFSQHSQLIIHQRIHTGEKPYECQECQKTFSRSSHLLRHQSVHCME

SEQ ID NO: 7497 - protein, 2248 aa, Homo sapiens
MMDSENKPENDEDEKINKEAQDLTKLSSHNEDGGPVSDVIASFPENSMGKRGFSESSNSDSVVIGEDRNKHASKRRKLDEAEPLKSGKQGICRLETSESSVTEGGIALDETGKETFLSDCTVGGTCLPNALSPSCNFSTIDVVSLKTDTEKTSAQEMVSLDLERESPFPPKEISVSCTIGNVDTVLKCSICGHLFSSCSDLEKHAESHMQQPKEHTCCHCSHKAESSSALHMHIKQAHGPQKVFSCDLCGFQCSEENLLNAHYLGKTHLRRQNLAARGGFVQILTKQPFPKKSRTMATKNVHSKPRTSKSIAKNSDSKGLRNVGSTFKDFRGSISKQSGSSSELLVEMMPSRNTLSQEVEIVEEHVTSLGLAQNPENQSRKLDTLVTSEGLLEKLESTKNTLQAAHGNSVTSRPRPERNILVLGNSFRRRSSTFTLKGQAKKRFNLLGIKRGTSETQRMYMKHLRTQMKTHDAESVLKHLEACSSVQRVCVTTSETQEAEQGQGSARPPDSGLHSLTVKPASGSQTLCACTDCGQVATNRTDLEIHVKRCHAREMKFYCRTCDFSSMSRRDLDEHLHSNQHQQTASVLSCQCCSFISLDEINLRDHMKEKHNMHFLCTPCNLFFLSEKDVEEHKATEKHINSLVQPKTLQSSNSDLVLQTLPLSTLESENAKESMDDSGKASQEEPLKSRVSHGNEVRHSSKPQFQCKKCFYKTRSSTVLTRHIKLRHGQDYHFLCKACNLYSLSKEGMEKHIKRSKHLENAKKNNIGLSFEECIERVCIGANDKKEEFDVSGNGRIEGHIGVQLQEHSYLEKGMLASEELSQSGGSTKDDELASTTTPKRGRPKGNISRTCSHCGLLASSITNLTVHIRRKHSHQYSYLCKVCKYYTVTKGDMERHCATKKHKGRVEIEASGKHSSDIIVGPEGGSLEAGKKNAGSAVTMSDEHANKPAESPTSVLEKPDRGNSIEAEVENVFHSLDGEVNSHLLDKKEQISSEPEDFAQPGDVYSQRDVTGTGENKCLHCEFSAHSSASLELHVKRKHTKEFEFYCMACDYYAVTRREMTRHAATEKHKMKRQSYLNSANVEAGSADMSKNIIMPEEEHQQNSEEFQIISGQPSDTLKSRNAADCSILNENTNLDMSKVLCAADSVEVETEEESNFNEDHSFCETFQQAPVKDKVRKPEEMMSLTMSSNYGSPSRFQNENSGSSALNCETAKKNHEISNDAGELRVHCEGEGGNAGDGGGVVPHRHLCPVTLDGERSAESPVLVVTRITREQGNLESGGQNRVARGHGLEDLKGVQEDPVLGNKEILMNSQHETEFILEEDGPASDSTVESSDVYETIISIDDKGQAMYSFGRFDSSIIRIKNPEDGELIDQSEEGLIATGVRISELPLKDCAQGVKKKKSEGSSIGESTRIRCDDCGFLADGLSGLNVHIAMKHPTKEKHFHCLLCGKSFYTESNLHQHLASAGHMRNEQASVEELPEGGATFKCVKCTEPFDSEQNLFLHIKGQHEELLREVNKYIVEDTEQINREREENQGNVCKYCGKMCRSSNSMAFLAHIRTHTGSKPFKCKICHFATAQLGDARNHVKRHLGMREYKCHVCGVAFVMKKHLNTHLLGKHGVGTPKERKFTCHLCDRSFTEKWALNNHMKLHTGEKPFKCTWPTCHYSFLTASAMKDHYRTHTGEKSFLCDLCGFAGGTRHALTKHRRQHTGEKPFKCDECNFASTTQSHLTRHKRVHTGEKPYRCPWCDYRSNCAENIRKHILHTGKHEGVKMYNCPKCDYGTNVPVEFRNHLKEQHPDIENPDLAYLHAGIVSKSYECRLKGQGATFVETDSPFTAAALAEEPLVKEKPLRSSRRPAPPPEQVQQVIIFQGYDGEFALDPSVEETAAATLQTLAMAGQVARVVHITEDGQVIATSQSGAHVGSVVPGPILPEQLADGATQVVVVGGSMEGHGMDESLSPGGAVIQQVTKQEILNLSEAGVAPPEASSALDALLCAVTELGEVEGRAGLEEQGRPGAKDVLIQLPGQEVSHVAADPEAPEIQMFPQAQESPAAVEVLTQVVHPSAAMASQERAQVAFKKMVQGVLQFAVCDTAAAGQLVKDGVTQVVVSEEGAVHMVAGEGAQIIMQEAQGEHMDLVESDGEISQIIVTEELVQAMVQESSGGFSEGTTHYILTELPPGVQDEPGLYSHTVLETADSQELLQAGATLGTEAGAPSRAEQLASVVIYTQEGSSAAAAIQSQRESSELQEA

SEQ ID NO: 7498 - protein, 1815 aa, Homo sapiens
MMDSENKPENDEDEKINKEAQDLTKLSSHNEDGGPVSDVIASFPENSMGKRGFSESSNSDSVVIGEDRNKHASKRRKLDEAEPLKSGKQGICRLETSESSVTEGGIALDETGKETFLSDCTVGGTCLPNALSPSCNFSTIDVVSLKTDTEKTSAQEMVSLDLERESPFPPKEISVSCTIGNVDTVLKCSICGHLFSSCSDLEKHAESHMQQPKEHTCCHCSHKAESSSALHMHIKQAHGPQKVFSCDLCGFQCSEENLLNAHYLGKTHLRRQNLAARGGFVQILTKQPFPKKSRTMATKNVHSKPRTSKSIAKNSDSKGLRNVGSTFKDFRGSISKQSGSSSELLVEMMPSRNTLSQEVEIVEEHVTSLGLAQNPENQSRKLDTLVTSEGLLEKLESTKNTLQAAHGNSVTSRPRPERNILVLGNSFRRRSSTFTLKGQAKKRFNLLGIKRGTSETQRMYMKHLRTQMKTHDAESVLKHLEACSSVQRVCVTTSETQEAEQGQGSARPPDSGLHSLTVKPASGSQTLCACTDCGQVATNRTDLEIHVKRCHAREMKFYCRTCDFSSMSRRDLDEHLHSNQHQQTASVLSCQCCSFISLDEINLRDHMKEKHNMHFLCTPCNLFFLSEKDVEEHKATEKHINSLVQPKTLQSSNSDLVLQTLPLSTLESENAKESMDDSGKASQEEPLKSRVSHGNEVRHSSKPQFQCKKCFYKTRSSTVLTRHIKLRHGQDYHFLCKACNLYSLSKEGMEKHIKRSKHLENAKKNNIGLSFEECIERVCIGANDKKEEFDVSGNGRIEGHIGVQLQEHSYLEKGMLASEELSQSGGSTKDDELASTTTPKRGRPKGNISRTCSHCGLLASSITNLTVHIRRKHSHQYSYLCKVCKYYTVTKGDMERHCATKKHKGRVEIEASGKHSSDIIVGPEGGSLEAGKKNAGSAVTMSDEHANKPAESPTSVLEKPDRGNSIEAEVENVFHSLDGEVNSHLLDKKEQISSEPEDFAQPGDVYSQRDVTGTGENKCLHCEFSAHSSASLELHVKRKHTKEFEFYCMACDYYAVTRREMTRHAATEKHKMKRQSYLNSANVEAGSADMSKNIIMPEEEHQQNSEEFQIISGQPSDTLKSRNAADCSILNENTNLDMSKVLCAADSVEVETEEESNFNEDHSFCETFQQAPVKDKVRKPEEMMSLTMSSNYGSPSRFQNENSGSSALNCETAKKNHEISNDAGELRVHCEGEGGNAGDGGGVVPHRHLCPVTLDGERSAESPVLVVTRITREQGNLESGGQNRVARGHGLEDLKGVQEDPVLGNKEILMNSQHETEFILEEDGPASDSTVESSDVYETIISIDDKGQAMYSFGRFDSSIIRIKNPEDGELIDQSEEGLIATGVRISELPLKDCAQGVKKKKSEGSSIGESTRIRCDDCGFLADGLSGLNVHIAMKHPTKEKHFHCLLCGKSFYTESNLHQHLASAGHMRNEQASVEELPEGGATFKCVKCTEPFDSEQNLFLHIKGQHEELLREVNKYIVEDTEQINREREENQGNVCKYCGKMCRSSNSMAFLAHIRTHTGSKPFKCKICHFATAQLGDARNHVKRHLGMREYKCHVCGVAFVMKKHLNTHLLGKHGVGTPKERKFTCHLCDRSFTEKWALNNHMKLHTGEKPFKCTWPTCHYSFLTASAMKDHYRTHTGEKSFLCDLCGFAGGTRHALTKHRRQHTGEKPFKCDECNFASTTQSHLTRHKRVHTGEKPYRCPWCDYRSNCAENIRKHILHTGKHEGVKMYNCPKCDYGTNVPVEFRNHLKEQHPDIENPDLAYLHAGKGQKL

SEQ ID NO: 7499 - protein, 1660 aa, Homo sapiens
MMDSENKPENDEDEKINKEAQDLTKLSSHNEDGGPVSDVIASFPENSMGKRGFSESSNSDSVVIGEDRNKHASKRRKLDEAEPLKSGKQGICRLETSESSVTEGGIALDETGKETFLSDCTVGGTCLPNALSPSCNFSTIDVVSLKTDTEKTSAQEMVSLDLERESPFPPKEISVSCTIGNVDTVLKCSICGHLFSSCSDLEKHAESHMQQPKEHTCCHCSHKAESSSALHMHIKQAHGPQKVFSCDLCGFQCSEENLLNAHYLGKTHLRRQNLAARGGFVQILTKQPFPKKSRTMATKNVHSKPRTSKSIAKNSDSKGLRNVGSTFKDFRGSISKQSGSSSELLVEMMPSRNTLSQEVEIVEEHVTSLGLAQNPENQSRKLDTLVTSEGLLEKLESTKNTLQAAHGNSVTSRPRPERNILVLGNSFRRRSSTFTLKGQAKKRFNLLGIKRGTSETQRMYMKHLRTQMKTHDAESVLKHLEACSSVQRVCVTTSETQEAEQGQGSARPPDSGLHSLTVKPASGSQTLCACTDCGQVATNRTDLEIHVKRCHAREMKFYCRTCDFSSMSRRDLDEHLHSNQHQQTASVLSCQCCSFISLDEINLRDHMKEKHNMHFLCTPCNLFFLSEKDVEEHKATEKHINSLVQPKTLQSSNSDLVLQTLPLSTLESENAKESMDDSGKASQEEPLKSRVSHGNEVRHSSKPQFQCKKCFYKTRSSTVLTRHIKLRHGQDYHFLCKACNLYSLSKEGMEKHIKRSKHLENAKKNNIGLSFEECIERVCIGANDKKEEFDVSGNGRIEGHIGVQLQEHSYLEKGMLASEELSQSGGSTKDDELASTTTPKRGRPKGNISRTCSHCGLLASSITNLTVHIRRKHSHQYSYLCKVCKYYTVTKGDMERHCATKKHKGRVEIEASGKHSSDIIVGPEGGSLEAGKKNAGSAVTMSDEHANKPAESPTSVLEKPDRGNSIEAEVENVFHSLDGEVNSHLLDKKEQISSEPEDFAQPGDVYSQRDVTGTGENKCLHCEFSAHSSASLELHVKRKHTKEFEFYCMACDYYAVTRREMTRHAATEKHKMKRQSYLNSANVEAGSADMSKNIIMPEEEHQQNSEEFQIISGQPSDTLKSRNAADCSILNENTNLDMSKVLCAADSVEVETEEESNFNEDHSFCETFQQAPVKDKVRKPEEMMSLTMSSNYGSPSRFQNENSGSSALNCETAKKNHEISNDAGELRVHCEGEGGNAGDGGGVVPHRHLCPVTLDGERSAESPVLVVTRITREQGNLESGGQNRVARGHGLEDLKGVQEDPVLGNKEILMNSQHETEFILEEDGPASDSTVESSDVYETIISIDDKGQAMYSFGRFDSSIIRIKNPEDGELIDQSEEGLIATGVRISELPLKDCAQGVKKKKSEGSSIGESTRIRCDDCGFLADGLSGLNVHIAMKHPTKEKHFHCLLCGKSFYTESNLHQHLASAGHMRNEQASVEELPEGGATFKCVKCTEPFDSEQNLFLHIKGQHEELLREVNKYIVEDTEQINREREENQGNVCKYCGKMCRSSNSMAFLAHIRTHTGSKPFKCKICHFATAQLGDARNHVKRHLGMREYKCHVCGVAFVMKKHLNTHLLGKHGVGTPKERVKVAYRKIGTLPGIQNNRNASSASEAQSLCEHFS

SEQ ID NO: 7500 - protein, 198 aa, Homo sapiens
MEKPAGRKKKTPTPREEADVQKSALREEKVSGDRKPPERPTVPRKPRTEPCLSPEDEEHVFDAFDASFKDDFEGVPVFIPFQRKKPYECSECGRIFKHKTDHIRHQRVHTGEKPFKCAQCGKAFRHSSDVTKHQRTHTGEKPFKCGECGKAFNCGSNLLKHQKTHTGEKPYECTHCGKAFAYSSCLIRHQKRHPRKKP

SEQ ID NO: 7501 - protein, 279 aa, Homo sapiens
MSPARRCRGMRAAVAASVGLSEGPAGSRSGRLFRPPSPAPAAPGARLLRLPGSGAVQAASPERAGWTEALRAAVAELRAGAVVAVPTDTLYGLACAASCSAALRAVYRLKGRSEAKPLAVCLGRVADVYRYCRVRVPEGLLKDLLPGPVTLVMERSEELNKDLNPFTPLVGIRIPDHAFMQDLAQMFEGPLALTSANLSSQASSLNVEEFQDLWPQLSLVIDGGQIGDGQSPECRLGSTVVDLSVPGKFGIIRPGCALESTTAILQQKYGLLPSHASYL

SEQ ID NO: 7502 - protein, 676 aa, Homo sapiens
MQGTVAFEDVAVNFSQEEWSLLSEVQRCLYHDVMLENWVLISSLGCWCGSEDEEAPSKKSISIQRVSQVSTPGAGVSPKKAHSCEMCGAILGDILHLADHQGTHHKQKLHRCEAWGNKLYDSSNRPHQNQYLGEKPYRSSVEEALFVKRCKFHVSEESSIFIQSGKDFLPSSGLLLQEATHTGEKSNSKPECESPFQWGDTHYSCGECMKHSSTKHVFVQQQRLPSREECYCWECGKSFSKYDSVSNHQRVHTGKRPYECGECGKSFSHKGSLVQHQRVHTGKRPYECGECGKSFSHKGSLVQHQRVHTGERPYECGECGKSFSQNGTLIKHQRVHTGERPYECEECGKCFTQKGNLIQHQRGHTSERPYECEECGKCFSQKGTLTEHHRVHTRERPYECGECGKSFSRKGHLRNHQRGHTGERPYECGECGKSFSRKGNLIQHQRSHTGERPYECRECRKLFRGKSHLIEHQRVHTGERPYECNECGKSFQDSSGFRVHQRVHTGEKPFECSECGKSFPQSCSLLRHRRVHTGERPYECGECGKSFHQSSSLLRHQKTHTAERPYECRECGKFFSSLLEHRRVHTGERPYECRECGKTFTRRSAHFKHQRLHTRGKPYECSECGKSFAETFSLTEHRRVHTGERPYECSECGKSFHRSSSLLRHQRVHTERSPYK

SEQ ID NO: 7503 - protein, 498 aa, Homo sapiens
MELLTFRDVTIEFSLEEWEFLNPAQQSLYRKVMLENYRNLVSLGLTVSKPELISRLEQRQEPWNVKRHETIAKPPAMSSHYTEDLLPEQCMQDSFQKVILRRYGSCGLEDLHLRKDGENVGECKDQKEIYNGLNQCLSTLPSKIFPYNKCVKVFSKSSNLNRENIRHTTEKLFKCMQCGKVFKSHSGLSYHKIIHTEEKLCICEECGKTFKWFSYLTKHKRIHTGEKPYKCEECGKAFNWCSSLTKHKRIHTGEKPYKCEECGKAFHWCSPFVRHKKIHTGEKPYTCEDCGRAFNRHSHLTKHKTIHTGKKPYKCKECGKAFNHCSLLTIHERTHTGEKPYKCEECGKAFNSSSILTEHKVIHSGEKPYKCEKCDKVFKRFSYLTKHKRIHTGEKPYKCEECGKAFNWSSILTEHKRIHTGEKPYNCEECGKAFNRCSHLTRHKKIHTAVKRYKCEECGKAFKRCSHLNEHKRVQRGEKSCKYKKCGEAFNHCSNLTT

SEQ ID NO: 7504 - protein, 422 aa, Homo sapiens
MSSHYTEDLLPEQCMQDSFQKVILRRYGSCGLEDLHLRKDGENVGECKDQKEIYNGLNQCLSTLPSKIFPYNKCVKVFSKSSNLNRENIRHTTEKLFKCMQCGKVFKSHSGLSYHKIIHTEEKLCICEECGKTFKWFSYLTKHKRIHTGEKPYKCEECGKAFNWCSSLTKHKRIHTGEKPYKCEECGKAFHWCSPFVRHKKIHTGEKPYTCEDCGRAFNRHSHLTKHKTIHTGKKPYKCKECGKAFNHCSLLTIHERTHTGEKPYKCEECGKAFNSSSILTEHKVIHSGEKPYKCEKCDKVFKRFSYLTKHKRIHTGEKPYKCEECGKAFNWSSILTEHKRIHTGEKPYNCEECGKAFNRCSHLTRHKKIHTAVKRYKCEECGKAFKRCSHLNEHKRVQRGEKSCKYKKCGEAFNHCSNLTT

SEQ ID NO: 7505 - protein, 466 aa, Homo sapiens
MLENYRNLVSLGLTVSKPELISRLEQRQEPWNVKRHETIAKPPAMSSHYTEDLLPEQCMQDSFQKVILRRYGSCGLEDLHLRKDGENVGECKDQKEIYNGLNQCLSTLPSKIFPYNKCVKVFSKSSNLNRENIRHTTEKLFKCMQCGKVFKSHSGLSYHKIIHTEEKLCICEECGKTFKWFSYLTKHKRIHTGEKPYKCEECGKAFNWCSSLTKHKRIHTGEKPYKCEECGKAFHWCSPFVRHKKIHTGEKPYTCEDCGRAFNRHSHLTKHKTIHTGKKPYKCKECGKAFNHCSLLTIHERTHTGEKPYKCEECGKAFNSSSILTEHKVIHSGEKPYKCEKCDKVFKRFSYLTKHKRIHTGEKPYKCEECGKAFNWSSILTEHKRIHTGEKPYNCEECGKAFNRCSHLTRHKKIHTAVKRYKCEECGKAFKRCSHLNEHKRVQRGEKSCKYKKCGEAFNHCSNLTT

SEQ ID NO: 7506 - protein, 267 aa, Homo sapiens
MAPWALLSPGVLVRTGHTVLTWGITLVLFLHDTELRQWEEQGELLLPLTFLLLVLGSLLLYLAVSLMDPGYVNVQPQPQEELKEEQTAMVPPAIPLRRCRYCLVLQPLRARHCRECRRCVRRYDHHCPWMENCVGERNHPLFVVYLALQLVVLLWGLYLAWSGLRFFQPWGQWLRSSGLLFATFLLLSLFSLVASLLLVSHLYLVASNTTTWEFISSHRIAYLRQRPSNPFDRGLTRNLAHFFCGWPSGSWETLWAEEEEEGSSPAV

SEQ ID NO: 7507 - protein, 215 aa, Homo sapiens
MAPWALLSPGVLVRTGHTVLTWGITLVLFLHDTELRQWEEQGELLLPLTFLLLVLGSLLLYLAVSLMDPGYVNVQPQPQEELKEEQTAMVPPAIPLRRCRYCLVLQPLRARHCRECRRCVRRYDHHCPWMENCVGERNHPLFVVYLALQLVVLLWGLYLAWSGLRFFQPWGQWLRSSGLLFATFLLLSHFFCGWPSGSWETLWAEEEEEGSSPAV

SEQ ID NO: 7508 - protein, 322 aa, Homo sapiens
MAPWALLSPGVLVRTGHTVLTWGITLVLFLHDTDKSADELLATHSHSWNQHLQAFAQPGTHFPTSNCTPTPPTPVLPGPASLCSPASPELRQWEEQGELLLPLTFLLLVLGSLLLYLAVSLMDPGYVNVQPQPQEELKEEQTAMVPPAIPLRRCRYCLVLQPLRARHCRECRRCVRRYDHHCPWMENCVGERNHPLFVVYLALQLVVLLWGLYLAWSGLRFFQPWGQWLRSSGLLFATFLLLSLFSLVASLLLVSHLYLVASNTTTWEFISSHRIAYLRQRPSNPFDRGLTRNLAHFFCGWPSGSWETLWAEEEEEGSSPAV

SEQ ID NO: 7509 - protein, 305 aa, Homo sapiens
MTNQYGILFKQEQAHDDAIWSVAWGTNKKENSETVVTGSLDDLVKVWKWRDERLDLQWSLEGHQLGVVSVDISHTLPIAASSSLDAHIRLWDLENGKQIKSIDAGPVDAWTLAFSPDSQYLATGTHVGKVNIFGVESGKKEYSLDTRGKFILSIAYSPDGKYLASGAIDGIINIFDIATGKLLHTLEGHAMPIRSLTFSPDSQLLVTASDDGYIKIYDVQHANLAGTLSGHASWVLNVAFCPDDTHFVSSSSDKSVKVWDVGTRTCVHTFFDHQDQVWGVKYNGNGSKIVSVGDDQEIHIYDCPI

SEQ ID NO: 7510 - protein, 302 aa, Homo sapiens
MPCRLLHQRETRSGGPRGPRHSAPTGPGWHNAPTLQSWEESHAPSRDPRDHQGSVEDTSLGGDAPADGVSPSVPPLQGLGKAAGPGGTGQAECQVVVATHRANLKPWDGRAAPLGKRTEEGRLSTSSCASVSRNKPDSVPQGDPVWPPESTGPALCAGEETEPQSSEGLAWGPWAQPWAPSLCPSQTGTASTASPQRASRLALQGPPGTILSLSSSSPCLPPSHCDPGAASSWAGLQSLKLLLQVSFQGAADGCSLRDANTNRKGPMHGSDFPPRLCLHSMSLWGSWGSRPPSPAHSREVAS

SEQ ID NO: 7511 - protein, 324 aa, Homo sapiens
MSSEAETQQPPAAPPAAPALSAADTKPGTTGSGAGSGGPGGLTSAAPAGGDKKVIATKVLGTVKWFNVRNGYGFINRNDTKEDVFVHQTAIKKNNPRKYLRSVGDGETVEFDVVEGEKGAEAANVTGPGGVPVQGSKYAADRNHYRRYPRRRGPPRNYQQNYQNSESGEKNEGSESAPEGQAQQRRPYRRRRFPPYYMRRPYGRRPQYSNPPVQGEVMEGADNQGAGEQGRPVRQNMYRGYRPRFRRGPPRQRQPREDGNEEDKENQGDETQGQQPPQRRYRRNFNYRRRRPENPKPQDGKETKAADPPAENSSAPEAEQGGAE

SEQ ID NO: 7512 - protein, 372 aa, Homo sapiens
MSEAGEATTTTTTTLPQAPTEAAAAAPQDPAPKSPVGSGAPQAAAPAPAAHVAGNPGGDAAPAATGTAAAASLATAAGSEDAEKKVLATKVLGTVKWFNVRNGYGFINRNDTKEDVFVHQTAIKKNNPRKYLRSVGDGETVEFDVVEGEKGAEAANVTGPDGVPVEGSRYAADRRRYRRGYYGRRRGPPRNYAGEEEEEGSGSSEGFDPPATDRQFSGARNQLRRPQYRPQYRQRRFPPYHVGQTFDRRSRVLPHPNRIQAGEIGEMKDGVPEGAQLQGPVHRNPTYRPRYRSRGPPRPRPAPAVGEAEDKENQQATSGPNQPSVRRGYRRPYNYRRRPRPPNAPSQDGKEAKAGEAPTENPAPPTQQSSAE

SEQ ID NO: 7513 - protein, 303 aa, Homo sapiens
MSEAGEATTTTTTTLPQAPTEAAAAAPQDPAPKSPVGSGAPQAAAPAPAAHVAGNPGGDAAPAATGTAAAASLATAAGSEDAEKKVLATKVLGTVKWFNVRNGYGFINRNDTKEDVFVHQTAIKKNNPRKYLRSVGDGETVEFDVVEGEKGAEAANVTGPDGVPVEGSRYAADRRRYRRGYYGRRRGPPRNAGEIGEMKDGVPEGAQLQGPVHRNPTYRPRYRSRGPPRPRPAPAVGEAEDKENQQATSGPNQPSVRRGYRRPYNYRRRPRPPNAPSQDGKEAKAGEAPTENPAPPTQQSSAE

SEQ ID NO: 7514 - protein, 342 aa, Homo sapiens
MSEAGEATTTTTTTLPQAPTEAAAAAPQDPAPKSPVGSGAPQAAAPAPAAHVAGNPGGDAAPAATGTAAAASLATAAGSEDAEKKVLATKVLGTVKWFNVRNGYGFINRNDTKEDVFVHQTAIKKNNPRKYLRSVGDGETVEFDVVEGEKGAEAANVTGPDGVPVEGSRYAADRRRYRRGYYGRRRGPPRNYAGEEEEEGSGSSEGFDPPATDRQFSGARNQLRRPQYRPQYRQRRFPPYHVGQTFDRRSRVLPHPNRIQAGEIGEMKDGVPEGAQLQGPVHRNPTYRPRYRSRGPPRPRPAPAVGEAEDKENQQATSGPNQPSVRRGYRRPYNYRRRPPSS

SEQ ID NO: 7515 - protein, 571 aa, Homo sapiens
MPQVTFNDVAIDFTHEEWGWLSSAQRDLYKDVMVQNYENLVSVAGLSVTKPYVITLLEDGKEPWMMEKKLSKGMIPDWESRWENKELSTKKDNYDEDSPQTVIIEKVVKQSYEFSNSKKNLEYIEKLEGKHGSQVDHFRPAILTSRESPTADSVYKYNIFRSTFHSKSTLSEPQKISAEGNSHKYDILKKNLPKKSVIKNEKVNGGKKLLNSNKSGAAFSQGKSLTLPQTCNREKIYTCSECGKAFGKQSILNRHWRIHTGEKPYECRECGKTFSHGSSLTRHLISHSGEKPYKCIECGKAFSHVSSLTNHQSTHTGEKPYECMNCGKSFSRVSHLIEHLRIHTQEKLYECRICGKAFIHRSSLIHHQKIHTGEKPYECRECGKAFCCSSHLTRHQRIHTMEKQYECNKCLKVFSSLSFLVQHQSIHTEEKPFECQKCRKSFNQLESLNMHLRNHIRLKPYECSICGKAFSHRSSLLQHHRIHTGEKPYECIKCGKTFSCSSNLTVHQRIHTGEKPYKCNECGKAFSKGSNLTAHQRVHNGEKPNSVVSVEKPLDYMNHYTCEKSYRRETV

SEQ ID NO: 7516 - protein, 507 aa, Homo sapiens
MMEKKLSKGMIPDWESRWENKELSTKKDNYDEDSPQTVIIEKVVKQSYEFSNSKKNLEYIEKLEGKHGSQVDHFRPAILTSRESPTADSVYKYNIFRSTFHSKSTLSEPQKISAEGNSHKYDILKKNLPKKSVIKNEKVNGGKKLLNSNKSGAAFSQGKSLTLPQTCNREKIYTCSECGKAFGKQSILNRHWRIHTGEKPYECRECGKTFSHGSSLTRHLISHSGEKPYKCIECGKAFSHVSSLTNHQSTHTGEKPYECMNCGKSFSRVSHLIEHLRIHTQEKLYECRICGKAFIHRSSLIHHQKIHTGEKPYECRECGKAFCCSSHLTRHQRIHTMEKQYECNKCLKVFSSLSFLVQHQSIHTEEKPFECQKCRKSFNQLESLNMHLRNHIRLKPYECSICGKAFSHRSSLLQHHRIHTGEKPYECIKCGKTFSCSSNLTVHQRIHTGEKPYKCNECGKAFSKGSNLTAHQRVHNGEKPNSVVSVEKPLDYMNHYTCEKSYRRETV

SEQ ID NO: 7517 - protein, 570 aa, Homo sapiens
MPQVTFNDVAIDFTHEEWGWLSSAQRDLYKDVMVQNYENLVSVGLSVTKPYVITLLEDGKEPWMMEKKLSKGMIPDWESRWENKELSTKKDNYDEDSPQTVIIEKVVKQSYEFSNSKKNLEYIEKLEGKHGSQVDHFRPAILTSRESPTADSVYKYNIFRSTFHSKSTLSEPQKISAEGNSHKYDILKKNLPKKSVIKNEKVNGGKKLLNSNKSGAAFSQGKSLTLPQTCNREKIYTCSECGKAFGKQSILNRHWRIHTGEKPYECRECGKTFSHGSSLTRHLISHSGEKPYKCIECGKAFSHVSSLTNHQSTHTGEKPYECMNCGKSFSRVSHLIEHLRIHTQEKLYECRICGKAFIHRSSLIHHQKIHTGEKPYECRECGKAFCCSSHLTRHQRIHTMEKQYECNKCLKVFSSLSFLVQHQSIHTEEKPFECQKCRKSFNQLESLNMHLRNHIRLKPYECSICGKAFSHRSSLLQHHRIHTGEKPYECIKCGKTFSCSSNLTVHQRIHTGEKPYKCNECGKAFSKGSNLTAHQRVHNGEKPNSVVSVEKPLDYMNHYTCEKSYRRETV

SEQ ID NO: 7518 - protein, 617 aa, Homo sapiens
MALPQGLLTFRDVAIEFSQEEWKCLDPAQRTLYRDVMLENYRNLVSLDISSKCMMKEFSSTAQGNREVIHTGTLQRHESHHTGDFRFQEIDKDIHNLEFQWQEDERNSHEAPMTEIKKLTGSADRYDQRHAGNKPIKDQLGSSFHSHLPELHMFQTQGKIGNQVEKSINDASSISTSQRISCRPKTHISNNYGNNFRNSSLLTQKQEVHMREKSFQCNESGKAFNYSSLLRKHQIIHLGEKQYKCDVCGKVFNRKRNLVCHRRCHTGEKPYRCNECGKTFSQTYSLTCHRRLHTGEKPYKCEECDKAFSFKSNLKRHRRIHAGEKPYKCNECGKTFSQTSSLTCHRRLHTGEKPFKCNECGKTFSRKSSLTCHHRLHTGEKPYKCNECGKTFSQELTLKCHRRLHTGEKPYKCNECGKVFNKKANLARHHRLHSGEKPYKCTECVKTFSRNSALVIHKAIHIGEKRYKCNECGKTFSRISALVIHTAIHTGEKPYKCNECGKGFNRKTHLACHHRLHTGEKPYKCNECGKVFNRKTHLAHHHRLHTGDKPYKCNECGKVFNQKAHLARHHRLHTGEKPYKCNECGKVFNQKANLARHHRLHTGEKPYKFNECGKAFN

SEQ ID NO: 7519 - protein, 532 aa, Homo sapiens
MLLDAGPQFPAIGVGSFARHHHHSAAAAAAAAAEMQDRELSLAAAQNGFVDSAAAHMGAFKLNPGAHELSPGQSSAFTSQGPGAYPGSAAAAAAAAALGPHAAHVGSYSGPPFNSTRDFLFRSRGFGDSAPGGGQHGLFGPGAGGLHHAHSDAQGHLLFPGLPEQHGPHGSQNVLNGQMRLGLPGEVFGRSEQYRQVASPRTDPYSAAQLHNQYGPMNMNMGMNMAAAAAHHHHHHHHHPGAFFRYMRQQCIKQELICKWIDPEQLSNPKKSCNKTFSTMHELVTHVSVEHVGGPEQSNHVCFWEECPREGKPFKAKYKLVNHIRVHTGEKPFPCPFPGCGKVFARSENLKIHKRTHTGEKPFQCEFEGCDRRFANSSDRKKHMHVHTSDKPYLCKMCDKSYTHPSSLRKHMKVHESSPQGSESSPAASSGYESSTPPGLVSPSAEPQSSSNLSPAAAAAAAAAAAAAAAVSAVHRGGGSGSGGAGGGSGGGSGSGGGGGGAGGGGGGSSGGGSGTAGGHSGLSSNFNEWYV

SEQ ID NO: 7520 - protein, 800 aa, Homo sapiens
MNRKDFVVLPWGKPGNSVKLKYRNAQELRMEKVQLEFENQEMEKKLQEFRSTRNKEKEDRESSEYYWKSGKVGKLVNQSYMMSQNKGNVVKFSAGKVKLKLLKEQIQEPVKPTVNYKMANSSECEKPKINGKVCGQCENKAALLVCLECGEDYCSGCFAKVHQKGALKLHRTTLLQAKSQILFNVLDVAHQFIKDVNPDEPKEENNSTKETSKIQHKPKSVLLQRSSSEVEITTMKRAQRTKPRKSLLCEGSFDEEASAQSFQEVLSQWRTGNHDDNKKQNLHAAVKDSLEECEVQTNLKIWREPLNIELKEDILSYMEKLWLKKHRRTPQEQLFKMLPDTFPHPHETTGDAQCSQNENDEDSDGEETKVQHTALLLPVETLNIERPEPSLKIVELDDTYEEEFEEAENIVPYKVKLADADSQRSCAFHDCQKNSFPYENGIHQHHVFDKGKRDFLNLCLRNSSTYYKDNSKAETSNTDFDNIVDPDVYSSDIEKIEESTSFERNLKEKNIGLESNQKSDDSCVSLESKDTLLGRDLEKAPIEEKLSQDIKESLELSNLYKRPSFEESKTTKSSLLLQEIACRSKPITKQYQGLERFFIFDTNERLNLLPSHRLECNNSSTRITLAGQKSQRPSTANFPLSNSVKESSSCLSSSHPRSRSAAAQSSSRAASEISEIEYIDITDQNELSLDDTTDQHTLDNLEKELQVLRSLADTSEKLYSLTSEEFPDFSSQSLNISQISTDFLKTSHVRGPCGVEELSCSGRDTKIQSLLSLSESSTDEEEEDFLNKQHVITLPWSKST

SEQ ID NO: 7521 - protein, 771 aa, Homo sapiens
MEKVQLEFENQEMEKKLQEFRSTRNKEKEDRESSEYYWKSGKVGKLVNQSYMMSQNKGNVVKFSAGKVKLKLLKEQIQEPVKPTVNYKMANSSECEKPKINGKVCGQCENKAALLVCLECGEDYCSGCFAKVHQKGALKLHRTTLLQAKSQILFNVLDVAHQFIKDVNPDEPKEENNSTKETSKIQHKPKSVLLQRSSSEVEITTMKRAQRTKPRKSLLCEGSFDEEASAQSFQEVLSQWRTGNHDDNKKQNLHAAVKDSLEECEVQTNLKIWREPLNIELKEDILSYMEKLWLKKHRRTPQEQLFKMLPDTFPHPHETTGDAQCSQNENDEDSDGEETKVQHTALLLPVETLNIERPEPSLKIVELDDTYEEEFEEAENIVPYKVKLADADSQRSCAFHDCQKNSFPYENGIHQHHVFDKGKRDFLNLCLRNSSTYYKDNSKAETSNTDFDNIVDPDVYSSDIEKIEESTSFERNLKEKNIGLESNQKSDDSCVSLESKDTLLGRDLEKAPIEEKLSQDIKESLELSNLYKRPSFEESKTTKSSLLLQEIACRSKPITKQYQGLERFFIFDTNERLNLLPSHRLECNNSSTRITLAGQKSQRPSTANFPLSNSVKESSSCLSSSHPRSRSAAAQSSSRAASEISEIEYIDITDQNELSLDDTTDQHTLDNLEKELQVLRSLADTSEKLYSLTSEEFPDFSSQSLNISQISTDFLKTSHVRGPCGVEELSCSGRDTKIQSLLSLSESSTDEEEEDFLNKQHVITLPWSKST

SEQ ID NO: 7522 - protein, 839 aa, Homo sapiens
MNRKDFVVLPWGKPGNSVKLKYRNAQELRMEKVQLEFENQEMEKKLQEFRSTRNKEKEDRESSEYYWKSGKVGKLVNQSYMMSQNKGNVVKFSAGKVKLKLLKEQIQEPVKPTVNYKMANSSECEKPKINGKVCGQCENKAALLVCLECGEDYCSGCFAKVHQKGALKLHRTTLLQAKSQILFNVLDVAHQFIKDVNPDEPKEENNSTKETSKIQHKPKSVLLQRSSSEVEITTMKRAQRTKPRKSLLCEGSFDEEASAQSFQEVLSQWRTGNHDDNKKQNLHAAVKDSLEECEVQTNLKIWREPLNIELKEDILSYMEKLWLKKHRRTPQEQLFKMLPDTFPHPHETTGDAQCSQNENDEDSDGEETKVQHTALLLPVETLNIERPEPSLKIVELDDTYEEEFEEAENIVPYKVKLADADSQRSCAFHDCQKNSFPYENGIHQHHVFDKGKRDFLNLCLRNSSTYYKDNSKAETSNTDFDNIVDPDVYSSDIEKIEESTSFERNLKEKNIGLESNQKSDDSCVSLESKDTLLGRDLEKAPIEEKLSQDIKESLELSNLYKRPSFEESKTTKSSLLLQEIACRSKPITKQYQGLERFFIFDTNERLNLLPSHRLECNNSSTRITLAEDREWIPDHSLSEYADNAIVLGVLQGAQSPSSSRKQQKMGQKSQRPSTANFPLSNSVKESSSCLSSSHPRSRSAAAQSSSRAASEISEIEYIDITDQNELSLDDTTDQHTLDNLEKELQVLRSLADTSEKLYSLTSEEFPDFSSQSLNISQISTDFLKTSHVRGPCGVEELSCSGRDTKIQSLLSLSESSTDEEEEDFLNKQHVITLPWSKST

SEQ ID NO: 7523 - protein, 252 aa, Homo sapiens
MQLPPALCARLAAGPGAAEPLPVERDPAAGAAPFRFVARPVRFPREHQFFEDGDVQRHLYLQDVIMQVADVPEKPRVPAFACQVAGCCQVFDALDDYEHHYHTLHGNVCSFCKRAFPSGHLLDAHILEWHDSLFQILSERQDMYQCLVEGCTEKFKTSRDRKDHMVRMHLYPADFRFDKPKKSRSPASAEAPGDSGERSEGEAMEICSEPVAASPAPAGERRIYRHRIPSTICFGQGAARGFKSNKKKTKQC

SEQ ID NO: 7524 - protein, 262 aa, Homo sapiens
MQLPPALCARLAAGPGAAEPLPVERDPAAGAAPFRFVARPVRFPREHQFFEDGDVQRHLYLQDVIMQVADVPEKPRVPAFACQVAGCCQVFDALDDYEHHYHTLHGNVCSFCKRAFPSGHLLDAHILEWHDSLFQILSERQDMYQCLVEGCTEKFKTSRDRKDHMVRMHLYPADFRFDKPKKSRSPASAEAPGDSGERSEGEAMEICSEPVAASPAPAGERRIYRHRSVSELFLKPVLNMCSVLRILGCTWAAALLILNSER

SEQ ID NO: 7525 - protein, 458 aa, Homo sapiens
MAAMPLKAQYQEMVTFEDVAVHFTKTEWTGLSPAQRALYRSVMLENFGNLTALGYPVPKPALISLLERGDMAWGLEAQDDPPAERTKNVCKDVETNIDSESTLIQGISEERDGMMSHGQLKSVPQRTDFPETRNVEKHQDIPTVKNIQGKVPRIPCARKPFICEECGKSFSYFSYYARHQRIHTGEKPFECSECGKAFNGNSSLIRHQRIHTGERPYQCEECGRAFNDNANLIRHQRIHSGDRPYYCTECGNSFTSSSEFVIHQRIHTGEKPYECNECGKAFVGNSPLLRHQKIHTGEKPYECNECGKSFGRTSHLSQHQRIHTGEKPYSCKVCGQAFNFHTKLTRHQRIHSEEKPFDCVDCGKAFSAQEQLKRHLRIHTQESSYVCDECGKALTSKRNLHQHQRIHTGEKPYECSKYEKAFGTSSQLGHLEHVYSGEKPVLDICRFGLPEFFTPFYW

SEQ ID NO: 7526 - protein, 446 aa, Homo sapiens
MVTFEDVAVHFTKTEWTGLSPAQRALYRSVMLENFGNLTALGYPVPKPALISLLERGDMAWGLEAQDDPPAERTKNVCKDVETNIDSESTLIQGISEERDGMMSHGQLKSVPQRTDFPETRNVEKHQDIPTVKNIQGKVPRIPCARKPFICEECGKSFSYFSYYARHQRIHTGEKPFECSECGKAFNGNSSLIRHQRIHTGERPYQCEECGRAFNDNANLIRHQRIHSGDRPYYCTECGNSFTSSSEFVIHQRIHTGEKPYECNECGKAFVGNSPLLRHQKIHTGEKPYECNECGKSFGRTSHLSQHQRIHTGEKPYSCKVCGQAFNFHTKLTRHQRIHSEEKPFDCVDCGKAFSAQEQLKRHLRIHTQESSYVCDECGKALTSKRNLHQHQRIHTGEKPYECSKYEKAFGTSSQLGHLEHVYSGEKPVLDICRFGLPEFFTPFYW

SEQ ID NO: 7527 - protein, 967 aa, Homo sapiens
MAVALDSQIDAPLEVEGCLIMKVEKDPEWASEPILEGSDSSETFRKCFRQFCYEDVTGPHEAFSKLWELCCRWLKPEMRSKEQILELLVIEQFLTILPEKIQAWAQKQCPQSGEEAVALVVHLEKETGRLRQQVSSPVHREKHSPLGAAWEVADFQPEQVETQPRAVSREEPGSLHSGHQEQLNRKRERRPLPKNARPSPWVPALADEWNTLDQEVTTTRLPAGSQEPVKDVHVARGFSYRKSVHQIPAQRDLYRDFRKENVGNVVSLGSAVSTSNKITRLEQRKEPWTLGLHSSNKRSILRSNYVKEKSVHAIQVPARSAGKTWREQQQWGLEDEKIAGVHWSYEETKTFLAILKESRFYETLQACPRNSQVYGAVAEWLRECGFLRTPEQCRTKFKSLQKSYRKVRNGHMLEPCAFFEDMDALLNPAARAPSTDKPKEMIPVPRLKRIAISAKEHISLVEEEEAAEDSDDDEIGIEFIRKSEIHGAPVLFQNLSGVHWGYEETKTFLDILRETRFYEALQACHRKSKLYGAVAEQLRECGFLRTPEQCRTKFKSLQKSYRKVKNGHVLESCAFYKEMDALINSRASAPSPSTPEEVPSPSRQERGGIEVEPQEPTGWEPEETSQEAVIEDSCSERMSEEEIVQEPEFQGPPGLLQSPNDFEIGSSIKEDPTQIVYKDMEQHRALIEKSKRVVSQSTDPSKYRKRECISGRQWENLQGIRQGKPMSQPRDLGKAVVHQRPFVGKRPYRLLKYGESFGRSTRLMCRMTHHKENPYKCGVCGKCFGRSRSLIRHQRIHTGEKPFKCLDCGKSFNDSSNFGAHQRIHTGEKPYRCGECGKCFSQSSSLIIHQRTHTGEKPYQCGECGKSFTNSSHFSAHRRVHTGENPYKCVDCEKSFNNCTRFREHRRIHTGEKPYGCAQCGKRFSKSSVLTKHREVHVREKPLPHPPSLYCPENPHKGKTDEFRKTF

SEQ ID NO: 7528 - protein, 505 aa, Homo sapiens
MAVALDSQIDAPLEVEGCLIMKVEKDPEWASEPILEGSDSSETFRKCFRQFCYEDVTGPHEAFSKLWELCCRWLKPEMRSKEQILELLVIEQFLTILPEKIQAWAQKQCPQSGEEAVALVVHLEKETGRLRQQVSSPVHREKHSPLGAAWEVADFQPEQVETQPRAVSREEPGSLHSGHQEQLNRKRERRPLPKNARPSPWVPALADEWNTLDQEVTTTRLPAGSQEPVKDVHVARGFSYRKSVHQIPAQRDLYRDFRKENVGNVVSLGSAVSTSNKITRLEQRKEPWTLGLHSSNKRSILRSNYVKEKSVHAIQVPARSAGKTWREQQQWGLEDEKIAGVHWSYEETKTFLAILKESRFYETLQACPRNSQVYGAVAEWLRECGFLRTPEQCRTKFKSLQKSYRKVRNGHMLEPCAFFEDMDALLNPAARAPSTDKPKEMIPVPRLKRIAISAKEHISLVEEEEAAEDSDDDEIGIEFIRKSEIHGAPVLFQNLSGKNCALFLW

SEQ ID NO: 7529 - protein, 627 aa, Homo sapiens
MIVFGGEDRSDLFLPDSQTNEERKQYDSVAFEDVAVNFTQEEWALLGPSQKSLYRDVMWETIRNLDCIGMKWEDTNIEDQHRNPRRSLRCHIIERFSESRQPDSTVNEKPPGVDPCKSSVCGEIMGCSFLNCYITFDAGHKPDECQEYGEKPHTHKQCGTAFNYHHSFQTQERPHTGKKRYDCKECGKTFSSSGNLRRHIIVQRGGGPYICKLCGKAFFWPSLFRMHERTHTGEKPYECKQCCKAFPIYSSYLRHERTHTGEKPYECKHCSKAFPDYSSYVRHERTHTGEKPYKCKRCGRAFSVSSSLRIHERTHTGEKPYECKQCGKAFHHLGSFQRHMIRHTGDGPHKCKICGKGFDCPSSLQSHERTHTGEKPYECKQCGKALSHHSSFRSHMIMHTGDGPHKCKVCGKAFIYPSVFQGHERTHTGEKPYECKECGKAFRISSSLRRHETTHTGEKPYKCKCGKAFIDFYSFQNHETTHTGEKPYECKECGKAFSCFTYLSQHRRTHMAEKPYECKTCKKAFSHFGNLKVHERIHTGEKPYECKECRKAFSWLTCLLRHERIHTGKKSYECQQCGKAFTRSRFLRGHEKTHTGEKMHECKECGKALSSLSSLHRHKRTHWRDTL

SEQ ID NO: 7530 - protein, 558 aa, Homo sapiens
MKWEDTNIEDQHRNPRRSLRCHIIERFSESRQPDSTVNEKPPGVDPCKSSVCGEIMGCSFLNCYITFDAGHKPDECQEYGEKPHTHKQCGTAFNYHHSFQTQERPHTGKKRYDCKECGKTFSSSGNLRRHIIVQRGGGPYICKLCGKAFFWPSLFRMHERTHTGEKPYECKQCCKAFPIYSSYLRHERTHTGEKPYECKHCSKAFPDYSSYVRHERTHTGEKPYKCKRCGRAFSVSSSLRIHERTHTGEKPYECKQCGKAFHHLGSFQRHMIRHTGDGPHKCKICGKGFDCPSSLQSHERTHTGEKPYECKQCGKALSHHSSFRSHMIMHTGDGPHKCKVCGKAFIYPSVFQGHERTHTGEKPYECKECGKAFRISSSLRRHETTHTGEKPYKCKCGKAFIDFYSFQNHETTHTGEKPYECKECGKAFSCFTYLSQHRRTHMAEKPYECKTCKKAFSHFGNLKVHERIHTGEKPYECKECRKAFSWLTCLLRHERIHTGKKSYECQQCGKAFTRSRFLRGHEKTHTGEKMHECKECGKALSSLSSLHRHKRTHWRDTL

SEQ ID NO: 7531 - protein, 904 aa, Homo sapiens
MAAAGGAEGRRAALEAAAAAAPERGGGSCVLCCGDLEATALGRCDHPVCYRCSTKMRVLCEQRYCAVCREELRQVVFGKKLPAFATIPIHQLQHEKKYDIYFADGKVYALYRQLLQHECPRCPELPPFSLFGDLEQHMRRQHELFCCRLCLQHLQIFTYERKWYSRKDLARHRMQGDPDDTSHRGHPLCKFCDERYLDNDELLKHLRRDHYFCHFCDSDGAQDYYSDYAYLREHFREKHFLCEEGRCSTEQFTHAFRTEIDLKAHRTACHSRSRAEARQNRHIDLQFSYAPRHSRRNEGVVGGEDYEEVDRYSRQGRVARAGTRGAQQSRRGSWRYKREEEDREVAAAVRASVAAQQQEEARRSEDQEEGGRPKKEEAAARGPEDPRGPRRSPRTQGEGPGPKETSTNGPVSQEAFSVTGPAAPGCVGVPGALPPPSPKLKDEDFPSLSASTSSSCSTAATPGPVGLALPYAIPARGRSAFQEEDFPALVSSVPKPGTAPTSLVSAWNSSSSSKKVAQPPLSAQATGSGQPTRKAGKGSRGGRKGGPPFTQEEEEDGGPALQELLSTRPTGSVSSTLGLASIQPSKVGKKKKVGSEKPGTTLPQPPPATCPPGALQAPEAPASRAEGPVAVVVNGHTEGPAPARSAPKEPPGLPRPLGSFPCPTPQEDFPALGGPCPPRMPPPPGFSAVVLLKGTPPPPPPGLVPPISKPPPGFSGLLPSPHPACVPSPATTTTTKAPRLLPAPRAYLVPENFRERNLQLIQSIRDFLQSDEARFSEFKSHSGEFRQGLISAAQYYKSCRDLLGENFQKVFNELLVLLPDTAKQQELLSAHTDFCNREKPLSTKSKKNKKSAWQATTQQAGLDCRVCPTCQQVLAHGDASSHQALHAARDDDFPSLQAIARIIT

SEQ ID NO: 7532 - protein, 896 aa, Homo sapiens
MAAAGGAEGRRAALEAAAAAAPERGGGSCVLCCGDLEATALGRCDHPVCYRCSTKMRVLCEQRYCAVCREELRQVVFGKKLPAFATIPIHQLQHEKKYDIYFADGKVYALYRQLLQHECPRCPELPPFSLFGDLEQHMRRQHELFCCRLCLQHLQIFTYERKWYSRKDLARHRMQGDPDDTSHRGHPLCKFCDERYLDNDELLKHLRRDHYFCHFCDSDGAQDYYSDYAYLREHFREKHFLCEEGRCSTEQFTHAFRTEIDLKAHRTACHSRSRAEARQNRHIDLQFSYAPRHSRRNEGVVGGEDYEEVDRYSRQGRVARAGTRGAQQSRRGSWREEEDREVAAAVRASVAAQQQEEARRSEDQEEGGRPKKEEAAARGPEDPRGPRRSPRTQGEGPGPKETSTNGPVSQEAFSVTGPAAPGALPPPSPKLKDEDFPSLSASTSSSCSTAATPGPVGLALPYAIPARGRSAFQEEDFPALVSSVPKPGTAPTSLVSAWNSSSSSKKVAQPPLSAQATGSGQPTRKAGKGSRGGRKGGPPFTQEEEEEDGGPALQELLSTRPTGSVSSTLGLASIQPSKVGKKKKVGSEKPGTTLPQPPPATCPPGALQAPEAPASRAEGPVAVVVNGHTEGPAPARSAPKEPPGLPRPLGSFPCPTPQEDFPALGGPCPPRMPPPPGFSAVVLLKGTPPPPPPGLVPPISKPPPGFSGLLPSPHPACVPSPATTTTTKAPRLLPAPRAYLVPENFRERNLQLIQSIRDFLQSDEARFSEFKSHSGEFRQGLISAAQYYKSCRDLLGENFQKVFNELLVLLPDTAKQQELLSAHTDFCNREKPLSTKSKKNKKSAWQATTQQAGLDCRVCPTCQQVLAHGDASSHQALHAARDDDFPSLQAIARIIT

SEQ ID NO: 7533 - protein, 898 aa, Homo sapiens
MAAAGGAEGRRAALEAAAAAAPERGGGSCVLCCGDLEATALGRCDHPVCYRCSTKMRVLCEQRYCAVCREELRQVVFGKKLPAFATIPIHQLQHEKKYDIYFADGKVYALYRQLLQHECPRCPELPPFSLFGDLEQHMRRQHELFCCRLCLQHLQIFTYERKWYSRKDLARHRMQGDPDDTSHRGHPLCKFCDERYLDNDELLKHLRRDHYFCHFCDSDGAQDYYSDYAYLREHFREKHFLCEEGRCSTEQFTHAFRTEIDLKAHRTACHSRSRAEARQNRHIDLQFSYAPRHSRRNEGVVGGEDYEEVDRYSRQGRVARAGTRGAQQSRRGSWRYKREEEDREVAAAVRASVAAQQQEEARRSEDQEEGGRPKKEEAAARGPEDPRGPRRSPRTQGEGPGPKETSTNGPVSQEAFSVTGPAAPGALPPPSPKLKDEDFPSLSASTSSSCSTAATPGPVGLALPYAIPARGRSAFQEEDFPALVSSVPKPGTAPTSLVSAWNSSSSSKKVAQPPLSAQATGSGQPTRKAGKGSRGGRKGGPPFTQEEEEDGGPALQELLSTRPTGSVSSTLGLASIQPSKVGKKKKVGSEKPGTTLPQPPPATCPPGALQAPEAPASRAEGPVAVVVNGHTEGPAPARSAPKEPPGLPRPLGSFPCPTPQEDFPALGGPCPPRMPPPPGFSAVVLLKGTPPPPPPGLVPPISKPPPGFSGLLPSPHPACVPSPATTTTTKAPRLLPAPRAYLVPENFRERNLQLIQSIRDFLQSDEARFSEFKSHSGEFRQGLISAAQYYKSCRDLLGENFQKVFNELLVLLPDTAKQQELLSAHTDFCNREKPLSTKSKKNKKSAWQATTQQAGLDCRVCPTCQQVLAHGDASSHQALHAARDDDFPSLQAIARIIT

SEQ ID NO: 7534 - protein, 341 aa, Homo sapiens
MVGGCGQPQVGAGRAGMEPRGLIAVDQLCFPAPSALPPPSPKLKDEDFPSLSASTSSSCSTAATPGPVGLALPYAIPARGRSAFQEEDFPALVSSVPKPGTAPTSLVSAWNSSSSSKKVAQPPLSAQATGSGQPTRKAGKGSRGGRKGGPPFTQEEEEEDGGPALQELLSTRPTGSVSSTLGLASIQPSKVGKKKKVGSEKPGTTLPQPPPATCPPGALQAPEAPASRAEGPVAVVVNGHTEGPAPARSAPKEPPGLPRPLGSFPCPTPQEDFPALGGPCPPRMPPPPGFSAVVLLKGTPPPPPPGLVPPISKPPPGFSGLLPSPHPACVPSPATTTTTKA

SEQ ID NO: 7535 - protein, 569 aa, Homo sapiens
MSKDLVTFGDVAVNFSQEEWEWLNPAQRNLYRKVMLENYRSLVSLGVSVSKPDVISLLEQGKEPWMVKKEGTRGPCPDWEYVFKNSEFSSKQETYEESSKVVTVGARHLSYSLDYPSLREDCQSEDWYKNQLGSQEVHLSQLIITHKEILPEVQNKEYNKSWQTFHQDTIFDIQQSFPTKEKAHKHEPQKKSYRKKSVEMKHRKVYVEKKLLKCNDCEKVFNQSSSLTLHQRIHTGEKPYACVECGKTFSQSANLAQHKRIHTGEKPYECKECRKAFSQNAHLAQHQRVHTGEKPYQCKECKKAFSQIAHLTQHQRVHTGERPFECIECGKAFSNGSFLAQHQRIHTGEKPYVCNVCGKAFSHRGYLIVHQRIHTGERPYECKECRKAFSQYAHLAQHQRVHTGEKPYECKVCRKAFSQIAYLDQHQRVHTGEKPYECIECGKAFSNSSSLAQHQRSHTGEKPYMCKECRKTFSQNAGLAQHQRIHTGEKPYECNVCGKAFSYSGSLTLHQRIHTGERPYECKDCRKSFRQRAHLAHHERIHTMESFLTLSSPSPSTSNQLPRPVGFIS

SEQ ID NO: 7536 - protein, 617 aa, Homo sapiens
MIKSQESLTLEDVAVEFTWEEWQLLGPAQKDLYRDVMLENYSNLVSVGYQASKPDALFKLEQGEPWTVENEIHSQICPEIKKVDNHLQMHSQKQRCLKRVEQCHKHNAFGNIIHQRKSDFPLRQNHDTFDLHGKILKSNLSLVNQNKRYEIKNSVGVNGDGKSFLHAKHEQFHNEMNFPEGGNSVNTNSQFIKHQRTQNIDKPHVCTECGKAFLKKSRLIYHQRVHTGEKPHGCSICGKAFSRKSGLTEHQRNHTGEKPYECTECDKAFRWKSQLNAHQKIHTGEKSYICSDCGKGFIKKSRLINHQRVHTGEKPHGCSLCGKAFSKRSRLTEHQRTHTGEKPYECTECDKAFRWKSQLNAHQKAHTGEKSYICRDCGKGFIQKGNLIVHQRIHTGEKPYICNECGKGFIQKGNLLIHRRTHTGEKPYVCNECGKGFSQKTCLISHQRFHTGKTPFVCTECGKSCSHKSGLINHQRIHTGEKPYTCSDCGKAFRDKSCLNRHRRTHTGERPYGCSDCGKAFSHLSCLVYHKGMLHAREKCVGSVKLENPCSESHSLSHTRDLIQDKDSVNMVTLQMPSVAAQTSLTNSAFQAESKVAIVSQPVARSSVSADSRICTE

SEQ ID NO: 7537 - protein, 581 aa, Homo sapiens
MLENYSNLVSVGYQASKPDALFKLEQGEPWTVENEIHSQICPEIKKVDNHLQMHSQKQRCLKRVEQCHKHNAFGNIIHQRKSDFPLRQNHDTFDLHGKILKSNLSLVNQNKRYEIKNSVGVNGDGKSFLHAKHEQFHNEMNFPEGGNSVNTNSQFIKHQRTQNIDKPHVCTECGKAFLKKSRLIYHQRVHTGEKPHGCSICGKAFSRKSGLTEHQRNHTGEKPYECTECDKAFRWKSQLNAHQKIHTGEKSYICSDCGKGFIKKSRLINHQRVHTGEKPHGCSLCGKAFSKRSRLTEHQRTHTGEKPYECTECDKAFRWKSQLNAHQKAHTGEKSYICRDCGKGFIQKGNLIVHQRIHTGEKPYICNECGKGFIQKGNLLIHRRTHTGEKPYVCNECGKGFSQKTCLISHQRFHTGKTPFVCTECGKSCSHKSGLINHQRIHTGEKPYTCSDCGKAFRDKSCLNRHRRTHTGERPYGCSDCGKAFSHLSCLVYHKGMLHAREKCVGSVKLENPCSESHSLSHTRDLIQDKDSVNMVTLQMPSVAAQTSLTNSAFQAESKVAIVSQPVARSSVSADSRICTE

SEQ ID NO: 7538 - protein, 1832 aa, Homo sapiens
MEDTPPSLSCSDCQRHFPSLPELSRHRELLHPSPNQDSEEADSIPRPYRCQQCGRGYRHPGSLVNHRRTHETGLFPCTTCGKDFSNPMALKSHMRTHAPEGRRRHRPPRPKEATPHLQGETVSTDSWGQRLGSSEGWENQTKHTEETPDCESVPDPRAASGTWEDLPTRQREGLASHPGPEDGADGWGPSTNSARAPPLPIPASSLLSNLEQYLAESVVNFTGGQEPTQSPPAEEERRYKCSQCGKTYKHAGSLTNHRQSHTLGIYPCAICFKEFSNLMALKNHSRLHAQYRPYHCPHCPRVFRLPRELLEHQQSHEGERQEPRWEEKGMPTTNGHTDESSQDQLPSAQMLNGSAELSTSGELEDSGLEEYRPFRCGDCGRTYRHAGSLINHRKSHQTGVYPCSLCSKQLFNAAALKNHVRAHHRPRQGVGENGQPSVPPAPLLLAETTHKEEEDPTTTLDHRPYKCSECGRAYRHRGSLVNHRHSHRTGEYQCSLCPRKYPNLMALRNHVRVHCKAARRSADIGAEGAPSHLKVELPPDPVEAEAAPHTDQDHVCKHEEEATDITPAADKTAAHICSICGLLFEDAESLERHGLTHGAGEKENSRTETTMSPPRAFACRDCGKSYRHSGSLINHRQTHQTGDFSCGACAKHFHTMAAMKNHLRRHSRRRSRRHRKRAGGASGGREAKLLAAESWTRELEDNEGLESPQDPSGESPHGAEGNLESDGDCLQAESEGDKCGLERDETHFQGDKESGGTGEGLERKDASLLDNLDIPGEEGGGTHFCDSLTGVDEDQKPATGQPNSSSHSANAVTGWQAGAAHTCSDCGHSFPHATGLLSHRPCHPPGIYQCSLCPKEFDSLPALRSHFQNHRPGEATSAQPFLCCLCGMIFPGRAGYRLHRRQAHSSSGMTEGSEEEGEEEGVAEAAPARSPPLQLSEAELLNQLQREVEALDSAGYGHICGCCGQTYDDLGSLERHHQSQSSGTTADKAPSPLGVAGDAMEMVVDSVLEDIVNSVSGEGGDAKSQEGAGTPLGDSLCIQGGESLLEAQPRPFRCNQCGKTYRHGGSLVNHRKIHQTGDFLCPVCSRCYPNLAAYRNHLRNHPRCKGSEPQVGPIPEAAGSSELQVGPIPEGGSNKPQHMAEEGPGQAEVEKLQEELKVEPLEEVARVKEEVWEETTVKGEEIEPRLETAEKGCQTEASSERPFSCEVCGRSYKHAGSLINHRQSHQTGHFGCQACSKGFSNLMSLKNHRRIHADPRRFRCSECGKAFRLRKQLASHQRVHMERRGGGGTRKATREDRPFRCGQCGRTYRHAGSLLNHRRSHETGQYSCPTCPKTYSNRMALKDHQRLHSENRRRRAGRSRRTAVRCALCGRSFPGRGSLERHLREHEETEREPANGQGGLDGTAASEANLTGSQGLETQLGGAEPVPHLEDGVPRPGERSQSPIRAASSEAPEPLSWGAGKAGGWPVGGGLGNHSGGWVPQFLTRSEEPEDSVHRSPCHAGDCQLNGPTLSHMDSWDNRDNSSQLQPGSHSSCSQCGKTYCQSGSLLNHNTNKTDRHYCLLCSKEFLNPVATKSHSHNHIDAQTFACPDCGKAFESHQELASHLQAHARGHSQVPAQMEEARDPKAGTGEDQVVLPGQGKAQEAPSETPRGPGESVERARGGQAVTSMAAEDKERPFRCTQCGRSYRHAGSLLNHQKAHTTGLYPCSLCPKLLPNLLSLKNHSRTHTDPKRHCCSICGKAFRTAARLEGHGRVHAPREGPFTCPHCPRHFRRRISFVQHQQQHQEEWTVAGSGAPVAPVTGRGDLPLPPPPTPTTPLLDPSPQWPADLSFSL

SEQ ID NO: 7539 - protein, 1829 aa, Homo sapiens
MEDTPPSLSCSDCQRHFPSLPELSRHRELLHPSPNQDSEEADSIPRPYRCQQCGRGYRHPGSLVNHRRTHETGLFPCTTCGKDFSNPMALKSHMRTHAPEGRRRHRPPRPKEATPHLQGETVSTDSWGQRLGSSEGWENQTKHTEETPDCESVPDPRAASGTWEDLPTRQREGLASHPGPEDGADGWGPSTNSARAPPLPIPASSLLSNLEQYLAESVVNFTGGQEPTQSPPAEEERRYKCSQCGKTYKHAGSLTNHRQSHTLGIYPCAICFKEFSNLMALKNHSRLHAQYRPYHCPHCPRVFRLPRELLEHQQSHEGERQEPRWEEKGMPTTNGHTDESSQDQLPSAQMLNGSAELSTSGELEDSGLEEYRPFRCGDCGRTYRHAGSLINHRKSHQTGVYPCSLCSKQLFNAAALKNHVRAHHRPRQGVGENGQPSVPPAPLLLAETTHKEEEDPTTTLDHRPYKCSECGRAYRHRGSLVNHRHSHRTGEYQCSLCPRKYPNLMALRNHVRVHCKAARRSADIGAEGAPSHLKVELPPDPVEAEAAPHTDQDHVCKHEEEATDITPAADKTAAHICSICGLLFEDAESLERHGLTHGAGEKENSRTETTMSPPRAFACRDCGKSYRHSGSLINHRQTHQTGDFSCGACAKHFHTMAAMKNHLRRHSRRRSRRHRKRAGGASGGREAKLLAAESWTRELEDNEGLESPQDPSGESPHGAEGNLESDGDCLQAESEGDKCGLERDETHFQGDKESGGTGEGLERKDASLLDNLDIPGEEGGGTHFCDSLTGVDEDQKPATGQPNSSSHSANAVTGWQAGAAHTCSDCGHSFPHATGLLSHRPCHPPGIYQCSLCPKEFDSLPALRSHFQNHRPGEATSAQPFLCCLCGMIFPGRAGYRLHRRQAHSSSGMTEGSEEEGEEEGVAEAAPARSPPLQLSEAELLNQLQREVEALDSAGYGHICGCCGQTYDDLGSLERHHQSQSSGTTADKAPSPLGVAGDAMEMVVDSVLEDIVNSVSGEGGDAKSQEGAGTPLGDSLCIQGGESLLEAQPRPFRCNQCGKTYRHGGSLVNHRKIHQTGDFLCPVCSRCYPNLAAYRNHLRNHPRCKGSEPQVGPIPEAAGSSELQVGPIPEGGSNKPQHMAEEGPGQAEVEKLQEELKVEPLEEVARVKEEVWEETTVKGEEIEPRLETAEKGCQTEASSERPFSCEVCGRSYKHAGSLINHRQSHQTGHFGCQACSKGFSNLMSLKNHRRIHADPRRFRCSECGKAFRLRKQLASHQRVHMERRGGGGTRKATREDRPFRCGQCGRTYRHAGSLLNHRRSHETGQYSCPTCPKTYSNRMALKDHQRLHSENRRRRAGRSRRTAVRCALCGRSFPGRGSLERHLREHEETEREPANGQGGLDGTAASEANLTGSQGLETQLGGAEPVPHLEDGVPRPGERSQSPIRAASSEAPEPLSWGAGKAGGWPVGGGLGNHSGGWVPQFLTRSEEPEDSVHRSPCHAGDCQLNGPTLSHMDSWDNRDNSSQLQPGSHSSCSQCGKTYCQSGSLLNHNTNKTDRHYCLLCSKEFLNPVATKSHSHNHIDAQTFACPDCGKAFESHQELASHLQAHARGHSQVPAQMEEARDPKAGTGEDQVVLPGQGKAQEAPSETPRGPGESVERARGGQAVTSMAAEDKERPFRCTQCGRSYRHAGSLLNHQKAHTTGLYPCSLCPKLLPNLLSLKNHSRTHTDPKRHCCSICGKAFRTAARLEGHGRVHAPREGPFTCPHCPRHFRRRISFVQHQQQHQEEWTVAGSGRGHEGSQEEVGTQWRGKSSPKVGGGARSERREPRGF

SEQ ID NO: 7540 - protein, 744 aa, Homo sapiens
MPEDQAGAAMEEASPYSLLDICLNFLTTHLEKFCSARQDGTLCLQEPGVFPQEVADRLLRTMAFHGLLNDGTVGIFRGNQMRLKRACIRKAKISAVAFRKAFCHHKLVELDATGVNADITITDIISGLGSNKWIQQNLQCLVLNSLTLSLEDPYERCFSRLSGLRALSITNVLFYNEDLAEVASLPRLESLDISNTSITDITALLACKDRLKSLTMHHLKCLKMTTTQILDVVRELKHLNHLDISDDKQFTSDIALRLLEQKDILPNLVSLDVSGRKHVTDKAVEAFIQQRPSMQFVGLLATDAGYSEFLTGEGHLKVSGEANETQIAEALKRYSERAFFVREALFHLFSLTHVMEKTKPEILKLVVTGMRNHPMNLPVQLAASACVFNLTKQDLAAGMPVRLLADVTHLLLKAMEHFPNHQQLQKNCLLSLCSDRILQDVPFNRFEAAKLVMQWLCNHEDQNMQRMAVAIISILAAKLSTEQTAQLGTELFIVRQLLQIVKQKTNQNSVDTTLKFTLSALWNLTDESPTTCRHFIENQGLELFMRVLESFPTESSIQQKVLGLLNNIAEVQELHSELMWKDFIDHISSLLHSVEVEVSYFAAGIIAHLISRGEQAWTLSRSQRNSLLDDLHSAILKWPTPECEMVAYRSFNPFFPLLGCFTTPGVQLWAVWAMQHVCSKNPSRYCSMLIEEGGLQHLYNIKDHEHTDPHVQQIAVAILDSLEKHIVRHGRPPPCKKQPQARLN

SEQ ID NO: 7541 - protein, 166 aa, Homo sapiens
MWKDFIDHISSLLHSVEVEVSYFAAGIIAHLISRGEQAWTLSRSQRNSLLDDLHSAILKWPTPECEMVAYRSFNPFFPLLGCFTTPGVQLWAVWAMQHVCSKNPSRYCSMLIEEGGLQHLYNIKDHEHTDPHVQQIAVAILDSLEKHIVRHGRPPPCKKQPQARLN

SEQ ID NO: 7542 - protein, 83 aa, Homo sapiens
MQNDAGEFVDLYVPRKCSASNRIIGAKDHASIQMNVAEVDKVTGRFNGQFKTYAICGAIRRMGESDDSILRLAKADGIVSKNF

SEQ ID NO: 7543 - protein, 243 aa, Homo sapiens
MQFRLFSFALIILNCMDYSHCQGNRWRRSKRASYVSNPICKGCLSCSKDNGCSRCQQKLFFFLRREGMRQYGECLHSCPSGYYGHRAPDMNRCARCRIENCDSCFSKDFCTKCKVGFYLHRGRCFDECPDGFAPLEETMECVEGCEVGHWSEWGTCSRNNRTCGFKWGLETRTRQIVKKPVKDTILCPTIAESRRCKMTMRHCPGGKRTPKAKEKRNKKKKRKLIERAQEQHSVFLATDRANQ

SEQ ID NO: 7544 - protein, 176 aa, Homo sapiens
MRQYGECLHSCPSGYYGHRAPDMNRCARCRIENCDSCFSKDFCTKCKVGFYLHRGRCFDECPDGFAPLEETMECVEGCEVGHWSEWGTCSRNNRTCGFKWGLETRTRQIVKKPVKDTILCPTIAESRRCKMTMRHCPGGKRTPKAKEKRNKKKKRKLIERAQEQHSVFLATDRANQ

SEQ ID NO: 7545 - protein, 179 aa, Homo sapiens
MQFRLFSFALIILNCMDYSHCQGNRWRRSKRGCRIENCDSCFSKDFCTKCKVGFYLHRGRCFDECPDGFAPLEETMECVGCEVGHWSEWGTCSRNNRTCGFKWGLETRTRQIVKKPVKDTILCPTIAESRRCKMTMRHCPGGKRTPKAKEKRNKKKKRKLIERAQEQHSVFLATDRANQ

SEQ ID NO: 7546 - protein, 334 aa, Homo sapiens
MGRRSSDTEEESRSKRKKKHRRRSSSSSSSDSRTYSRKKGGRKSRSKSRSWSRDLQPRSHSYDRRRRHRSSSSSSYGSRRKRSRSRSRGRGKSYRVQRSRSKSRTRRSRSRPRLRSHSRSSERSSHRRTRSRSRDRERRKGRDKEKREKEKDKGKDKELHNIKRGESGNIKAGLEHLPPAEQAKARLQLVLEAAAKADEALKAKERNEEEAKRRKEEDQATLVEQVKRVKEIEAIESDSFVQQTFRSSKEVKKSVEPSEVKQATSTSGPASAVADPPSTEKEIDPTSIPTAIKYQDDNSLAHPNLFIEKADAEEKWFKRLIALRQERLMGSPVA

SEQ ID NO: 7547 - protein, 276 aa, Homo sapiens
MGRRSSDTEEESRSKRKKKHRRRSSSSSSSDSRTYSRKKGGRKSRSKSRSWSRDLQPRSHSYDRRRRHRSSSSSSYGSRRKRSRSRSRGRGKSYRVQRSRSKSRTRRESGNIKAGLEHLPPAEQAKARLQLVLEAAAKADEALKAKERNEEEAKRRKEEDQATLVEQVKRVKEIEAIESDSFVQQTFRSSKEVKKSVEPSEVKQATSTSGPASAVADPPSTEKEIDPTSIPTAIKYQDDNSLAHPNLFIEKADAEEKWFKRLIALRQERLMGSPVA

SEQ ID NO: 7548 - protein, 76 aa, Homo sapiens
MSKAHPPELKKFMDKKLSLKLNGGRHVQGILRGFDPFMNLVIDECVEMATSGQQNNIGMVVIRGNSIIMLEALERV

SEQ ID NO: 7549 - protein, 1516 aa, Homo sapiens
MDSPPKLTGETLIVHHIPLVHCQVPDRQCCGGAGGGGGSTRPNPFCPPELGITQPDQDLGQADSLLFSSLHSTPGGTARSIDSTKSRSRDGRGPGAPKRHNPFLLQEGVGEPGLGDLYDDSIGDSATQQSFHLHGTGQPNFHLSSFQLPPSGPRVGRPWGTTRSRAGVVEGQEQEPVMTLDTQQCGTSHCCRPELEAETMELDECGGPGGSGSGGGASDTSGFSFDQEWKLSSDESPRNPGCSGSGDQHCRCSSTSSQSEAADQSMGYVSDSSCNSSDGVLVTFSTLYNKMHGTPRANLNSAPQSCSDSSFCSHSDPGAFYLDLQPSPFESKMSYESHHPESGGREGGYGCPHASSPELDANCNSYRPHCEPCPAVADLTACFQSQARLVVATQNYYKLVTCDLSSQSSPSPAGSSITSCSEEHTKISPPPGPGPDPGPSQPSEYYLFQKPEVQPEEQEAVSSSTQAAAAVGPTVLEGQVYTNTSPPNLSTGRQRSRSYDRSLQRSPPVRLGSLERMLSCPVRLSEGPAAMAGPGSPPRRVTSFAELAKGRKKTGGSGSPPLRVSVGDSSQEFSPIQEAQQDRGAPLDEGTCCSHSLPPMPLGPGMDLLGPDPSPPWSTQVCQGPHSSEMPPAGLRATGQGPLAQLMDPGPALPGSPANSHTQRDARARADGGGTESRPVLRYSKEQRPTTLPIQPFVFQHHFPKQLAKARALHSLSQLYSLSGCSRTQQPAPLAAPAAQVSVPAPSGEPQASTPRATGRGARKAGSEPETSRPSPLGSYSPIRSVGPFGPSTDSSASTSCSPPPEQPTATESLPPWSHSCPSAVRPATSQQPQKEDQKILTLTEYRLHGTGSLPPLGSWRSGLSRAESLARGGGEGSMATRPSNANHLSPQALKWREYRRKNPLGPPGLSGSLDRRSQEARLARRNPIFEFPGSLSAASHLNCRLNGQAVKPLPLTCPDFQDPFSLTEKPPAEFCLSPDGSSEAISIDLLQKKGLVKAVNIAVDLIVAHFGTSRDPGVKAKLGNSSVSPNVGHLVLKYLCPAVRAVLEDGLKAFVLDVIIGQRKNMPWSVVEASTQLGPSTKVLHGLYNKVSQFPELTSHTMRFNAFILGLLNIRSLEFWFNHLYNHEDIIQTHYQPWGFLSAAHTVCPGLFEELLLLLQPLALLPFSLDLLFQHRLLQSGQQQRQHKELLRVSQDLLLSAHSTLQLARARGQEGPGDVDRAAQGERVKGVGASEGGEEEEEEEETEEVAEAAGGSGRARWARGGQAGWWYQLMQSSQVYIDGSIEGSRFPRGSSNSSSEKKKGAGGGGPPQAPPPREGVVEGAEACPASEEALGRERGWPFWMGSPPDSVLAELRRSREREGPAASPAENEEGASEPSPGGIKWGHLFGSRKAQREARPTNRLPSDWLSLDKSMFQLVAQTVGSRREPEPKESLQEPHSPALPSSPPCEVQALCHHLATGPGQLSFHKGDILRVLGRAGGDWLRCSRGPDSGLVPLAYVTLTPTPSPTPGSSQN

SEQ ID NO: 7550 - protein, 398 aa, Homo sapiens
MMLKGITRLISRIHKLDPGRFLHMGTQARQSIAAHLDNQVPVESPRAISRTNENDPAKHGDQHEGQHYNISPQDLETVFPHGLPPRFVMQVKTFSEACLMVRKPALELLHYLKNTSFAYPAIRYLLYGEKGTGKTLSLCHVIHFCAKQDWLILHIPDAHLWVKNCRDLLQSSYNKQRFDQPLEASTWLKNFKTTNERFLNQIKVQEKYVWNKRESTEKGSPLGEVVEQGITRVRNATDAVGIVLKELKRQSSLGMFHLLVAVDGINALWGRTTLKREDKSPIAPEELALVHNLRKMMKNDWHGGAIVSALSQTGSLFKPRKAYLPQELLGKEGFDALDPFIPILVSNYNPKEFESCIQYYLENNWLQHEKAPTEEGKKELLFLSNANPSLLERHCAYL

SEQ ID NO: 7551 - protein, 357 aa, Homo sapiens
MMLKGITRLISRIHKAKHGDQHEGQHYNISPQDLETVFPHGLPPRFVMQVKTFSEACLMVRKPALELLHYLKNTSFAYPAIRYLLYGEKGTGKTLSLCHVIHFCAKQDWLILHIPDAHLWVKNCRDLLQSSYNKQRFDQPLEASTWLKNFKTTNERFLNQIKVQEKYVWNKRESTEKGSPLGEVVEQGITRVRNATDAVGIVLKELKRQSSLGMFHLLVAVDGINALWGRTTLKREDKSPIAPEELALVHNLRKMMKNDWHGGAIVSALSQTGSLFKPRKAYLPQELLGKEGFDALDPFIPILVSNYNPKEFESCIQYYLENNWLQHEKAPTEEGKKELLFLSNANPSLLERHCAYL

SEQ ID NO: 7552 - protein, 364 aa, Homo sapiens
MMLKGITRLISRIHKLDPGRFLHMGTQARQSIAAHLDNQVPVESPRAISRTNENDPVKTFSEACLMVRKPALELLHYLKNTSFAYPAIRYLLYGEKGTGKTLSLCHVIHFCAKQDWLILHIPDAHLWVKNCRDLLQSSYNKQRFDQPLEASTWLKNFKTTNERFLNQIKVQEKYVWNKRESTEKGSPLGEVVEQGITRVRNATDAVGIVLKELKRQSSLGMFHLLVAVDGINALWGRTTLKREDKSPIAPEELALVHNLRKMMKNDWHGGAIVSALSQTGSLFKPRKAYLPQELLGKEGFDALDPFIPILVSNYNPKEFESCIQYYLENNWLQHEKAPTEEGKKELLFLSNANPSLLERHCAYL

SEQ ID NO: 7553 - protein, 468 aa, Homo sapiens
MADDAGLETPLCSEQFGSGEARGCRAAADGSLQWEVGGWRWWGLSRAFTVKPEGRDAGEVGASGAPSPPLSGLQAVFLPQGFPDSVSPDYLPYQLWDSVQAFASSLSGSLATQAVLLGIGVGNAKATVSAATATWLVKDSTGMLGRIVFAWWKGSKLDCNAKQWRLFADILNDVAMFLEIMAPVYPICFTMTVSTSNLAKCIVSVAGGATRAALTVHQARRNNMADVSAKDSSQETLVNLAGLLVSLLMLPLVSGCPGFSLGCFFFLTALHIYANYRAVRALVMETLNEGRLRLVLKHYLQRGEVLDPTAANRMEPLWTGFWPAPSLSLGVPLHRLVSSVFELQQLVEGHQESYLLCWDQSQNQVQVVLNQKAGPKTILRAATHGLMLGALQGDGPLPAELEELRNRVRAGPKKESWVVVKETHEVLDMLFPKFLKGLQDAGWKTEKHQLEVDEWRATWLLSPEKKVL

SEQ ID NO: 7554 - protein, 206 aa, Homo sapiens
MCLMGEGRMGRWGSWMTGYRKKGWIWCVWVMAEGERKRGDLSEAWIISVHWVAVQWLVGHACLCCPPPPLHCPLPHSVFELQQLVEGHQESYLLCWDQSQNQVQVVLNQKAGPKTILRAATHGLMLGALQGDGPLPAELEELRNRVRAGPKKESWVVVKETHEVLDMLFPKFLKGLQDAGWKTEKHQLEVDEWRATWLLSPEKKVL

SEQ ID NO: 7555 - protein, 187 aa, Homo sapiens
MAALCRTRAVAAESHFLRVFLFFRPFRGVGTESGSESGSSNAKEPKTRAGGFASALERHSELLQKVEPLQKGSPKNVESFASMLRHSPLTQMGPAKDKLVIGRIFHIVENDLYIDFGGKFHCVCRRPEVDGEKYQKGTRVRLRLLDLELTSRFLGATTDTTVLEANAVLLGIQESKDSRSKEEHHEK

SEQ ID NO: 7556 - protein, 188 aa, Homo sapiens
MSANEDQEMELEALRSIYEGDESFRELSPVSFQYRIGENGDPKAFLIEISWTETYPQTPPILSMNAFFNNTISSAVKQSILAKLQEAVEANLGTAMTYTLFEYAKDNKEQFMENHNPINSATSISNIISIETPNTAPSSKKKDKKEQLSKAQKRKLADKTDHKGELPRGWNWVDVVKHLSKTGSKDDE

SEQ ID NO: 7557 - protein, 93 aa, Homo sapiens
MTYTLFEYAKDNKEQFMENHNPINSATSISNIISIETPNTAPSSKKKDKKEQLSKAQKRKLADKTDHKGELPRGWNWVDVVKHLSKTGSKDDE

SEQ ID NO: 7558 - protein, 473 aa, Homo sapiens
MKRASAGGSRLLAWVLWLQAWQVAAPCPGACVCYNEPKVTTSCPQQGLQAVPVGIPAASQRIFLHGNRISHVPAASFRACRNLTILWLHSNVLARIDAAAFTGLALLEQLDLSDNAQLRSVDPATFHGLGRLHTLHLDRCGLQELGPGLFRGLAALQYLYLQDNALQALPDDTFRDLGNLTHLFLHGNRISSVPERAFRGLHSLDRLLLHQNRVAHVHPHAFRDLGRLMTLYLFANNLSALPTEALAPLRALQYLRLNDNPWVCDCRARPLWAWLQKFRGSSSEVPCSLPQRLAGRDLKRLAANDLQGCAVATGPYHPIWTGRATDEEPLGLPKCCQPDAADKASVLEPGRPASAGNALKGRVPPGDSPPGNGSGPRHINDSPFGTLPGSAEPPLTAVRPEGSEPPGFPTSGPRRRPGCSRKNRTRSHCRLGQAGSGGGGTGDSEGSGALPSLTCSLTPLGLALVLWTVLGPC

SEQ ID NO: 7559 - protein, 296 aa, Homo sapiens
MATSSAALPRILGAGARAPSRWLGFLGKATPRPARPSRRTLGSATALMIRESEDSTDFNDKILNEPLKHSDFFNVKELFSVRSLFDARVHLGHKAGCRHRFMEPYIFGSRLDHDIIDLEQTATHLQLALNFTAHMAYRKGIILFISRNRQFSYLIENMARDCGEYAHTRYFRGGMLTNARLLFGPTVRLPDLIIFLHTLNNIFEPHVAVRDAAKMNIPTVGIVDTNCNPCLITYPVPGNDDSPLAVHLYCRLFQTAITRAKEKRQQVEALYRLQGQKEPGDQGPAHPPGADMSHSL

SEQ ID NO: 7560 - protein, 196 aa, Homo sapiens
MAALKALVSGCGRLLRGLLAGPAATSWSRLPARGFREVVETQEGKTTIIEGRITATPKESPNPPNPSGQCPICRWNLKHKYNYDDVLLLSQFIRPHGGMLPRKITGLCQEEHRKIEECVKMAHRAGLLPNHRPRLPEGVVPKSKPQLNRYLTRWAPGSVKPIYKKGPRWNRVRMPVGSPLLRDNVCYSRTPWKLYH

SEQ ID NO: 7561 - protein, 270 aa, Homo sapiens
MAALKALVSGCGRLLRGLLAGPAATSWSRLPARGFREVVETQEGKTTIIEGRITATPKESPNPPNPSGQCPICRWNLKHKYNYDDVLLLSQFIRPHGGMLPRKITGLCQEEHRKIEECVKMAHRAGRRPWGPRGAEGCRHSLPTQLPHVSAPPGRKVDIRSVNYTHHPMPTFPLPWAFPLAPSELQRELQRLSPLPRHSGLLPNHRPRLPEGVVPKSKPQLNRYLTRWAPGSVKPIYKKGPRWNRVRMPVGSPLLRDNVCYSRTPWKLYH

SEQ ID NO: 7562 - protein, 127 aa, Homo sapiens
MAALKALVSGCGRLLRGLLAGPAATSWSRLPARGFREVVETQEGKTTIIEGRITATPKESPNPPNPSGQCPICRWNLKHKYNYDDVLLLSQFIRPHGGMLPRKITGLCQEEHRKIEECVKMAHRAGT

SEQ ID NO: 7563 - protein, 382 aa, Homo sapiens
MGPTSVPLVKAHRSSVSDYVNYDIIVRHYNYTGKLNISADKENSIKLTSVVFILICCFIILENIFVLLTIWKTKKFHRPMYYFIGNLALSDLLAGVAYTANLLLSGATTYKLTPAQWFLREGSMFVALSASVFSLLAIAIERYITMLKMKLHNGSNNFRLFLLISACWVISLILGGLPIMGWNCISALSSCSTVLPLYHKHYILFCTTVFTLLLLSIVILYCRIYSLVRTRSRRLTFRKNISKASRSSEKSLALLKTVIIVLSVFIACWAPLFILLLLDVGCKVKTCDILFRAEYFLVLAVLNSGTNPIIYTLTNKEMRRAFIRIMSCCKCPSGDSAGKFKRPIIAGMEFSRSKSDNSSHPQKDEGDNPETIMSSGNVNSSS

SEQ ID NO: 7564 - protein, 802 aa, Homo sapiens
MFISGRRTADKWRAEERLQCPAGSARAALARCADGGAVGPFKCVFVGEMAAQVGAVRVVRAVAAQEEPDKEGKEKPHAGVSPRGVKRQRRSSSGGSQEKRGRPSQEPPLAPPHRRRRSRQHPGPLPPTNAAPTVPGPVEPLLLPPPPPPSLAPAGPAVAAPLPAPSTSALFTFSPLTVSAAGPKHKGHKERHKHHHHRGPDGDPSSCGTDLKHKDKQENGERTGGVPLIKAPKRETPDENGKTQRADDFVLKKIKKKKKKKHREDMRGRRLKMYNKEVQTVCAGLTRISKEILTQGQINSTSGLNKESFRYLKDEQLCRLNLGMQEYRVPQGVQTPFMTHQEHSIRRNFLKTGTKFSNFIHEEHQSNGGALVLHAYMDELSFLSPMEMERFSEEFLALTFSENEKNAAYYALAIVHGAAAYLPDFLDYFAFNFPNTPVKMEILGKKDIETTTISNFHTQVNRTYCCGTYRAGPMRQISLVGAVDEEVGDYFPEFLDMLEESPFLKMTLPWGTLSSLRLQCRSQSDDGPIMWVRPGEQMIPTADMPKSPFKRRRSMNEIKNLQYLPRTSEPREVLFEDRTRAHADHVGQGFDWQSTAAVGVLKAVQFGEWSDQPRITKDVICFHAEDFTDVVQRLQLDLHEPPVSQCVQWVDEAKLNQMRREGIRYARIQLCDNDIYFIPRNVIHQFKTVSAVCSLAWHIRLKQYHPVVEATQNTESNSNMDCGLTGKRELEVDSQCVRIKTESEEACTEIQLLTTASSSFPPASELNLQQDQKTQPIPVLKVESRLDSDQQHNLQEHSTTSV

SEQ ID NO: 7565 - protein, 459 aa, Homo sapiens
MFISGRRTADKWRAEERLQCPAGSARAALARCADGGAVGPFKCVFVGEMAAQVGAVRVVRAVAAQEEPDKEGKEKPHAGVSPRGVKRQRRSSSGGSQEKRGRPSQEPPLAPPHRRRRSRQHPGPLPPTNAAPTVPGPVEPLLLPPPPPPSLAPAGPAVAAPLPAPSTSALFTFSPLTVSAAGPKHKGHKERHKHHHHRGPDGDPSSCGTDLKHKDKQENGERTGGVPLIKAPKRETPDENGKTQRADDFVLKKIKKKKKKKHREDMRGRRLKMYNKEVQTVCAGLTRISKEILTQGQINSTSGLNKESFRYLKDEQLCRLNLGMQEYRVPQGVQTPFMTHQEHSIRRNFLKTGTKFSNFIHEEHQSNGGALVLHAYMDELSFLSPMEMERFSEEFLALTFSENEKNAAYYALAIVHGAAAYLPDFLDYFAFNFPNTPVKMEILGKKDIETTTISNFHTQ

SEQ ID NO: 7566 - protein, 610 aa, Homo sapiens
MSRSPLNPSQLRSVGSQDALAPLPPPAPQNPSTHSWDPLCGSLPWGLSCLLALQHVLVMASLLCVSHLLLLCSLSPGGLSYSPSQLLASSFFSCGMSTILQTWMGSRLPLVQAPSLEFLIPALVLTSQKLPRAIQTPGNSSLMLHLCRGPSCHGLGHWNTSLQEVSGAVVVSGLLQGMMGLLGSPGHVFPHCGPLVLAPSLVVAGLSAHREVAQFCFTHWGLALLVILLMVVCSQHLGSCQFHVCPWRRASTSSTHTPLPVFRLLSVLIPVACVWIVSAFVGFSVIPQELSAPTKAPWIWLPHPGEWNWPLLTPRALAAGISMALAASTSSLGCYALCGRLLHLPPPPPHACSRGLSLEGLGSVLAGLLGSPMGTASSFPNVGKVGLIQAGSQQVAHLVGLLCVGLGLSPRLAQLLTTIPLPVVGGVLGVTQAVVLSAGFSSFYLADIDSGRNIFIVGFSIFMALLLPRWFREAPVLFSTGWSPLDVLLHSLLTQPIFLAGLSGFLLENTIPGTQLERGLGQGLPSPFTAQEARMPQKPREKAAQVYRLPFPIQNLCPCIPQPLHCLCPLPEDPGDEEGGSSEPEEMADLLPGSGEPCPESSREGFRSQK

SEQ ID NO: 7567 - protein, 493 aa, Homo sapiens
MSRSPLNPSQLRSVGSQDALAPLPPPAPQNPSTHSWDPLCGSLPWGLSCLLALQHVLVMASLLCVSHLLLLCSLSPGGLSYSPSQLLASSFFSCGMSTILQTWMGSRLPLVQAPSLEFLIPALVLTSQKLPRAIQTPGNSSLMLHLCRGPSCHGLGHWNTSLQEVSGAVVVSGLLQGMMGLLGSPGHVFPHCGPLVLAPSLVVAGLSAHREVAQFCFTHWGLALLTWAPASFMCAPGGELQRHQLTLLSLSSGSFRNCLPPPRHHGFGCLTQAGSQQVAHLVGLLCVGLGLSPRLAQLLTTIPLPVVGGVLGVTQAVVLSAGFSSFYLADIDSGRNIFIVGFSIFMALLLPRWFREAPVLFSTGWSPLDVLLHSLLTQPIFLAGLSGFLLENTIPGTQLERGLGQGLPSPFTAQEARMPQKPREKAAQVYRLPFPIQNLCPCIPQPLHCLCPLPEDPGDEEGGSSEPEEMADLLPGSGEPCPESSREGFRSQK

SEQ ID NO: 7568 - protein, 618 aa, Homo sapiens
MSRSPLNPSQLRSVGSQDALAPLPPPAPQNPSTHSWDPLCGSLPWGLSCLLALQHVLVMASLLCVSHLLLLCSLSPGGLSYSPSQLLASSFFSCGMSTILQTWMGSRLPLVQAPSLEFLIPALVLTSQKLPRAIQTPGNCEHRARARASLMLHLCRGPSCHGLGHWNTSLQEVSGAVVVSGLLQGMMGLLGSPGHVFPHCGPLVLAPSLVVAGLSAHREVAQFCFTHWGLALLVILLMVVCSQHLGSCQFHVCPWRRASTSSTHTPLPVFRLLSVLIPVACVWIVSAFVGFSVIPQELSAPTKAPWIWLPHPGEWNWPLLTPRALAAGISMALAASTSSLGCYALCGRLLHLPPPPPHACSRGLSLEGLGSVLAGLLGSPMGTASSFPNVGKVGLIQAGSQQVAHLVGLLCVGLGLSPRLAQLLTTIPLPVVGGVLGVTQAVVLSAGFSSFYLADIDSGRNIFIVGFSIFMALLLPRWFREAPVLFSTGWSPLDVLLHSLLTQPIFLAGLSGFLLENTIPGTQLERGLGQGLPSPFTAQEARMPQKPREKAAQVYRLPFPIQNLCPCIPQPLHCLCPLPEDPGDEEGGSSEPEEMADLLPGSGEPCPESSREGFRSQK

SEQ ID NO: 7569 - protein, 595 aa, Homo sapiens
MKFFSYILVYRRFLFVVFTVLVLLPLPIVLHTKEAECAYTLFVVATFWLTEALPLSVTALLPSLMLPMFGIMPSKKVASAYFKDFHLLLIGVICLATSIEKWNLHKRIALKMVMMVGVNPAWLTLGFMSSTAFLSMWLSNTSTAAMVMPIAEAVVQQIINAEAEVEATQMTYFNGSTNHGLEIDESVNGHEINERKEKTKPVPGYNNDTGKISSKVELEKNSGMRTKYRTKKGHVTRKLTCLCIAYSSTIGGLTTITGTSTNLIFAEYFNTRYPDCRCLNFGSWFTFSFPAALIILLLSWIWLQWLFLGFNFKEMFKCGKTKTVQQKACAEVIKQEYQKLGPIRYQEIVTLVLFIIMALLWFSRDPGFVPGWSALFSEYPGFATDSTVALLIGLLFFLIPAKTLTKTTPTGEIVAFDYSPLITWKEFQSFMPWDIAILVGGGFALADGCEESGLSKWIGNKLSPLGSLPAWLIILISSLMVTSLTEVASNPATITLFLPILSPLAEAIHVNPLYILIPSTLCTSFAFLLPVANPPNAIVFSYGHLKVIDMVKAGLGVNIVGVAVVMLGICTWIVPMFDLYTYPSWAPAMSNETMP

SEQ ID NO: 7570 - protein, 300 aa, Homo sapiens
MDFLMSGLAACGACVFTNPLEVVKTRMQLQGELQAPGTYQRHYRNVFHAFITIGKVDGLAALQKGLAPALLYQFLMNGIRLGTYGLAEAGGYLHTAEGTHSPARSAAAGAMAGVMGAYLGSPIYMVKTHLQAQAASEIAVGHQYKHQGMFQALTEIGQKHGLVGLWRGALGGLPRVIVGSSTQLCTFSSTKDLLSQWEIFPPQSWKLALVAAMMSGIAVVLAMAPFDVACTRLYNQPTDAQGKGLMYRGILDALLQTARTEGIFGMYKGIGASYFRLGPHTILSLFFWDQLRSLYYTDTK

SEQ ID NO: 7571 - protein, 291 aa, Homo sapiens
MDFLMSGLAACGACVFTNPLEVVKTRMQLQGELQAPGTYQRHYRNVFHAFITIGKVDGLAALQKGLAPALLYQFLMNGIRLGTYGLAEAGGYLHTAEGTHSPARSAAAGAMAGVMGAYLGSPIYMVKTHLQAQAASEIAVGHQYKHQGMFQALTEIGQKHGLVGLWRGALGGLPRVIVGSSTQLCTFSSTKDLLSQWEIFPPQSWKLALVAAMMSGIAVVLAMAPFDVACTRLYNQPTDAQGKGLMYRGILDALLQTARTEGIFGMYKEPSPQVLSNIMQCFSAFTGDQRC

SEQ ID NO: 7572 - protein, 287 aa, Homo sapiens
MDFLMSGLAACGACVFTNPLEVVKTRMQLQGELQAPGTYQRHYRNVFHAFITIGKVDGLAALQKGLAPALLYQFLMNGIRLGTYGLAEAGGYLHTAEGTHSPARSAAAGAMAGVMGAYLGSPIYMVKTHLQAQAASEIAVGHQYKHQGMFQALTEIGQKHGLVGLWRGALGGLPRVIVGSSTQLCTFSSTKDLLSQWEIFPPQSWKLALVAAMMSGIAVVLAMAPFDVACTRLYNQPTDAQGKGLMYRGILDALLQTARTEGIFEPSPQVLSNIMQCFSAFTGDQRC

SEQ ID NO: 7573 - protein, 295 aa, Homo sapiens
MDFLMSGLAACGACVFTNPLEVVKTRMQLQGELQAPGTYQRHYRNVFHAFITIGKVDGLAALQKGLAPALLYQFLMNGIRLGTYGLAEAGGYLHTAEGTHSPARSAAAGAMAGVMGAYLGSPIYMVKTHLQAQAASEIAVGHQYKHQGMFQALTEIGQKHGLVGLWRGALGGLPRVIVGSSTQLCTFSSTKDLLSQWEIFPPQSWKLALVAAMMSGIAVVLAMAPFDVACTRLYNQPTDAQGKNRVPKFSATSCSASAPLLGTKDVRIVKGQTGHQLFKVTQAPGCSPILLGTQS

SEQ ID NO: 7574 - protein, 103 aa, Homo sapiens
MSDCYTELEKAVIVLVENFYKYVSKYSLVKNKISKSSFREMLQKELNHMLSDTGNRKAADKLIQNLDANHDGRISFDEYWTLIGGITGPIAKLIHEQEQQSSS

SEQ ID NO: 7575 - protein, 1088 aa, Homo sapiens
MTTAQRDSLLWKLAGLLRESGDVVLSGCSTLSLLTPTLQQLNHVFELHLGPWGPGQTGFVALPSHPADSPVILQLQFLFDVLQKTLSLKLVHVAGPGPTGPIKIFPFKSLRHLELRGVPLHCLHGLRGIYSQLETLICSRSLQALEELLSACGGDFCSALPWLALLSANFSYNALTALDSSLRLLSALRFLNLSHNQVQDCQGFLMDLCELHHLDISYNRLHLVPRMGPSGAALGVLILRGNELRSLHGLEQLRNLRHLDLAYNLLEGHRELSPLWLLAELRKLYLEGNPLWFHPEHRAATAQYLSPRARDAATGFLLDGKVLSLTDFQTHTSLGLSPMGPPLPWPVGSTPETSGGPDLSDSLSSGGVVTQPLLHKVKSRVRVRRASISEPSDTDPEPRTLNPSPAGWFVQQHPELELMSSFRERFGRNWLQYRSHLEPSGNPLPATPTTSAPSAPPASSQGPDTAPRPSPPQEEARGPQESPQKMSEEVRAEPQEEEEEKEGKEEKEEGEMVEQGEEEAGEEEEEEQDQKEVEAELCRPLLVCPLEGPEGVRGRECFLRVTSAHLFEVELQAARTLERLELQSLEAAEIEPEAQAQRSPRPTGSDLLPGAPILSLRFSYICPDRQLRRYLVLEPDAHAAVQELLAVLTPVTNVAREQLGEARDLLLGRFQCLRCGHEFKPEEPRMGLDSEEGWRPLFQKTESPAVCPNCGSDHVVLLAVSRGTPNRERKQGEQSLAPSPSASPVCHPPGHGDHLDRAKNSPPQAPSTRDHGSWSLSPPPERCGLRSVDHRLRLFLDVEVFSDAQEEFQCCLKVPVALAGHTGEFMCLVVVSDRRLYLLKVTGEMREPPASWLQLTLAVPLQDLSGIELGLAGQSLRLEWAAGAGRCVLLPRDARHCRAFLEELLDVLQSLPPAWRNCVSATEEEVTPQHRLWPLLEKDSSLEARQFFYLRAFLVEGPSTCLVSLLLTPSTLFLLDEDAAGSPAEPSPPAASGEASEKVPPSGPGPAVRVREQQPLSSLSSVLLYRSAPEDLRLLFYDEVSRLESFWALRVVCQEQLTALLAWIREPWEELFSIGLRTVIQEALALDR

SEQ ID NO: 7576 - protein, 5038 aa, Homo sapiens
MGDAEGEDEVQFLRTDDEVVLQCSATVLKEQLKLCLAAEGFGNRLCFLEPTSNAQNVPPDLAICCFVLEQSLSVRALQEMLANTVEAGVESSQGGGHRTLLYGHAILLRHAHSRMYLSCLTTSRSMTDKLAFDVGLQEDATGEACWWTMHPASKQRSEGEKVRVGDDIILVSVSSERYLHLSTASGELQVDASFMQTLWNMNPICSRCEEGFVTGGHVLRLFHGHMDECLTISPADSDDQRRLVYYEGGAVCTHARSLWRLEPLRISWSGSHLRWGQPLRVRHVTTGQYLALTEDQGLVVVDASKAHTKATSFCFRISKEKLDVAPKRDVEGMGPPEIKYGESLCFVQHVASGLWLTYAAPDPKALRLGVLKKKAMLHQEGHMDDALSLTRCQQEESQAARMIHSTNGLYNQFIKSLDSFSGKPRGSGPPAGTALPIEGVILSLQDLIIYFEPPSEDLQHEEKQSKLRSLRNRQSLFQEEGMLSMVLNCIDRLNVYTTAAHFAEFAGEEAAESWKEIVNLLYELLASLIRGNRSNCALFSTNLDWLVSKLDRLEASSGILEVLYCVLIESPEVLNIIQENHIKSIISLLDKHGRNHKVLDVLCSLCVCNGVAVRSNQDLITENLLPGRELLLQTNLINYVTSIRPNIFVGRAEGTTQYSKWYFEVMVDEVTPFLTAQATHLRVGWALTEGYTPYPGAGEGWGGNGVGDDLYSYGFDGLHLWTGHVARPVTSPGQHLLAPEDVISCCLDLSVPSISFRINGCPVQGVFESFNLDGLFFPVVSFSAGVKVRFLLGGRHGEFKFLPPPGYAPCHEAVLPRERLHLEPIKEYRREGPRGPHLVGPSRCLSHTDFVPCPVDTVQIVLPPHLERIREKLAENIHELWALTRIEQGWTYGPVRDDNKRLHPCLVDFHSLPEPERNYNLQMSGETLKTLLALGCHVGMADEKAEDNLKKTKLPKTYMMSNGYKPAPLDLSHVRLTPAQTTLVDRLAENGHNVWARDRVGQGWSYSAVQDIPARRNPRLVPYRLLDEATKRSNRDSLCQAVRTLLGYGYNIEPPDQEPSQVENQSRCDRVRIFRAEKSYTVQSGRWYFEFEAVTTGEMRVGWARPELRPDVELGADELAYVFNGHRGQRWHLGSEPFGRPWQPGDVVGCMIDLTENTIIFTLNGEVLMSDSGSETAFREIEIGDGFLPVCSLGPGQVGHLNLGQDVSSLRFFAICGLQEGFEPFAINMQRPVTTWFSKGLPQFEPVPLEHPHYEVSRVDGTVDTPPCLRLTHRTWGSQNSLVEMLFLRLSLPVQFHQHFRCTAGATPLAPPGLQPPAEDEARAAEPDPDYENLRRSAGGWSEAENGKEGTAKEGAPGGTPQAGGEAQPARAENEKDATTEKNKKRGFLFKAKKVAMMTQPPATPTLPRLPHDVVPADNRDDPEIILNTTTYYYSVRVFAGQEPSCVWAGWVTPDYHQHDMSFDLSKVRVVTVTMGDEQGNVHSSLKCSNCYMVWGGDFVSPGQQGRISHTDLVIGCLVDLATGLMTFTANGKESNTFFQVEPNTKLFPAVFVLPTHQNVIQFELGKQKNIMPLSAAMFQSERKNPAPQCPPRLEMQMLMPVSWSRMPNHFLQVETRRAGERLGWAVQCQEPLTMMALHIPEENRCMDILELSERLDLQRFHSHTLRLYRAVCALGNNRVAHALCSHVDQAQLLHALEDAHLPGPLRAGYYDLLISIHLESACRSRRSMLSEYIVPLTPETRAITLFPPGRSTENGHPRHGLPGVGVTTSLRPPHHFSPPCFVAALPAAGAAEAPARLSPAIPLEALRDKALRMLGEAVRDGGQHARDPVGGSVEFQFVPVLKLVSTLLVMGIFGDEDVKQILKMIEPEVFTEEEEEEDEEEEGEEEDEEEKEEDEEETAQEKEDEEKEEEEAAEGEKEEGLEEGLLQMKLPESVKLQMCHLLEYFCDQELQHRVESLAAFAERYVDKLQANQRSRYGLLIKAFSMTAAETARRTREFRSPPQEQINMLLQFKDGTDEEDCPLPEEIRQDLLDFHQDLLAHCGIQLDGEEEEPEEETTLGSRLMSLLEKVRLVKKKEEKPEEERSAEESKPRSLQELVSHMVVRWAQEDFVQSPELVRAMFSLLHRQYDGLGELLRALPRAYTISPSSVEDTMSLLECLGQIRSLLIVQMGPQEENLMIQSIGNIMNNKVFYQHPNLMRALGMHETVMEVMVNVLGGGESKEIRFPKMVTSCCRFLCYFCRISRQNQRSMFDHLSYLLENSGIGLGMQGSTPLDVAAASVIDNNELALALQEQDLEKVVSYLAGCGLQSCPMLVAKGYPDIGWNPCGGERYLDFLRFAVFVNGESVEENANVVVRLLIRKPECFGPALRGEGGSGLLAAIEEAIRISEDPARDGPGIRRDRRREHFGEEPPEENRVHLGHAIMSFYAALIDLLGRCAPEMHLIQAGKGEALRIRAILRSLVPLEDLVGIISLPLQIPTLGKDGALVQPKMSASFVPDHKASMVLFLDRVYGIENQDFLLHVLDVGFLPDMRAAASLDTATFSTTEMALALNRYLCLAVLPLITKCAPLFAGTEHRAIMVDSMLHTVYRLSRGRSLTKAQRDVIEDCLMSLCRYIRPSMLQHLLRRLVFDVPILNEFAKMPLKLLTNHYERCWKYYCLPTGWANFGVTSEEELHLTRKLFWGIFDSLAHKKYDPELYRMAMPCLCAIAGALPPDYVDASYSSKAEKKATVDAEGNFDPRPVETLNVIIPEKLDSFINKFAEYTHEKWAFDKIQNNWSYGENIDEELKTHPMLRPYKTFSEKDKEIYRWPIKESLKAMIAWEWTIEKAREGEEEKTEKKKTRKISQSAQTYDPREGYNPQPPDLSAVTLSRELQAMAEQLAENYHNTWGRKKKQELEAKGGGTHPLLVPYDTLTAKEKARDREKAQELLKFLQMNGYAVTRGLKDMELDSSSIEKRFAFGFLQQLLRWMDISQEFIAHLEAVVSSGRVEKSPHEQEIKFFAKILLPLINQYFTNHCLYFLSTPAKVLGSGGHASNKEKEMITSLFCKLAALVRHRVSLFGTDAPAVVNCLHILARSLDARTVMKSGPEIVKAGLRSFFESASEDIEKMVENLRLGKVSQARTQVKGVGQNLTYTTVALLPVLTTLFQHIAQHQFGDDVILDDVQVSCYRTLCSIYSLGTTKNTYVEKLRPALGECLARLAAAMPVAFLEPQLNEYNACSVYTTKSPRERAILGLPNSVEEMCPDIPVLERLMADIGGLAESGARYTEMPHVIEITLPMLCSYLPRWWERGPEAPPSALPAGAPPPCTAVTSDHLNSLLGNILRIIVNNLGIDEASWMKRLAVFAQPIVSRARPELLQSHFIPTIGRLRKRAGKVVSEEEQLRLEAKAEAQEGELLVRDEFSVLCRDLYALYPLLIRYVDNNRAQWLTEPNPSAEELFRMVGEIFIYWSKSHNFKREEQNFVVQNEINNMSFLTADNKSKMAKAGDIQSGGSDQERTKKKRRGDRYSVQTSLIVATLKKMLPIGLNMCAPTDQDLITLAKTRYALKDTDEEVREFLHNNLHLQGKVEGSPSLRWQMALYRGVPGREEDADDPEKIVRRVQEVSAVLYYLDQTEHPYKSKKAVWHKLLSKQRRRAVVACFRMTPLYNLPTHRACNMFLESYKAAWILTEDHSFEDRMIDDLSKAGEQEEEEEEVEEKKPDPLHQLVLHFSRTALTEKSKLDEDYLYMAYADIMAKSCHLEEGGENGEAEEEVEVSFEEKQMEKQRLLYQQARLHTRGAAEMVLQMISACKGETGAMVSSTLKLGISILNGGNAEVQQKMLDYLKDKKEVGFFQSIQALMQTCSVLDLNAFERQNKAEGLGMVNEDGTVINRQNGEKVMADDEFTQDLFRFLQLLCEGHNNDFQNYLRTQTGNTTTINIIICTVDYLLRLQESISDFYWYYSGKDVIEEQGKRNFSKAMSVAKQVFNSLTEYIQGPCTGNQQSLAHSRLWDAVVGFLHVFAHMMMKLAQDSSQIELLKELLDLQKDMVVMLLSLLEGNVVNGMIARQMVDMLVESSSNVEMILKFFDMFLKLKDIVGSEAFQDYVTDPRGLISKKDFQKAMDSQKQFSGPEIQFLLSCSEADENEMINCEEFANRFQEPARDIGFNVAVLLTNLSEHVPHDPRLHNFLELAESILEYFRPYLGRIEIMGASRRIERIYFEISETNRAQWEMPQVKESKRQFIFDVVNEGGEAEKMELFVSFCEDTIFEMQIAAQISEPEGEPETDEDEGAGAAEAGAEGAEEGAAGLEGTAATAAAGATARVVAAAGRALRGLSYRSLRRRVRRLRRLTAREAATAVAALLWAAVTRAGAAGAGAAAGALGLLWGSLFGGGLVEGAKKVTVTELLAGMPDPTSDEVHGEQPAGPGGDADGEGASEGAGDAAEGAGDEEEAVHEAGPGGADGAVAVTDGGPFRPEGAGGLGDMGDTTPAEPPTPEGSPILKRKLGVDGVEEELPPEPEPEPEPELEPEKADAENGEKEEVPEPTPEPPKKQAPPSPPPKKEEAGGEFWGELEVQRVKFLNYLSRNFYTLRFLALFLAFAINFILLFYKVSDSPPGEDDMEGSAAGDVSGAGSGGSSGWGLGAGEEAEGDEDENMVYYFLEESTGYMEPALRCLSLLHTLVAFLCIIGYNCLKVPLVIFKREKELARKLEFDGLYITEQPEDDDVKGQWDRLVLNTPSFPSNYWDKFVKRKVLDKHGDIYGRERIAELLGMDLATLEITAHNERKPNPPPGLLTWLMSIDVKYQIWKFGVIFTDNSFLYLGWYMVMSLLGHYNNFFFAAHLLDIAMGVKTLRTILSSVTHNGKQLVMTVGLLAVVVYLYTVVAFNFFRKFYNKSEDEDEPDMKCDDMMTCYLFHMYVGVRAGGGIGDEIEDPAGDEYELYRVVFDITFFFFVIVILLAIIQGLIIDAFGELRDQQEQVKEDMETKCFICGIGSDYFDTTPHGFETHTLEEHNLANYMFFLMYLINKDETEHTGQESYVWKMYQERCWDFFPAGDCFRKQYEDQLS

SEQ ID NO: 7577 - protein, 5033 aa, Homo sapiens
MGDAEGEDEVQFLRTDDEVVLQCSATVLKEQLKLCLAAEGFGNRLCFLEPTSNAQNVPPDLAICCFVLEQSLSVRALQEMLANTVEAGVESSQGGGHRTLLYGHAILLRHAHSRMYLSCLTTSRSMTDKLAFDVGLQEDATGEACWWTMHPASKQRSEGEKVRVGDDIILVSVSSERYLHLSTASGELQVDASFMQTLWNMNPICSRCEEGFVTGGHVLRLFHGHMDECLTISPADSDDQRRLVYYEGGAVCTHARSLWRLEPLRISWSGSHLRWGQPLRVRHVTTGQYLALTEDQGLVVVDASKAHTKATSFCFRISKEKLDVAPKRDVEGMGPPEIKYGESLCFVQHVASGLWLTYAAPDPKALRLGVLKKKAMLHQEGHMDDALSLTRCQQEESQAARMIHSTNGLYNQFIKSLDSFSGKPRGSGPPAGTALPIEGVILSLQDLIIYFEPPSEDLQHEEKQSKLRSLRNRQSLFQEEGMLSMVLNCIDRLNVYTTAAHFAEFAGEEAAESWKEIVNLLYELLASLIRGNRSNCALFSTNLDWLVSKLDRLEASSGILEVLYCVLIESPEVLNIIQENHIKSIISLLDKHGRNHKVLDVLCSLCVCNGVAVRSNQDLITENLLPGRELLLQTNLINYVTSIRPNIFVGRAEGTTQYSKWYFEVMVDEVTPFLTAQATHLRVGWALTEGYTPYPGAGEGWGGNGVGDDLYSYGFDGLHLWTGHVARPVTSPGQHLLAPEDVISCCLDLSVPSISFRINGCPVQGVFESFNLDGLFFPVVSFSAGVKVRFLLGGRHGEFKFLPPPGYAPCHEAVLPRERLHLEPIKEYRREGPRGPHLVGPSRCLSHTDFVPCPVDTVQIVLPPHLERIREKLAENIHELWALTRIEQGWTYGPVRDDNKRLHPCLVDFHSLPEPERNYNLQMSGETLKTLLALGCHVGMADEKAEDNLKKTKLPKTYMMSNGYKPAPLDLSHVRLTPAQTTLVDRLAENGHNVWARDRVGQGWSYSAVQDIPARRNPRLVPYRLLDEATKRSNRDSLCQAVRTLLGYGYNIEPPDQEPSQVENQSRCDRVRIFRAEKSYTVQSGRWYFEFEAVTTGEMRVGWARPELRPDVELGADELAYVFNGHRGQRWHLGSEPFGRPWQPGDVVGCMIDLTENTIIFTLNGEVLMSDSGSETAFREIEIGDGFLPVCSLGPGQVGHLNLGQDVSSLRFFAICGLQEGFEPFAINMQRPVTTWFSKGLPQFEPVPLEHPHYEVSRVDGTVDTPPCLRLTHRTWGSQNSLVEMLFLRLSLPVQFHQHFRCTAGATPLAPPGLQPPAEDEARAAEPDPDYENLRRSAGGWSEAENGKEGTAKEGAPGGTPQAGGEAQPARAENEKDATTEKNKKRGFLFKAKKVAMMTQPPATPTLPRLPHDVVPADNRDDPEIILNTTTYYYSVRVFAGQEPSCVWAGWVTPDYHQHDMSFDLSKVRVVTVTMGDEQGNVHSSLKCSNCYMVWGGDFVSPGQQGRISHTDLVIGCLVDLATGLMTFTANGKESNTFFQVEPNTKLFPAVFVLPTHQNVIQFELGKQKNIMPLSAAMFQSERKNPAPQCPPRLEMQMLMPVSWSRMPNHFLQVETRRAGERLGWAVQCQEPLTMMALHIPEENRCMDILELSERLDLQRFHSHTLRLYRAVCALGNNRVAHALCSHVDQAQLLHALEDAHLPGPLRAGYYDLLISIHLESACRSRRSMLSEYIVPLTPETRAITLFPPGRSTENGHPRHGLPGVGVTTSLRPPHHFSPPCFVAALPAAGAAEAPARLSPAIPLEALRDKALRMLGEAVRDGGQHARDPVGGSVEFQFVPVLKLVSTLLVMGIFGDEDVKQILKMIEPEVFTEEEEEEDEEEEGEEEDEEEKEEDEEETAQEKEDEEKEEEEAAEGEKEEGLEEGLLQMKLPESVKLQMCHLLEYFCDQELQHRVESLAAFAERYVDKLQANQRSRYGLLIKAFSMTAAETARRTREFRSPPQEQINMLLQFKDGTDEEDCPLPEEIRQDLLDFHQDLLAHCGIQLDGEEEEPEEETTLGSRLMSLLEKVRLVKKKEEKPEEERSAEESKPRSLQELVSHMVVRWAQEDFVQSPELVRAMFSLLHRQYDGLGELLRALPRAYTISPSSVEDTMSLLECLGQIRSLLIVQMGPQEENLMIQSIGNIMNNKVFYQHPNLMRALGMHETVMEVMVNVLGGGESKEIRFPKMVTSCCRFLCYFCRISRQNQRSMFDHLSYLLENSGIGLGMQGSTPLDVAAASVIDNNELALALQEQDLEKVVSYLAGCGLQSCPMLVAKGYPDIGWNPCGGERYLDFLRFAVFVNGESVEENANVVVRLLIRKPECFGPALRGEGGSGLLAAIEEAIRISEDPARDGPGIRRDRRREHFGEEPPEENRVHLGHAIMSFYAALIDLLGRCAPEMHLIQAGKGEALRIRAILRSLVPLEDLVGIISLPLQIPTLGKDGALVQPKMSASFVPDHKASMVLFLDRVYGIENQDFLLHVLDVGFLPDMRAAASLDTATFSTTEMALALNRYLCLAVLPLITKCAPLFAGTEHRAIMVDSMLHTVYRLSRGRSLTKAQRDVIEDCLMSLCRYIRPSMLQHLLRRLVFDVPILNEFAKMPLKLLTNHYERCWKYYCLPTGWANFGVTSEEELHLTRKLFWGIFDSLAHKKYDPELYRMAMPCLCAIAGALPPDYVDASYSSKAEKKATVDAEGNFDPRPVETLNVIIPEKLDSFINKFAEYTHEKWAFDKIQNNWSYGENIDEELKTHPMLRPYKTFSEKDKEIYRWPIKESLKAMIAWEWTIEKAREGEEEKTEKKKTRKISQSAQTYDPREGYNPQPPDLSAVTLSRELQAMAEQLAENYHNTWGRKKKQELEAKGGGTHPLLVPYDTLTAKEKARDREKAQELLKFLQMNGYAVTRGLKDMELDSSSIEKRFAFGFLQQLLRWMDISQEFIAHLEAVVSSGRVEKSPHEQEIKFFAKILLPLINQYFTNHCLYFLSTPAKVLGSGGHASNKEKEMITSLFCKLAALVRHRVSLFGTDAPAVVNCLHILARSLDARTVMKSGPEIVKAGLRSFFESASEDIEKMVENLRLGKVSQARTQVKGVGQNLTYTTVALLPVLTTLFQHIAQHQFGDDVILDDVQVSCYRTLCSIYSLGTTKNTYVEKLRPALGECLARLAAAMPVAFLEPQLNEYNACSVYTTKSPRERAILGLPNSVEEMCPDIPVLERLMADIGGLAESGARYTEMPHVIEITLPMLCSYLPRWWERGPEAPPSALPAGAPPPCTAVTSDHLNSLLGNILRIIVNNLGIDEASWMKRLAVFAQPIVSRARPELLQSHFIPTIGRLRKRAGKVVSEEEQLRLEAKAEAQEGELLVRDEFSVLCRDLYALYPLLIRYVDNNRAQWLTEPNPSAEELFRMVGEIFIYWSKSHNFKREEQNFVVQNEINNMSFLTADNKSKMAKSGGSDQERTKKKRRGDRYSVQTSLIVATLKKMLPIGLNMCAPTDQDLITLAKTRYALKDTDEEVREFLHNNLHLQGKVEGSPSLRWQMALYRGVPGREEDADDPEKIVRRVQEVSAVLYYLDQTEHPYKSKKAVWHKLLSKQRRRAVVACFRMTPLYNLPTHRACNMFLESYKAAWILTEDHSFEDRMIDDLSKAGEQEEEEEEVEEKKPDPLHQLVLHFSRTALTEKSKLDEDYLYMAYADIMAKSCHLEEGGENGEAEEEVEVSFEEKQMEKQRLLYQQARLHTRGAAEMVLQMISACKGETGAMVSSTLKLGISILNGGNAEVQQKMLDYLKDKKEVGFFQSIQALMQTCSVLDLNAFERQNKAEGLGMVNEDGTVINRQNGEKVMADDEFTQDLFRFLQLLCEGHNNDFQNYLRTQTGNTTTINIIICTVDYLLRLQESISDFYWYYSGKDVIEEQGKRNFSKAMSVAKQVFNSLTEYIQGPCTGNQQSLAHSRLWDAVVGFLHVFAHMMMKLAQDSSQIELLKELLDLQKDMVVMLLSLLEGNVVNGMIARQMVDMLVESSSNVEMILKFFDMFLKLKDIVGSEAFQDYVTDPRGLISKKDFQKAMDSQKQFSGPEIQFLLSCSEADENEMINCEEFANRFQEPARDIGFNVAVLLTNLSEHVPHDPRLHNFLELAESILEYFRPYLGRIEIMGASRRIERIYFEISETNRAQWEMPQVKESKRQFIFDVVNEGGEAEKMELFVSFCEDTIFEMQIAAQISEPEGEPETDEDEGAGAAEAGAEGAEEGAAGLEGTAATAAAGATARVVAAAGRALRGLSYRSLRRRVRRLRRLTAREAATAVAALLWAAVTRAGAAGAGAAAGALGLLWGSLFGGGLVEGAKKVTVTELLAGMPDPTSDEVHGEQPAGPGGDADGEGASEGAGDAAEGAGDEEEAVHEAGPGGADGAVAVTDGGPFRPEGAGGLGDMGDTTPAEPPTPEGSPILKRKLGVDGVEEELPPEPEPEPEPELEPEKADAENGEKEEVPEPTPEPPKKQAPPSPPPKKEEAGGEFWGELEVQRVKFLNYLSRNFYTLRFLALFLAFAINFILLFYKVSDSPPGEDDMEGSAAGDVSGAGSGGSSGWGLGAGEEAEGDEDENMVYYFLEESTGYMEPALRCLSLLHTLVAFLCIIGYNCLKVPLVIFKREKELARKLEFDGLYITEQPEDDDVKGQWDRLVLNTPSFPSNYWDKFVKRKVLDKHGDIYGRERIAELLGMDLATLEITAHNERKPNPPPGLLTWLMSIDVKYQIWKFGVIFTDNSFLYLGWYMVMSLLGHYNNFFFAAHLLDIAMGVKTLRTILSSVTHNGKQLVMTVGLLAVVVYLYTVVAFNFFRKFYNKSEDEDEPDMKCDDMMTCYLFHMYVGVRAGGGIGDEIEDPAGDEYELYRVVFDITFFFFVIVILLAIIQGLIIDAFGELRDQQEQVKEDMETKCFICGIGSDYFDTTPHGFETHTLEEHNLANYMFFLMYLINKDETEHTGQESYVWKMYQERCWDFFPAGDCFRKQYEDQLS

SEQ ID NO: 7578 - protein, 5033 aa, Homo sapiens
MGDAEGEDEVQFLRTDDEVVLQCSATVLKEQLKLCLAAEGFGNRLCFLEPTSNAQNVPPDLAICCFVLEQSLSVRALQEMLANTVEAGVESSQGGGHRTLLYGHAILLRHAHSRMYLSCLTTSRSMTDKLAFDVGLQEDATGEACWWTMHPASKQRSEGEKVRVGDDIILVSVSSERYLHLSTASGELQVDASFMQTLWNMNPICSRCEEGFVTGGHVLRLFHGHMDECLTISPADSDDQRRLVYYEGGAVCTHARSLWRLEPLRISWSGSHLRWGQPLRVRHVTTGQYLALTEDQGLVVVDASKAHTKATSFCFRISKEKLDVAPKRDVEGMGPPEIKYGESLCFVQHVASGLWLTYAAPDPKALRLGVLKKKAMLHQEGHMDDALSLTRCQQEESQAARMIHSTNGLYNQFIKSLDSFSGKPRGSGPPAGTALPIEGVILSLQDLIIYFEPPSEDLQHEEKQSKLRSLRNRQSLFQEEGMLSMVLNCIDRLNVYTTAAHFAEFAGEEAAESWKEIVNLLYELLASLIRGNRSNCALFSTNLDWLVSKLDRLEASSGILEVLYCVLIESPEVLNIIQENHIKSIISLLDKHGRNHKVLDVLCSLCVCNGVAVRSNQDLITENLLPGRELLLQTNLINYVTSIRPNIFVGRAEGTTQYSKWYFEVMVDEVTPFLTAQATHLRVGWALTEGYTPYPGAGEGWGGNGVGDDLYSYGFDGLHLWTGHVARPVTSPGQHLLAPEDVISCCLDLSVPSISFRINGCPVQGVFESFNLDGLFFPVVSFSAGVKVRFLLGGRHGEFKFLPPPGYAPCHEAVLPRERLHLEPIKEYRREGPRGPHLVGPSRCLSHTDFVPCPVDTVQIVLPPHLERIREKLAENIHELWALTRIEQGWTYGPVRDDNKRLHPCLVDFHSLPEPERNYNLQMSGETLKTLLALGCHVGMADEKAEDNLKKTKLPKTYMMSNGYKPAPLDLSHVRLTPAQTTLVDRLAENGHNVWARDRVGQGWSYSAVQDIPARRNPRLVPYRLLDEATKRSNRDSLCQAVRTLLGYGYNIEPPDQEPSQVENQSRCDRVRIFRAEKSYTVQSGRWYFEFEAVTTGEMRVGWARPELRPDVELGADELAYVFNGHRGQRWHLGSEPFGRPWQPGDVVGCMIDLTENTIIFTLNGEVLMSDSGSETAFREIEIGDGFLPVCSLGPGQVGHLNLGQDVSSLRFFAICGLQEGFEPFAINMQRPVTTWFSKGLPQFEPVPLEHPHYEVSRVDGTVDTPPCLRLTHRTWGSQNSLVEMLFLRLSLPVQFHQHFRCTAGATPLAPPGLQPPAEDEARAAEPDPDYENLRRSAGGWSEAENGKEGTAKEGAPGGTPQAGGEAQPARAENEKDATTEKNKKRGFLFKAKKVAMMTQPPATPTLPRLPHDVVPADNRDDPEIILNTTTYYYSVRVFAGQEPSCVWAGWVTPDYHQHDMSFDLSKVRVVTVTMGDEQGNVHSSLKCSNCYMVWGGDFVSPGQQGRISHTDLVIGCLVDLATGLMTFTANGKESNTFFQVEPNTKLFPAVFVLPTHQNVIQFELGKQKNIMPLSAAMFQSERKNPAPQCPPRLEMQMLMPVSWSRMPNHFLQVETRRAGERLGWAVQCQEPLTMMALHIPEENRCMDILELSERLDLQRFHSHTLRLYRAVCALGNNRVAHALCSHVDQAQLLHALEDAHLPGPLRAGYYDLLISIHLESACRSRRSMLSEYIVPLTPETRAITLFPPGRSTENGHPRHGLPGVGVTTSLRPPHHFSPPCFVAALPAAGAAEAPARLSPAIPLEALRDKALRMLGEAVRDGGQHARDPVGGSVEFQFVPVLKLVSTLLVMGIFGDEDVKQILKMIEPEVFTEEEEEEDEEEEGEEEDEEEKEEDEEETAQEKEDEEKEEEEAAEGEKEEGLEEGLLQMKLPESVKLQMCHLLEYFCDQELQHRVESLAAFAERYVDKLQANQRSRYGLLIKAFSMTAAETARRTREFRSPPQEQINMLLQFKDGTDEEDCPLPEEIRQDLLDFHQDLLAHCGIQLDGEEEEPEEETTLGSRLMSLLEKVRLVKKKEEKPEEERSAEESKPRSLQELVSHMVVRWAQEDFVQSPELVRAMFSLLHRQYDGLGELLRALPRAYTISPSSVEDTMSLLECLGQIRSLLIVQMGPQEENLMIQSIGNIMNNKVFYQHPNLMRALGMHETVMEVMVNVLGGGESKEIRFPKMVTSCCRFLCYFCRISRQNQRSMFDHLSYLLENSGIGLGMQGSTPLDVAAASVIDNNELALALQEQDLEKVVSYLAGCGLQSCPMLVAKGYPDIGWNPCGGERYLDFLRFAVFVNGESVEENANVVVRLLIRKPECFGPALRGEGGSGLLAAIEEAIRISEDPARDGPGIRRDRRREHFGEEPPEENRVHLGHAIMSFYAALIDLLGRCAPEMHLIQAGKGEALRIRAILRSLVPLEDLVGIISLPLQIPTLGKDGALVQPKMSASFVPDHKASMVLFLDRVYGIENQDFLLHVLDVGFLPDMRAAASLDTATFSTTEMALALNRYLCLAVLPLITKCAPLFAGTEHRAIMVDSMLHTVYRLSRGRSLTKAQRDVIEDCLMSLCRYIRPSMLQHLLRRLVFDVPILNEFAKMPLKLLTNHYERCWKYYCLPTGWANFGVTSEEELHLTRKLFWGIFDSLAHKKYDPELYRMAMPCLCAIAGALPPDYVDASYSSKAEKKATVDAEGNFDPRPVETLNVIIPEKLDSFINKFAEYTHEKWAFDKIQNNWSYGENIDEELKTHPMLRPYKTFSEKDKEIYRWPIKESLKAMIAWEWTIEKAREGEEEKTEKKKTRKISQSAQTYDPREGYNPQPPDLSAVTLSRELQAMAEQLAENYHNTWGRKKKQELEAKGGGTHPLLVPYDTLTAKEKARDREKAQELLKFLQMNGYAVTRGLKDMELDSSSIEKRFAFGFLQQLLRWMDISQEFIAHLEAVVSSGRVEKSPHEQEIKFFAKILLPLINQYFTNHCLYFLSTPAKVLGSGGHASNKEKEMITSLFCKLAALVRHRVSLFGTDAPAVVNCLHILARSLDARTVMKSGPEIVKAGLRSFFESASEDIEKMVENLRLGKVSQARTQVKGVGQNLTYTTVALLPVLTTLFQHIAQHQFGDDVILDDVQVSCYRTLCSIYSLGTTKNTYVEKLRPALGECLARLAAAMPVAFLEPQLNEYNACSVYTTKSPRERAILGLPNSVEEMCPDIPVLERLMADIGGLAESGARYTEMPHVIEITLPMLCSYLPRWWERGPEAPPSALPAGAPPPCTAVTSDHLNSLLGNILRIIVNNLGIDEASWMKRLAVFAQPIVSRARPELLQSHFIPTIGRLRKRAGKVVSEEEQLRLEAKAEAQEGELLVRDEFSVLCRDLYALYPLLIRYVDNNRAQWLTEPNPSAEELFRMVGEIFIYWSKSHNFKREEQNFVVQNEINNMSFLTADNKSKMAKAGDIQSGGSDQERTKKKRRGDRYSVQTSLIVATLKKMLPIGLNMCAPTDQDLITLAKTRYALKDTDEEVREFLHNNLHLQGKVEGSPSLRWQMALYRGVPGREEDADDPEKIVRRVQEVSAVLYYLDQTEHPYKSKKAVWHKLLSKQRRRAVVACFRMTPLYNLPTHRACNMFLESYKAAWILTEDHSFEDRMIDDLSKAGEQEEEEEEVEEKKPDPLHQLVLHFSRTALTEKSKLDEDYLYMAYADIMAKSCHLEEGGENGEAEEEVEVSFEEKQMEKQRLLYQQARLHTRGAAEMVLQMISACKGETGAMVSSTLKLGISILNGGNAEVQQKMLDYLKDKKEVGFFQSIQALMQTCSVLDLNAFERQNKAEGLGMVNEDGTVGEKVMADDEFTQDLFRFLQLLCEGHNNDFQNYLRTQTGNTTTINIIICTVDYLLRLQESISDFYWYYSGKDVIEEQGKRNFSKAMSVAKQVFNSLTEYIQGPCTGNQQSLAHSRLWDAVVGFLHVFAHMMMKLAQDSSQIELLKELLDLQKDMVVMLLSLLEGNVVNGMIARQMVDMLVESSSNVEMILKFFDMFLKLKDIVGSEAFQDYVTDPRGLISKKDFQKAMDSQKQFSGPEIQFLLSCSEADENEMINCEEFANRFQEPARDIGFNVAVLLTNLSEHVPHDPRLHNFLELAESILEYFRPYLGRIEIMGASRRIERIYFEISETNRAQWEMPQVKESKRQFIFDVVNEGGEAEKMELFVSFCEDTIFEMQIAAQISEPEGEPETDEDEGAGAAEAGAEGAEEGAAGLEGTAATAAAGATARVVAAAGRALRGLSYRSLRRRVRRLRRLTAREAATAVAALLWAAVTRAGAAGAGAAAGALGLLWGSLFGGGLVEGAKKVTVTELLAGMPDPTSDEVHGEQPAGPGGDADGEGASEGAGDAAEGAGDEEEAVHEAGPGGADGAVAVTDGGPFRPEGAGGLGDMGDTTPAEPPTPEGSPILKRKLGVDGVEEELPPEPEPEPEPELEPEKADAENGEKEEVPEPTPEPPKKQAPPSPPPKKEEAGGEFWGELEVQRVKFLNYLSRNFYTLRFLALFLAFAINFILLFYKVSDSPPGEDDMEGSAAGDVSGAGSGGSSGWGLGAGEEAEGDEDENMVYYFLEESTGYMEPALRCLSLLHTLVAFLCIIGYNCLKVPLVIFKREKELARKLEFDGLYITEQPEDDDVKGQWDRLVLNTPSFPSNYWDKFVKRKVLDKHGDIYGRERIAELLGMDLATLEITAHNERKPNPPPGLLTWLMSIDVKYQIWKFGVIFTDNSFLYLGWYMVMSLLGHYNNFFFAAHLLDIAMGVKTLRTILSSVTHNGKQLVMTVGLLAVVVYLYTVVAFNFFRKFYNKSEDEDEPDMKCDDMMTCYLFHMYVGVRAGGGIGDEIEDPAGDEYELYRVVFDITFFFFVIVILLAIIQGLIIDAFGELRDQQEQVKEDMETKCFICGIGSDYFDTTPHGFETHTLEEHNLANYMFFLMYLINKDETEHTGQESYVWKMYQERCWDFFPAGDCFRKQYEDQLS

SEQ ID NO: 7579 - protein, 1085 aa, Homo sapiens
MPHFTVVPVDGPRRGDYDNLEGLSWVDYGERAELDDSDGHGNHRESSPFLSPLEASRGIDYYDRNLALFEEELDIRPKVSSLLGKLVSYTNLTQGAKEHEEAESGEGTRRRAAEAPSMGTLMGVYLPCLQNIFGVILFLRLTWMVGTAGVLQALLIVLICCCCTLLTAISMSAIATNGVVPAGGSYFMISRSLGPEFGGAVGLCFYLGTTFAAAMYILGAIEILLTYIAPPAAIFYPSGAHDTSNATLNNMRVYGTIFLTFMTLVVFVGVKYVNKFASLFLACVIISILSIYAGGIKSIFDPPVFPVCMLGNRTLSRDQFDICAKTAVVDNETVATQLWSFFCHSPNLTTDSCDPYFMLNNVTEIPGIPGAAAGVLQENLWSAYLEKGDIVEKHGLPSADAPSLKESLPLYVVADIATSFTVLVGIFFPSVTGIMAGSNRSGDLRDAQKSIPVGTILAIITTSLVYFSSVVLFGACIEGVVLRDKYGDGVSRNLVVGTLAWPSPWVIVIGSFFSTCGAGLQSLTGAPRLLQAIAKDNIIPFLRVFGHGKVNGEPTWALLLTALIAELGILIASLDMVAPILSMFFLMCYLFVNLACAVQTLLRTPNWRPRFKYYHWALSFLGMSLCLALMFVSSWYYALVAMLIAGMIYKYIEYQGAEKEWGDGIRGLSLSAARYALLRLEEGPPHTKNWRPQLLVLLKLDEDLHVKYPRLLTFASQLKAGKGLTIVGSVIQGSFLESYGEAQAAEQTIKNMMEIEKVKGFCQVVVASKVREGLAHLIQSCGLGGMRHNSVVLGWPYGWRQSEDPRAWKTFIDTVRCTTAAHLALLVPKNIAFYPSNHERYLEGHIDVWWIVHDGGMLMLLPFLLRQHKVWRKCRMRIFTVAQMDDNSIQMKKDLAVFLYHLRLEAEVEVVEMHNSDISAYTYERTLMMEQRSQMLRQMRLTKTEREREAQLVKDRHSALRLESLYSDEEDESAVGADKIQMTWTRDKYMTETWDPSHAPDNFRELVHIKPDQSNVRRMHTAVKLNEVIVTRSHDARLVLLNMPGPPRNSEGDENYMEFLEVLTEGLERVLLVRGGGREVITIYS

SEQ ID NO: 7580 - protein, 1068 aa, Homo sapiens
MPHFTVVPVDGPRRGDYDNLEGLSWVDYGERAELDDSDGHGNHRESSPFLSPLEASRGIDYYDRNLALFEEELDIRPKVSSLLGKLVSYTNLTQGAKEHEEAESGEGTRRRAAEAPSMGTLMGVYLPCLQNIFGVILFLRLTWMVGTAGVLQALLIVLICCCCTLLTAISMSAIATNGVVPAGGSYFMISRSLGPEFGGAVGLCFYLGTTFAAAMYILGAIEILLTYIAPPAAIFYPSGAHDTSNATLNNMRVYGTIFLTFMTLVVFVGVKYVNKFASLFLACVIISILSIYAGGIKSIFDPPVFPVCMLGNRTLSRDQFDICAKTAVVDNETVATQLWSFFCHSPNLTTDSCDPYFMLNNVTEIPGIPGAAAGVLQENLWSAYLEKGDIVEKHGLPSADAPSLKESLPLYVVADIATSFTVLVGIFFPSVTGIMAGSNRSGDLRDAQKSIPVGTILAIITTSLVYFSSVVLFGACIEGVVLRDKYGDGVSRNLVVGTLAWPSPWVIVIGSFFSTCGAGLQSLTGAPRLLQAIAKDNIIPFLRVFGHGKVNGEPTWALLLTALIAELGILIASLDMVAPILSMFFLMCYLFVNLACAVQTLLRTPNWRPRFKYYHWALSFLGMSLCLALMFVSSWYYALVAMLIAGMIYKYIEYQGAEKEWGDGIRGLSLSAARYALLRLEEGPPHTKNWRPQLLVLLKLDEDLHVKYPRLLTFASQLKAGKGLTIVGSVIQGSFLESYGEAQAAEQTIKNMMEIEKVKGFCQVVVASKVREGLAHLIQSCGLGGMRHNSVVLGWPYGWRQSEDPRAWKTFIDTVRCTTAAHLALLVPKNIAFYPSNHERYLEGHIDVWWIVHDGGMLMLLPFLLRQHKVWRKCRMRIFTVAQMDDNSIQMKKDLAVFLYHLRLEAEVEVVEMHNSDISAYTYERTLMMEQRSQMLRQMRLTKTEREREAQLVKDRHSALRLESLYSDEEDESAVGADKIQMTWTRDKYMTETWDPSHAPDNFRELVHIKPDQSNVRRMHTAVKLNEVIVTRSHDARLVLLNMPGPPRNSEGDENCIPLWRGRQLGGG

SEQ ID NO: 7581 - protein, 1011 aa, Homo sapiens
MPHFTVVPVDGPRRGDYDNLEGLSWVDYGERAELDDSDGHGNHRESSPFLSPLEASRGIDYYDRNLALFEEELDIRPKVSSLLGKLVSYTNLTQGAKEHEEAESGEGTRRRAAEAPSMGTLMGVYLPCLQNIFGVILFLRLTWMVGTAGVLQALLIVLICCCCTLLTAISMSAIATNGVVPAGGSYFMISRSLGPEFGGAVGLCFYLGTTFAAAMYILGAIEILLTYIAPPAAIFYPSGAHDTSNATLNNMRVYGTIFLTFMTLVVFVGVKYVNKFASLFLACVIISILSIYAGGIKSIFDPPVFPVCMLGNRTLSRDQFDICAKTAVVDNETVATQLWSFFCHSPNLTTDSCDPYFMLNNVTEIPGIPGAAAGVLQENLWSAYLEKGDIVEKHGLPSADAPSLKESLPLYVVADIATSFTVLVGIFFPSVTGIMAGSNRSGDLRDAQKSIPVGTILAIITTSLVYFSSVVLFGACIEGVVLRDKYGDGVSRNLVVGTLAWPSPWVIVIGSFFSTCGAGLQSLTGAPRLLQAIAKDNIIPFLRVFGHGKVNGEPTWALLLTALIAELGILIASLDMVAPILSMFFLMCYLFVNLACAVQTLLRTPNWRPRFKYYHWALSFLGMSLCLALMFVSSWYYALVAMLIAGMIYKYIEYQGAEKEWGDGIRGLSLSAARYALLRLEEGPPHTKNWRPQLLVLLKLDEDLHVKYPRLLTFASQLKAGKGLTIVGSVIQGSFLESYGEAQAAEQTIKNMMEIEKVKGFCQVVVASKVREGLAHLIQSCGLGGMRHNSVVLGWPYGWRQSEDPRAWKTFIDTVRCTTAAHLALLVPKNIAFYPSNHERYLEGHIDVWWIVHDGGMLMLLPFLLRQHKVWRKCRMRIFTVAQMDDNSIQMKKDLAVFLYHLRLEAEVEVVEMHNSDISAYTYERTLMMEQRSQMLRQMRLTKTEREREAQLVKDRHSALRLESLYSDEEDESAVGADKIQMTWTRDKYMTETWDPSHAPDNFRELVHIKP

SEQ ID NO: 7582 - protein, 780 aa, Homo sapiens
MPHFTVVPVDGPRRGDYDNLEGLSWVDYGERAELDDSDGHGNHRESSPFLSPLEASRGIDYYDRNLALFEEELDIRPKVSSLLGKLVSYTNLTQGAKEHEEAESGEGTRRRAAEAPSMGTLMGVYLPCLQNIFGVILFLRLTWMVGTAGVLQALLIVLICCCCTLLTAISMSAIATNGVVPAGGSYFMISRSLGPEFGGAVGLCFYLGTTFAAAMYILGAIEILLTYIAPPAAIFYPSGAHDTSNATLNNMRVYGTIFLTFMTLVVFVGVKYVNKFASLFLACVIISILSIYAGGIKSIFDPPVFPVCMLGNRTLSRDQFDICAKTAVVDNETVATQLWSFFCHSPNLTTDSCDPYFMLNNVTEIPGIPGAAAGVLQENLWSAYLEKGDIVEKHGLPSADAPSLKESLPLYVVADIATSFTVLVGIFFPSVTGIMAGSNRSGDLRDAQKSIPVGTILAIITTSLVYFSSVVLFGACIEGVVLRDKYGDGVSRNLVVGTLAWPSPWVIVIGSFFSTCGAGLQSLTGAPRLLQAIAKDNIIPFLRVFGHGKVNGEPTWALLLTALIAELGILIASLDMVAPILSMFFLMCYLFVNLACAVQTLLRTPNWRPRFKYYHWALSFLGMSLCLALMFVSSWYYALVAMLIAGMIYKYIEYQGAEKEWGDGIRGLSLSAARYALLRLEEGPPHTKNWRPQLLVLLKLDEDLHVKYPRLLTFASQLKAGKGLTIVGSVIQGSFLESYGEAQAAEQTPCAALRLPTWPCSCPRTSPSTPATTSATWRAT

SEQ ID NO: 7583 - protein, 1054 aa, Homo sapiens
MGDTLSPGHGNHRESSPFLSPLEASRGIDYYDRNLALFEEELDIRPKVSSLLGKLVSYTNLTQGAKEHEEAESGEGTRRRAAEAPSMGTLMGVYLPCLQNIFGVILFLRLTWMVGTAGVLQALLIVLICCCCTLLTAISMSAIATNGVVPAGGSYFMISRSLGPEFGGAVGLCFYLGTTFAAAMYILGAIEILLTYIAPPAAIFYPSGAHDTSNATLNNMRVYGTIFLTFMTLVVFVGVKYVNKFASLFLACVIISILSIYAGGIKSIFDPPVFPVCMLGNRTLSRDQFDICAKTAVVDNETVATQLWSFFCHSPNLTTDSCDPYFMLNNVTEIPGIPGAAAGVLQENLWSAYLEKGDIVEKHGLPSADAPSLKESLPLYVVADIATSFTVLVGIFFPSVTGIMAGSNRSGDLRDAQKSIPVGTILAIITTSLVYFSSVVLFGACIEGVVLRDKYGDGVSRNLVVGTLAWPSPWVIVIGSFFSTCGAGLQSLTGAPRLLQAIAKDNIIPFLRVFGHGKVNGEPTWALLLTALIAELGILIASLDMVAPILSMFFLMCYLFVNLACAVQTLLRTPNWRPRFKYYHWALSFLGMSLCLALMFVSSWYYALVAMLIAGMIYKYIEYQGAEKEWGDGIRGLSLSAARYALLRLEEGPPHTKNWRPQLLVLLKLDEDLHVKYPRLLTFASQLKAGKGLTIVGSVIQGSFLESYGEAQAAEQTIKNMMEIEKVKGFCQVVVASKVREGLAHLIQSCGLGGMRHNSVVLGWPYGWRQSEDPRAWKTFIDTVRCTTAAHLALLVPKNIAFYPSNHERYLEGHIDVWWIVHDGGMLMLLPFLLRQHKVWRKCRMRIFTVAQMDDNSIQMKKDLAVFLYHLRLEAEVEVVEMHNSDISAYTYERTLMMEQRSQMLRQMRLTKTEREREAQLVKDRHSALRLESLYSDEEDESAVGADKIQMTWTRDKYMTETWDPSHAPDNFRELVHIKPDQSNVRRMHTAVKLNEVIVTRSHDARLVLLNMPGPPRNSEGDENYMEFLEVLTEGLERVLLVRGGGREVITIYS

SEQ ID NO: 7584 - protein, 1079 aa, Homo sapiens
MAAEGAVCGFVYLEGTAWAVPEDTEPLASCTLGHGNHRESSPFLSPLEASRGIDYYDRNLALFEEELDIRPKVSSLLGKLVSYTNLTQGAKEHEEAESGEGTRRRAAEAPSMGTLMGVYLPCLQNIFGVILFLRLTWMVGTAGVLQALLIVLICCCCTLLTAISMSAIATNGVVPAGGSYFMISRSLGPEFGGAVGLCFYLGTTFAAAMYILGAIEILLTYIAPPAAIFYPSGAHDTSNATLNNMRVYGTIFLTFMTLVVFVGVKYVNKFASLFLACVIISILSIYAGGIKSIFDPPVFPVCMLGNRTLSRDQFDICAKTAVVDNETVATQLWSFFCHSPNLTTDSCDPYFMLNNVTEIPGIPGAAAGVLQENLWSAYLEKGDIVEKHGLPSADAPSLKESLPLYVVADIATSFTVLVGIFFPSVTGIMAGSNRSGDLRDAQKSIPVGTILAIITTSLVYFSSVVLFGACIEGVVLRDKYGDGVSRNLVVGTLAWPSPWVIVIGSFFSTCGAGLQSLTGAPRLLQAIAKDNIIPFLRVFGHGKVNGEPTWALLLTALIAELGILIASLDMVAPILSMFFLMCYLFVNLACAVQTLLRTPNWRPRFKYYHWALSFLGMSLCLALMFVSSWYYALVAMLIAGMIYKYIEYQGAEKEWGDGIRGLSLSAARYALLRLEEGPPHTKNWRPQLLVLLKLDEDLHVKYPRLLTFASQLKAGKGLTIVGSVIQGSFLESYGEAQAAEQTIKNMMEIEKVKGFCQVVVASKVREGLAHLIQSCGLGGMRHNSVVLGWPYGWRQSEDPRAWKTFIDTVRCTTAAHLALLVPKNIAFYPSNHERYLEGHIDVWWIVHDGGMLMLLPFLLRQHKVWRKCRMRIFTVAQMDDNSIQMKKDLAVFLYHLRLEAEVEVVEMHNSDISAYTYERTLMMEQRSQMLRQMRLTKTEREREAQLVKDRHSALRLESLYSDEEDESAVGADKIQMTWTRDKYMTETWDPSHAPDNFRELVHIKPDQSNVRRMHTAVKLNEVIVTRSHDARLVLLNMPGPPRNSEGDENYMEFLEVLTEGLERVLLVRGGGREVITIYS

SEQ ID NO: 7585 - protein, 1087 aa, Homo sapiens
MRAGGACRPGAAGTAAGTAAGGWDGGCGGAEPARCLTSPWCQWTGRGAATMTTSRGSVGWTTGSAPSWMTRTEELDIRPKVSSLLGKLVSYTNLTQGAKEHEEAESGEGTRRRAAEAPSMGTLMGVYLPCLQNIFGVILFLRLTWMVGTAGVLQALLIVLICCCCTLLTAISMSAIATNGVVPAGGSYFMISRSLGPEFGGAVGLCFYLGTTFAAAMYILGAIEILLTYIAPPAAIFYPSGAHDTSNATLNNMRVYGTIFLTFMTLVVFVGVKYVNKFASLFLACVIISILSIYAGGIKSIFDPPVFPVCMLGNRTLSRDQFDICAKTAVVDNETVATQLWSFFCHSPNLTTDSCDPYFMLNNVTEIPGIPGAAAGVLQENLWSAYLEKGDIVEKHGLPSADAPSLKESLPLYVVADIATSFTVLVGIFFPSVTGIMAGSNRSGDLRDAQKSIPVGTILAIITTSLVYFSSVVLFGACIEGVVLRDKYGDGVSRNLVVGTLAWPSPWVIVIGSFFSTCGAGLQSLTGAPRLLQAIAKDNIIPFLRVFGHGKVNGEPTWALLLTALIAELGILIASLDMVAPILSMFFLMCYLFVNLACAVQTLLRTPNWRPRFKYYHWALSFLGMSLCLALMFVSSWYYALVAMLIAGMIYKYIEYQGAEKEWGDGIRGLSLSAARYALLRLEEGPPHTKNWRPQLLVLLKLDEDLHVKYPRLLTFASQLKAGKGLTIVGSVIQGSFLESYGEAQAAEQTIKNMMEIEKVKGFCQVVVASKVREGLAHLIQSCGLGGMRHNSVVLGWPYGWRQSEDPRAWKTFIDTVRCTTAAHLALLVPKNIAFYPSNHERYLEGHIDVWWIVHDGGMLMLLPFLLRQHKVWRKCRMRIFTVAQMDDNSIQMKKDLAVFLYHLRLEAEVEVVEMHNSDISAYTYERTLMMEQRSQMLRQMRLTKTEREREAQLVKDRHSALRLESLYSDEEDESAVGADKIQMTWTRDKYMTETWDPSHAPDNFRELVHIKPDQSNVRRMHTAVKLNEVIVTRSHDARLVLLNMPGPPRNSEGDENYMEFLEVLTEGLERVLLVRGGGREVITIYS

SEQ ID NO: 7586 - protein, 4967 aa, Homo sapiens
MADGGEGEDEIQFLRTDDEVVLQCTATIHKEQQKLCLAAEGFGNRLCFLESTSNSKNVPPDLSICTFVLEQSLSVRALQEMLANTVEKSEGQVDVEKWKFMMKTAQGGGHRTLLYGHAILLRHSYSGMYLCCLSTSRSSTDKLAFDVGLQEDTTGEACWWTIHPASKQRSEGEKVRVGDDLILVSVSSERYLHLSYGNGSLHVDAAFQQTLWSVAPISSGSEAAQGYLIGGDVLRLLHGHMDECLTVPSGEHGEEQRRTVHYEGGAVSVHARSLWRLETLRVAWSGSHIRWGQPFRLRHVTTGKYLSLMEDKNLLLMDKEKADVKSTAFTFRSSKEKLDVGVRKEVDGMGTSEIKYGDSVCYIQHVDTGLWLTYQSVDVKSVRMGSIQRKAIMHHEGHMDDGISLSRSQHEESRTARVIRSTVFLFNRFIRGLDALSKKAKASTVDLPIESVSLSLQDLIGYFHPPDEHLEHEDKQNRLRALKNRQNLFQEEGMINLVLECIDRLHVYSSAAHFADVAGREAGESWKSILNSLYELLAALIRGNRKNCAQFSGSLDWLISRLERLEASSGILEVLHCVLVESPEALNIIKEGHIKSIISLLDKHGRNHKVLDVLCSLCVCHGVAVRSNQHLICDNLLPGRDLLLQTRLVNHVSSMRPNIFLGVSEGSAQYKKWYYELMVDHTEPFVTAEATHLRVGWASTEGYSPYPGGGEEWGGNGVGDDLFSYGFDGLHLWSGCIARTVSSPNQHLLRTDDVISCCLDLSAPSISFRINGQPVQGMFENFNIDGLFFPVVSFSAGIKVRFLLGGRHGEFKFLPPPGYAPCYEAVLPKEKLKVEHSREYKQERTYTRDLLGPTVSLTQAAFTPIPVDTSQIVLPPHLERIREKLAENIHELWVMNKIELGWQYGPVRDDNKRQHPCLVEFSKLPEQERNYNLQMSLETLKTLLALGCHVGISDEHAEDKVKKMKLPKNYQLTSGYKPAPMDLSFIKLTPSQEAMVDKLAENAHNVWARDRIRQGWTYGIQQDVKNRRNPRLVPYTLLDDRTKKSNKDSLREAVRTLLGYGYNLEAPDQDHAARAEVCSGTGERFRIFRAEKTYAVKAGRWYFEFETVTAGDMRVGWSRPGCQPDQELGSDERAFAFDGFKAQRWHQGNEHYGRSWQAGDVVGCMVDMNEHTMMFTLNGEILLDDSGSELAFKDFDVGDGFIPVCSLGVAQVGRMNFGKDVSTLKYFTICGLQEGYEPFAVNTNRDITMWLSKRLPQFLQVPSNHEHIEVTRIDGTIDSSPCLKVTQKSFGSQNSNTDIMFYRLSMPIECAEVFSKTVAGGLPGAGLFGPKNDLEDYDADSDFEVLMKTAHGHLVPDRVDKDKEATKPEFNNHKDYAQEKPSRLKQRFLLRRTKPDYSTSHSARLTEDVLADDRDDYDFLMQTSTYYYSVRIFPGQEPANVWVGWITSDFHQYDTGFDLDRVRTVTVTLGDEKGKVHESIKRSNCYMVCAGESMSPGQGRNNNGLEIGCVVDAASGLLTFIANGKELSTYYQVEPSTKLFPAVFAQATSPNVFQFELGRIKNVMPLSAGLFKSEHKNPVPQCPPRLHVQFLSHVLWSRMPNQFLKVDVSRISERQGWLVQCLDPLQFMSLHIPEENRSVDILELTEQEELLKFHYHTLRLYSAVCALGNHRVAHALCSHVDEPQLLYAIENKYMPGLLRAGYYDLLIDIHLSSYATARLMMNNEYIVPMTEETKSITLFPDENKKHGLPGIGLSTSLRPRMQFSSPSFVSISNECYQYSPEFPLDILKSKTIQMLTEAVKEGSLHARDPVGGTTEFLFVPLIKLFYTLLIMGIFHNEDLKHILQLIEPSVFKEAATPEEESDTLEKELSVDDAKLQGAGEEEAKGGKRPKEGLLQMKLPEPVKLQMCLLLQYLCDCQVRHRIEAIVAFSDDFVAKLQDNQRFRYNEVMQALNMSAALTARKTKEFRSPPQEQINMLLNFKDDKSECPCPEEIRDQLLDFHEDLMTHCGIELDEDGSLDGNSDLTIRGRLLSLVEKVTYLKKKQAEKPVESDSKKSSTLQQLISETMVRWAQESVIEDPELVRAMFVLLHRQYDGIGGLVRALPKTYTINGVSVEDTINLLASLGQIRSLLSVRMGKEEEKLMIRGLGDIMNNKVFYQHPNLMRALGMHETVMEVMVNVLGGGESKEITFPKMVANCCRFLCYFCRISRQNQKAMFDHLSYLLENSSVGLASPAMRGSTPLDVAAASVMDNNELALALREPDLEKVVRYLAGCGLQSCQMLVSKGYPDIGWNPVEGERYLDFLRFAVFCNGESVEENANVVVRLLIRRPECFGPALRGEGGNGLLAAMEEAIKIAEDPSRDGPSPNSGSSKTLDTEEEEDDTIHMGNAIMTFYSALIDLLGRCAPEMHLIHAGKGEAIRIRSILRSLIPLGDLVGVISIAFQMPTIAKDGNVVEPDMSAGFCPDHKAAMVLFLDRVYGIEVQDFLLHLLEVGFLPDLRAAASLDTAALSATDMALALNRYLCTAVLPLLTRCAPLFAGTEHHASLIDSLLHTVYRLSKGCSLTKAQRDSIEVCLLSICGQLRPSMMQHLLRRLVFDVPLLNEHAKMPLKLLTNHYERCWKYYCLPGGWGNFGAASEEELHLSRKLFWGIFDALSQKKYEQELFKLALPCLSAVAGALPPDYMESNYVSMMEKQSSMDSEGNFNPQPVDTSNITIPEKLEYFINKYAEHSHDKWSMDKLANGWIYGEIYSDSSKVQPLMKPYKLLSEKEKEIYRWPIKESLKTMLAWGWRIERTREGDSMALYNRTRRISQTSQVSVDAAHGYSPRAIDMSNVTLSRDLHAMAEMMAENYHNIWAKKKKMELESKGGGNHPLLVPYDTLTAKEKAKDREKAQDILKFLQINGYAVSRGFKDLELDTPSIEKRFAYSFLQQLIRYVDEAHQYILEFDGGSRGKGEHFPYEQEIKFFAKVVLPLIDQYFKNHRLYFLSAASRPLCSGGHASNKEKEMVTSLFCKLGVLVRHRISLFGNDATSIVNCLHILGQTLDARTVMKTGLESVKSALRAFLDNAAEDLEKTMENLKQGQFTHTRNQPKGVTQIINYTTVALLPMLSSLFEHIGQHQFGEDLILEDVQVSCYRILTSLYALGTSKSIYVERQRSALGECLAAFAGAFPVAFLETHLDKHNIYSIYNTKSSRERAALSLPTNVEDVCPNIPSLEKLMEEIVELAESGIRYTQMPHVMEVILPMLCSYMSRWWEHGPENNPERAEMCCTALNSEHMNTLLGNILKIIYNNLGIDEGAWMKRLAVFSQPIINKVKPQLLKTHFLPLMEKLKKKAATVVSEEDHLKAEARGDMSEAELLILDEFTTLARDLYAFYPLLIRFVDYNRAKWLKEPNPEAEELFRMVAEVFIYWSKSHNFKREEQNFVVQNEINNMSFLITDTKSKMSKAAVSDQERKKMKRKGDRYSMQTSLIVAALKRLLPIGLNICAPGDQELIALAKNRFSLKDTEDEVRDIIRSNIHLQGKLEDPAIRWQMALYKDLPNRTDDTSDPEKTVERVLDIANVLFHLEQKSKRVGRRHYCLVEHPQRSKKAVWHKLLSKQRKRAVVACFRMAPLYNLPRHRAVNLFLQGYEKSWIETEEHYFEDKLIEDLAKPGAEPPEEDEGTKRVDPLHQLILLFSRTALTEKCKLEEDFLYMAYADIMAKSCHDEEDDDGEEEVKSFEEKEMEKQKLLYQQARLHDRGAAEMVLQTISASKGETGPMVAATLKLGIAILNGGNSTVQQKMLDYLKEKKDVGFFQSLAGLMQSCSVLDLNAFERQNKAEGLGMVTEEGSGEKVLQDDEFTCDLFRFLQLLCEGHNSDFQNYLRTQTGNNTTVNIIISTVDYLLRVQESISDFYWYYSGKDVIDEQGQRNFSKAIQVAKQVFNTLTEYIQGPCTGNQQSLAHSRLWDAVVGFLHVFAHMQMKLSQDSSQIELLKELMDLQKDMVVMLLSMLEGNVVNGTIGKQMVDMLVESSNNVEMILKFFDMFLKLKDLTSSDTFKEYDPDGKGVISKRDFHKAMESHKHYTQSETEFLLSCAETDENETLDYEEFVKRFHEPAKDIGFNVAVLLTNLSEHMPNDTRLQTFLELAESVLNYFQPFLGRIEIMGSAKRIERVYFEISESSRTQWEKPQVKESKRQFIFDVVNEGGEKEKMELFVNFCEDTIFEMQLAAQISESDLNERSANKEESEKERPEEQGPRMAFFSILTVRSALFALRYNILTLMRMLSLKSLKKQMKKVKKMTVKDMVTAFFSSYWSIFMTLLHFVASVFRGFFRIICSLLLGGSLVEGAKKIKVAELLANMPDPTQDEVRGDGEEGERKPLEAALPSEDLTDLKELTEESDLLSDIFGLDLKREGGQYKLIPHNPNAGLSDLMSNPVPMPEVQEKFQEQKAKEEEKEEKEETKSEPEKAEGEDGEKEEKAKEDKGKQKLRQLHTHRYGEPEVPESAFWKKIIAYQQKLLNYFARNFYNMRMLALFVAFAINFILLFYKVSTSSVVEGKELPTRSSSENAKVTSLDSSSHRIIAVHYVLEESSGYMEPTLRILAILHTVISFFCIIGYYCLKVPLVIFKREKEVARKLEFDGLYITEQPSEDDIKGQWDRLVINTQSFPNNYWDKFVKRKVMDKYGEFYGRDRISELLGMDKAALDFSDAREKKKPKKDSSLSAVLNSIDVKYQMWKLGVVFTDNSFLYLAWYMTMSVLGHYNNFFFAAHLLDIAMGFKTLRTILSSVTHNGKQLVLTVGLLAVVVYLYTVVAFNFFRKFYNKSEDGDTPDMKCDDMLTCYMFHMYVGVRAGGGIGDEIEDPAGDEYEIYRIIFDITFFFFVIVILLAIIQGLIIDAFGELRDQQEQVKEDMETKCFICGIGNDYFDTVPHGFETHTLQEHNLANYLFFLMYLINKDETEHTGQESYVWKMYQERCWEFFPAGDCFRKQYEDQLN

SEQ ID NO: 7587 - protein, 4975 aa, Homo sapiens
MADGGEGEDEIQFLRTDDEVVLQCTATIHKEQQKLCLAAEGFGNRLCFLESTSNSKNVPPDLSICTFVLEQSLSVRALQEMLANTVEKSEGQVDVEKWKFMMKTAQGGGHRTLLYGHAILLRHSYSGMYLCCLSTSRSSTDKLAFDVGLQEDTTGEACWWTIHPASKQRSEGEKVRVGDDLILVSVSSERYLHLSYGNGSLHVDAAFQQTLWSVAPISSGSEAAQGYLIGGDVLRLLHGHMDECLTVPSGEHGEEQRRTVHYEGGAVSVHARSLWRLETLRVAWSGSHIRWGQPFRLRHVTTGKYLSLMEDKNLLLMDKEKADVKSTAFTFRSSKEKLDVGVRKEVDGMGTSEIKYGDSVCYIQHVDTGLWLTYQSVDVKSVRMGSIQRKAIMHHEGHMDDGISLSRSQHEESRTARVIRSTVFLFNRFIRGLDALSKKAKASTVDLPIESVSLSLQDLIGYFHPPDEHLEHEDKQNRLRALKNRQNLFQEEGMINLVLECIDRLHVYSSAAHFADVAGREAGESWKSILNSLYELLAALIRGNRKNCAQFSGSLDWLISRLERLEASSGILEVLHCVLVESPEALNIIKEGHIKSIISLLDKHGRNHKVLDVLCSLCVCHGVAVRSNQHLICDNLLPGRDLLLQTRLVNHVSSMRPNIFLGVSEGSAQYKKWYYELMVDHTEPFVTAEATHLRVGWASTEGYSPYPGGGEEWGGNGVGDDLFSYGFDGLHLWSGCIARTVSSPNQHLLRTDDVISCCLDLSAPSISFRINGQPVQGMFENFNIDGLFFPVVSFSAGIKVRFLLGGRHGEFKFLPPPGYAPCYEAVLPKEKLKVEHSREYKQERTYTRDLLGPTVSLTQAAFTPIPVDTSQIVLPPHLERIREKLAENIHELWVMNKIELGWQYGPVRDDNKRQHPCLVEFSKLPEQERNYNLQMSLETLKTLLALGCHVGISDEHAEDKVKKMKLPKNYQLTSGYKPAPMDLSFIKLTPSQEAMVDKLAENAHNVWARDRIRQGWTYGIQQDVKNRRNPRLVPYTLLDDRTKKSNKDSLREAVRTLLGYGYNLEAPDQDHAARAEVCSGTGERFRIFRAEKTYAVKAGRWYFEFETVTAGDMRVGWSRPGCQPDQELGSDERAFAFDGFKAQRWHQGNEHYGRSWQAGDVVGCMVDMNEHTMMFTLNGEILLDDSGSELAFKDFDVGDGFIPVCSLGVAQVGRMNFGKDVSTLKYFTICGLQEGYEPFAVNTNRDITMWLSKRLPQFLQVPSNHEHIEVTRIDGTIDSSPCLKVTQKSFGSQNSNTDIMFYRLSMPIECAEVFSKTVAGGLPGAGLFGPKNDLEDYDADSDFEVLMKTAHGHLVPDRVDKDKEATKPEFNNHKDYAQEKPSRLKQRFLLRRTKPDYSTSHSARLTEDVLADDRDDYDFLMQTSTYYYSVRIFPGQEPANVWVGWITSDFHQYDTGFDLDRVRTVTVTLGDEKGKVHESIKRSNCYMVCAGESMSPGQGRNNNGLEIGCVVDAASGLLTFIANGKELSTYYQVEPSTKLFPAVFAQATSPNVFQFELGRIKNVMPLSAGLFKSEHKNPVPQCPPRLHVQFLSHVLWSRMPNQFLKVDVSRISERQGWLVQCLDPLQFMSLHIPEENRSVDILELTEQEELLKFHYHTLRLYSAVCALGNHRVAHALCSHVDEPQLLYAIENKYMPGLLRAGYYDLLIDIHLSSYATARLMMNNEYIVPMTEETKSITLFPDENKKHGLPGIGLSTSLRPRMQFSSPSFVSISNECYQYSPEFPLDILKSKTIQMLTEAVKEGSLHARDPVGGTTEFLFVPLIKLFYTLLIMGIFHNEDLKHILQLIEPSVFKEAATPEEESDTLEKELSVDDAKLQGAGEEEAKGGKRPKEGLLQMKLPEPVKLQMCLLLQYLCDCQVRHRIEAIVAFSDDFVAKLQDNQRFRYNEVMQALNMSAALTARKTKEFRSPPQEQINMLLNFKDDKSECPCPEEIRDQLLDFHEDLMTHCGIELDEDGSLDGNSDLTIRGRLLSLVEKVTYLKKKQAEKPVESDSKKSSTLQQLISETMVRWAQESVIEDPELVRAMFVLLHRQYDGIGGLVRALPKTYTINGVSVEDTINLLASLGQIRSLLSVRMGKEEEKLMIRGLGDIMNNKVFYQHPNLMRALGMHETVMEVMVNVLGGGESKEITFPKMVANCCRFLCYFCRISRQNQKAMFDHLSYLLENSSVGLASPAMRGSTPLDVAAASVMDNNELALALREPDLEKVVRYLAGCGLQSCQMLVSKGYPDIGWNPVEGERYLDFLRFAVFCNGESVEENANVVVRLLIRRPECFGPALRGEGGNGLLAAMEEAIKIAEDPSRDGPSPNSGSSKTLDTEEEEDDTIHMGNAIMTFYSALIDLLGRCAPEMHLIHAGKGEAIRIRSILRSLIPLGDLVGVISIAFQMPTIAKDGNVVEPDMSAGFCPDHKAAMVLFLDRVYGIEVQDFLLHLLEVGFLPDLRAAASLDTAALSATDMALALNRYLCTAVLPLLTRCAPLFAGTEHHASLIDSLLHTVYRLSKGCSLTKAQRDSIEVCLLSICGQLRPSMMQHLLRRLVFDVPLLNEHAKMPLKLLTNHYERCWKYYCLPGGWGNFGAASEEELHLSRKLFWGIFDALSQKKYEQELFKLALPCLSAVAGALPPDYMESNYVSMMEKQSSMDSEGNFNPQPVDTSNITIPEKLEYFINKYAEHSHDKWSMDKLANGWIYGEIYSDSSKVQPLMKPYKLLSEKEKEIYRWPIKESLKTMLAWGWRIERTREGDSMALYNRTRRISQTSQVSVDAAHGYSPRAIDMSNVTLSRDLHAMAEMMAENYHNIWAKKKKMELESKGGGNHPLLVPYDTLTAKEKAKDREKAQDILKFLQINGYAVSRGFKDLELDTPSIEKRFAYSFLQQLIRYVDEAHQYILEFDGGSRGKGEHFPYEQEIKFFAKVVLPLIDQYFKNHRLYFLSAASRPLCSGGHASNKEKEMVTSLFCKLGVLVRHRISLFGNDATSIVNCLHILGQTLDARTVMKTGLESVKSALRAFLDNAAEDLEKTMENLKQGQFTHTRNQPKGVTQIINYTTVALLPMLSSLFEHIGQHQFGEDLILEDVQVSCYRILTSLYALGTSKSIYVERQRSALGECLAAFAGAFPVAFLETHLDKHNIYSIYNTKSSRERAALSLPTNVEDVCPNIPSLEKLMEEIVELAESGIRYTQMPHVMEVILPMLCSYMSRWWEHGPENNPERAEMCCTALNSEHMNTLLGNILKIIYNNLGIDEGAWMKRLAVFSQPIINKVKPQLLKTHFLPLMEKLKKKAATVVSEEDHLKAEARGDMSEAELLILDEFTTLARDLYAFYPLLIRFVDYNRAKWLKEPNPEAEELFRMVAEVFIYWSKSHNFKREEQNFVVQNEINNMSFLITDTKSKMSKAAVSDQERKKMKRKGDRYSMQTSLIVAALKRLLPIGLNICAPGDQELIALAKNRFSLKDTEDEVRDIIRSNIHLQGKLEDPAIRWQMALYKDLPNRTDDTSDPEKTVERVLDIANVLFHLEQKSKRVGRRHYCLVEHPQRSKKAVWHKLLSKQRKRAVVACFRMAPLYNLPRHRAVNLFLQGYEKSWIETEEHYFEDKLIEDLAKPGAEPPEEDEGTKRVDPLHQLILLFSRTALTEKCKLEEDFLYMAYADIMAKSCHDEEDDDGEEEVKSFEVTGSQRSKEKEMEKQKLLYQQARLHDRGAAEMVLQTISASKGETGPMVAATLKLGIAILNGGNSTVQQKMLDYLKEKKDVGFFQSLAGLMQSCSVLDLNAFERQNKAEGLGMVTEEGSGEKVLQDDEFTCDLFRFLQLLCEGHNSDFQNYLRTQTGNNTTVNIIISTVDYLLRVQESISDFYWYYSGKDVIDEQGQRNFSKAIQVAKQVFNTLTEYIQGPCTGNQQSLAHSRLWDAVVGFLHVFAHMQMKLSQDSSQIELLKELMDLQKDMVVMLLSMLEGNVVNGTIGKQMVDMLVESSNNVEMILKFFDMFLKLKDLTSSDTFKEYDPDGKGVISKRDFHKAMESHKHYTQSETEFLLSCAETDENETLDYEEFVKRFHEPAKDIGFNVAVLLTNLSEHMPNDTRLQTFLELAESVLNYFQPFLGRIEIMGSAKRIERVYFEISESSRTQWEKPQVKESKRQFIFDVVNEGGEKEKMELFVNFCEDTIFEMQLAAQISESDLNERSANKEESEKERPEEQGPRMAFFSILTVRSALFALRYNILTLMRMLSLKSLKKQMKKVKKMTVKDMVTAFFSSYWSIFMTLLHFVASVFRGFFRIICSLLLGGSLVEGAKKIKVAELLANMPDPTQDEVRGDGEEGERKPLEAALPSEDLTDLKELTEESDLLSDIFGLDLKREGGQYKLIPHNPNAGLSDLMSNPVPMPEVQEKFQEQKAKEEEKEEKEETKSEPEKAEGEDGEKEEKAKEDKGKQKLRQLHTHRYGEPEVPESAFWKKIIAYQQKLLNYFARNFYNMRMLALFVAFAINFILLFYKVSTSSVVEGKELPTRSSSENAKVTSLDSSSHRIIAVHYVLEESSGYMEPTLRILAILHTVISFFCIIGYYCLKVPLVIFKREKEVARKLEFDGLYITEQPSEDDIKGQWDRLVINTQSFPNNYWDKFVKRKVMDKYGEFYGRDRISELLGMDKAALDFSDAREKKKPKKDSSLSAVLNSIDVKYQMWKLGVVFTDNSFLYLAWYMTMSVLGHYNNFFFAAHLLDIAMGFKTLRTILSSVTHNGKQLVLTVGLLAVVVYLYTVVAFNFFRKFYNKSEDGDTPDMKCDDMLTCYMFHMYVGVRAGGGIGDEIEDPAGDEYEIYRIIFDITFFFFVIVILLAIIQGLIIDAFGELRDQQEQVKEDMETKCFICGIGNDYFDTVPHGFETHTLQEHNLANYLFFLMYLINKDETEHTGQESYVWKMYQERCWEFFPAGDCFRKQYEDQLN

SEQ ID NO: 7588 - protein, 706 aa, Homo sapiens
MAGIRVTKVDWQRSRNGAAHHTQEYPCPELVVRRGQSFSLTLELSRALDCEEILIFTMETGPRASEALHTKAVFQTSELERGEGWTAAREAQMEKTLTVSLASPPSAVIGRYLLSIRLSSHRKHSNRRLGEFVLLFNPWCAEDDVFLASEEERQEYVLSDSGIIFRGVEKHIRAQGWNYGQFEEDILNICLSILDRSPGHQNNPATDVSCRHNPIYVTRVISAMVNSNNDRGVVQGQWQGKYGGGTSPLHWRGSVAILQKWLKGRYKPVKYGQCWVFAGVLCTVLRCLGIATRVVSNFNSAHDTDQNLSVDKYVDSFGRTLEDLTEDSMWNFHVWNESWFARQDLGPSYNGWQVLDATPQEESEGVFRCGPASVTAIREGDVHLAHDGPFVFAEVNADYITWLWHEDESRERVYSNTKKIGRCISTKAVGSDSRVDITDLYKYPEGSRKERQVYSKAVNRLFGVEASGRRIWIRRAGGRCLWRDDLLEPATKPSIAGKFKVLEPPMLGHDLRLALCLANLTSRAQRVRVNLSGATILYTRKPVAEILHESHAVRLGPQEEKRIPITISYSKYKEDLTEDKKILLAAMCLVTKGEKLLVEKDITLEDFITIKVLGPAMVGVAVTVEVTVVNPLIERVKDCALMVEGSGLLQEQLSIDVPTLEPQERASVQFDITPSKSGPRQLQVDLVSPHFPDIKGFVIVHVATAK

SEQ ID NO: 7589 - protein, 625 aa, Homo sapiens
MAGIRVTKVDWQRSRNGAAHHTQEYPCPELVVRRGQSFSLTLELSRALDCEEILIFTMETGPRASEALHTKAVFQTSELERGEGWTAAREAQMEKTLTVSLASPPSAVIGRYLLSIRLSSHRKHSNRRLGEFVLLFNPWCAEDDVFLASEEERQEYVLSDSGIIFRGVEKHIRAQGWNYGQFEEDILNICLSILDRSPGHQNNPATDVSCRHNPIYVTRVISAMVNSNNDRGVVQGQWQGKYGGGTSPLHWRGSVAILQKWLKGRYKPVKYGQCWVFAGVLCTVLRCLGIATRVVSNFNSAHDTDQNLSVDKYVDSFGRTLEDLTEDSMWNFHVWNESWFARQDLGPSYNGWQVLDATPQEESEGVFRCGPASVTAIREGDVHLAHDGPFVFAEVNADYITWLWHEDESRERVYSNTKKIGRCISTKAVGSDSRVDITDLYKYPEGSRKERQVYSKAVNRLFGVEASGRRIWIRRAGGRCLWRDDLLEPATKPSIAGKFKVLEPPMLGHDLRLALCLANLTSRAQRVRVNLSGATILYTRKPVAEILHESHAVRLGPQEEKRIPITISYSKYKEDLTEDKKILLAAMCLVTKGEKLLVEKDITLEDFITIKRAYPGASGEGLSPV

SEQ ID NO: 7590 - protein, 341 aa, Homo sapiens
MERAVPLAVPLGQTEVFQALQRLHMTIFSQSVSPCGKFLAAGNNYGQIAIFSLSSALSSEAKEESKKPVVTFQAHDGPVYSMVSTDRHLLSAGDGEVKAWLWAEMLKKGCKELWRRQPPYRTSLEVPEINALLLVPKENSLILAGGDCQLHTMDLETGTFTRVLRGHTDYIHCLALRERSPEVLSGGEDGAVRLWDLRTAKEVQTIEVYKHEECSRPHNGRWIGCLATDSDWMVCGGGPALTLWHLRSSTPTTIFPIRAPQKHVTFYQDLILSAGQGRCVNQWQLSGELKAQVPGSSPGLLSLSLNQQPAAPECKVLTAAGNSCRVDVFTNLGYRAFSLSF

SEQ ID NO: 7591 - protein, 317 aa, Homo sapiens
MTIFSQSVSPCGKFLAAGNNYGQIAIFSLSSALSSEAKEESKKPVVTFQAHDGPVYSMVSTDRHLLSAGDGEVKAWLWAEMLKKGCKELWRRQPPYRTSLEVPEINALLLVPKENSLILAGGDCQLHTMDLETGTFTRVLRGHTDYIHCLALRERSPEVLSGGEDGAVRLWDLRTAKEVQTIEVYKHEECSRPHNGRWIGCLATDSDWMVCGGGPALTLWHLRSSTPTTIFPIRAPQKHVTFYQDLILSAGQGRCVNQWQLSGELKAQVPGSSPGLLSLSLNQQPAAPECKVLTAAGNSCRVDVFTNLGYRAFSLSF

SEQ ID NO: 7592 - protein, 296 aa, Homo sapiens
MERAVPLAVPLGQTEVFQALQRLHMTIFSQSVSPCGKFLAAGNNYGQIAIFSLSSALSSEAKEESKKPVVTFQAHDGPVYSMVSTDRHLLSAGDGEVKAWLWAEMLKKGCKELWRRQPPYRTSLEVPEINALLLVPKENSLILAGGDCQLHTMDLETGTFTRVLRGHTDYIHCLALRERSPEVLSGGEDGAVRLWDLRTAKEVQTIEVYKHEECSRPHNGRWIGCLATDSDWMVCGGGPALTLWHLRSSTPTTIFPIRAPQKHVTFYQDLVLTAAGNSCRVDVFTNLGYRAFSLSF

SEQ ID NO: 7593 - protein, 808 aa, Homo sapiens
MWFFARDPVRDFPFELIPEPPEGGLPGPWALHRGRKKATGSPVSIFVYDVKPGAEEQTQVAKAAFKRFKTLRHPNILAYIDGLETEKCLHVVTEAVTPLGIYLKARVEAGGLKELEISWGLHQIVKALSFLVNDCSLIHNNVCMAAVFVDRAGEWKLGGLDYMYSAQGNGGGPPRKGIPELEQYDPPELADSSGRVVREKWSADMWRLGCLIWEVFNGPLPRAAALRNPGKIPKTLVPHYCELVGANPKVRPNPARFLQNCRAPGGFMSNRFVETNLFLEEIQIKEPAEKQKFFQELSKSLDAFPEDFCRHKVLPQLLTAFEFGNAGAVVLTPLFKVGKFLSAEEYQQKIIPVVVKMFSSTDRAMRIRLLQQMEQFIQYLDEPTVNTQIFPHVVHGFLDTNPAIREQTVKSMLLLAPKLNEANLNVELMKHFARLQAKDEQGPIRCNTTVCLGKIGSYLSASTRHRVLTSAFSRATRDPFAPSRVAGVLGFAATHNLYSMNDCAQKILPVLCGLTVDPEKSVRDQAFKAIRSFLSKLESVSEDPTQLEEVEKDVHAASSPGMGGAAASWAGWAVTGVSSLTSKLIRSHPTTAPTETNIPQRPTPEGVPAPAPTPVPATPTTSGHWETQEEDKDTAEDSSTADRWDDEDWGSLEQEAESVLAQQDDWSTGGQVSRASQVSNSDHKSSKSPESDWSSWEAEGSWEQGWQEPSSQEPPPDGTRLASEYNWGGPESSDKGDPFATLSARPSTQPRPDSWGEDNWEGLETDSRQVKAELARKKREERRREMEAKRAERKVAKGPMKLGARKLD

SEQ ID NO: 7594 - protein, 791 aa, Homo sapiens
MWFFARDPVRDFPFELIPEPPEGGLPGPWALHRGRKKATGSPVSIFVYDVKPGAEEQTQVAKAAFKRFKTLRHPNILAYIDGLETEKCLHVVTEAVTPLGIYLKARVEAGGLKELEISWGLHQIVKALSFLVNDCSLIHNNVCMAAVFVDRAGEWKLGGLDYMYSAQGNGGGPPRKGIPELEQYDPPELADSSGRVVREKWSADMWRLGCLIWEVFNGPLPRAAALRNPGKIPKTLVPHYCELVGANPKVRPNPARFLQNCRAPGGFMSNRFVETNLFLEEIQIKEPAEKQKFFQELSKSLDAFPEDFCRHKVLPQLLTAFEFGNAGAVVLTPLFKVGKFLSAEEYQQKIIPVVVKMFSSTDRAMRIRLLQQMEQFIQYLDEPTVNTQIFPHVVHGFLDTNPAIREQTVKSMLLLAPKLNEANLNVELMKHFARLQAKDEQGPIRCNTTVCLGKIGSYLSASTRHRVLTSAFSRATRDPFAPSRVAGVLGFAATHNLYSMNDCAQKILPVLCGLTVDPEKSVRDQAFKAIRSFLSKLESVSEDPTQLEEVEKDVHAASSPGMGGAAASWAGWAVTGVSSLTSKLIRSHPTTAPTETNIPQRPTPEGHWETQEEDKDTAEDSSTADRWDDEDWGSLEQEAESVLAQQDDWSTGGQVSRASQVSNSDHKSSKSPESDWSSWEAEGSWEQGWQEPSSQEPPPDGTRLASEYNWGGPESSDKGDPFATLSARPSTQPRPDSWGEDNWEGLETDSRQVKAELARKKREERRREMEAKRAERKVAKGPMKLGARKLD

SEQ ID NO: 7595 - protein, 707 aa, Homo sapiens
MWFFARDPVRDFPFELIPEPPEGGLPGPWALHRGRKKATGSPVSIFVYDVKPGAEEQTQVAKAAFKRFKTLRHPNILAYIDGLETEKCLHVVTEAVTPLGIYLKARVEAGGLKELEISWGLHQIVKALSFLVNDCSLIHNNVCMAAVFVDRAGEWKLGGLDYMYSAQGNGGGPPRKGIPELEQYDPPELADSSGRVVREKWSADMWRLGCLIWEVFNGPLPRAAALRNPGKIPKTLVPHYCELVGANPKVRPNPARFLQNCRAPGGFMSNRFVETNLFLEEIQIKEPAEKQKFFQELSKSLDAFPEDFCRHKVLPQLLTAFEFGNAGAVVLTPLFKVGKFLSAEEYQQKIIPVVVKMFSSTDRAMRIRLLQQMEQFIQYLDEPTVNTQIFPHVVHGFLDTNPAIREQTVKSMLLLAPKLNEANLNVELMKHFARLQAKDEQGPIRCNTTVCLGKIGSYLSASTRHRVLTSAFSRATRDPFAPSRVAGVLGFAATHNLYSMNDCAQKILPVLCGLTVDPEKSVRDQAFKAIRSFLSKLESVSEDPTQLEEVEKDVHAASSPGMGGAAASWAGWAVTGVSSLTSKLIRSHPTTAPTETNIPQRPTPEGHWETQEPPPDGTRLASEYNWGGPESSDKGDPFATLSARPSTQPRPDSWGEDNWEGLETDSRQVKAELARKKREERRREMEAKRAERKVAKGPMKLGARKLD

SEQ ID NO: 7596 - protein, 781 aa, Homo sapiens
MWFFARDPVRDFPFELIPEPPEGGLPGPWALHRGRKKATGSPVSIFVYDVKPGAEEQTQVAKAAFKRFKTLRHPNILAYIDGLETEKCLHVVTEAVTPLGIYLKARVEAGGLKELEISWGLHQIVKALSFLVNDCSLIHNNVCMAAVFVDRAGEWKLGGLDYMYSAQGNGGGPPRKGIPELEQYDPPELADSSGRVVREKWSADMWRLGCLIWEVFNGPLPRAAALRNPGKIPKTLVPHYCELVGANPKVRPNPARFLQNCRAPGGFMSNRFVETNLFLEEIQIKEPAEKQKFFQELSKSLDAFPEDFCRHKVLPQLLTAFEFGNAGAVVLTPLFKVGKFLSAEEYQQKIIPVVVKMFSSTDRAMRIRLLQQMEQFIQYLDEPTVNTQIFPHVVHGFLDTNPAIREQTVKSMLLLAPKLNEANLNVELMKHFARLQAKDEQGPIRCNTTVCLGKIGSYLSASTRHRVLTSAFSRATRDPFAPSRVAGVLGFAATHNLYSMNDCAQKILPVLCGLTVDPEKSVRDQAFKAIRSFLSKLESVSEDPTQLEEVEKDVHAASSPGMGGAAASWAGWAVTGVSSLTSKLIRSHPTTAPTETNIPQRPTPEGVPAPAPTPVPATPTTSGHWETQEEDKDTAEDSSTADRWDDEDWGSLEQEAESVLAQQDDWSTGGQVSRASQVSNSDHKSSKSPESDWSSWEAEGSWEQGWQEPSSQEPPPDGTRLASEYNWGGPESSDKGDPFATLSARPSTQDRSRLSWPGRSARSGGGRWRPNAPRGRWPRAP

SEQ ID NO: 7597 - protein, 626 aa, Homo sapiens
MWFFARDPVRDFPFELIPEPPEGGLPGPWALHRGRKKATGSPVSIFVYDVKPGAEEQTQVAKAAFKRFKTLRHPNILAYIDGLETEKCLHVVTEAVTPLGIYLKARVEAGGLKELEISWGLHQIVKALSFLVNDCSLIHNNVCMAAVFVDRAGEWKLGGLDYMYSAQGNGGGPPRKGIPELEQYDPPELADSSGRVVREKWSADMWRLGCLIWEVFNGPLPRAAALRNPGKIPKTLVPHYCELVGANPKVRPNPARFLQNCRAPGGFMSNRFVETNLFLEEIQIKEPAEKQKFFQELSKSLDAFPEDFCRHKVLPQLLTAFEFGNAGAVVLTPLFKVGKFLSAEEYQQKIIPVVVKMFSSTDRAMRIRLLQQMEQFIQYLDEPTVNTQIFPHVVHGFLDTNPAIREQTVKSMLLLAPKLNEANLNVELMKHFARLQAKDEQGPIRCNTTVCLGKIGSYLSASTRHRVLTSAFSRATRDPFAPSRVAGVLGFAATHNLYSMNDCAQKILPVLCGLTVDPEKSVRDQAFKAIRSFLSKLESVSEDPTQLEEVEKDVHAASSPGMGGAAASWAGWAVTGVSSLTSKLIRSHPTTAPTETNIPQRPSRPARRPLGDAGGGQGHSRGQQHC

SEQ ID NO: 7598 - protein, 787 aa, Homo sapiens
MWFFARDPVRDFPFELIPEPPEGGLPGPWALHRGRKKATGSPVSIFVYDVKPGAEEQTQVAKAAFKRFKTLRHPNILAYIDGLETEKCLHVVTEAVTPLGIYLKARVEAGGLKELEISWGLHQIVKALSFLVNDCSLIHNNVCMAAVFVDRAGEWKLGGLDYMYSAQGNGGGPPRKGIPELEQYDPPELADSSGRVVREKWSADMWRLGCLIWEVFNGPLPRAAALRNPGKIPKTLVPHYCELVGANPKVRPNPARFLQNCRAPGGFMSNRFVETNLFLEEIQIKEPAEKQKFFQELSKSLDAFPEDFCRHKVLPQLLTAFEFGNAGAVVLTPLFKVGKFLSAEEYQQKIIPVVVKMFSSTDRAMRIRLLQQMEQFIQYLDEPTVNTQIFPHVVHGFLDTNPAIREQTVKSMLLLAPKLNEANLNVELMKHFARLQAKDEQGPIRCNTTVCLGKIGSYLSASTRHRVLTSAFSRATRDPFAPSRVAGVLGFAATHNLYSMNDCAQKILPVLCGLTVDPEKSVRDQAFKAIRSFLSKLESVSEDPTQLEEVEKDVHAASSPGMGGAAASWAGWAVTGVSSLTSKLIRSHPTTAPTETNIPQRPTPEGVPAPAPTPVPATPTTSGHWETQEEDKDTAEDSSTADRWDDEDWGSLEQEAESVLAQQDDWSTGGQVSRASQSPTGAAGKLRAPGNRAGRSQAPRSHLLTVHGWPASITGVAQSPATRATPSLPCLHVPAPSRGQTLGVRTTGRASRLTVDRSRLSWPGRSARSGGGRWRPNAPRGRWPRAP

SEQ ID NO: 7599 - protein, 1324 aa, Homo sapiens
MSRRKQAKPQHFQSDPEVASLPRRDGDTEKGQPSRPTKSKDAHVCGRCCAEFFELSDLLLHKKNCTKNQLVLIVNENPASPPETFSPSPPPDNPDEQMNDTVNKTDQVDCSDLSEHNGLDREESMEVEAPVANKSGSGTSSGSHSSTAPSSSSSSSSSSGGGGSSSTGTSAITTSLPQLGDLTTLGNFSVINSNVIIENLQSTKVAVAQFSQEARCGGASGGKLAVPALMEQLLALQQQQIHQLQLIEQIRHQILLLASQNADLPTSSSPSQGTLRTSANPLSTLSSHLSQQLAAAAGLAQSLASQSASISGVKQLPPIQLPQSSSGNTIIPSNSGSSPNMNILAAAVTTPSSEKVASSAGASHVSNPAVSSSSSPAFAISSLLSPASNPLLPQQASANSVFPSPLPNIGTTAEDLNSLSALAQQRKSKPPNVTAFEAKSTSDEAFFKHKCRFCAKVFGSDSALQIHLRSHTGERPFKCNICGNRFSTKGNLKVHFQRHKEKYPHIQMNPYPVPEHLDNIPTSTGIPYGMSIPPEKPVTSWLDTKPVLPTLTTSVGLPLPPTLPSLIPFIKTEEPAPIPISHSATSPPGSVKSDSGGPESATRNLGGLPEEAEGSTLPPSGGKSEESGMVTNSVPTASSSVLSSPAADCGPAGSATTFTNPLLPLMSEQFKAKFPFGGLLDSAQASETSKLQQLVENIDKKATDPNECIICHRVLSCQSALKMHYRTHTGERPFKCKICGRAFTTKGNLKTHYSVHRAMPPLRVQHSCPICQKKFTNAVVLQQHIRMHMGGQIPNTPVPDSYSESMESDTGSFDEKNFDDLDNFSDENMEDCPEGSIPDTPKSADASQDSLSSSPLPLEMSSIAALENQMKMINAGLAEQLQASLKSVENGSIEGDVLTNDSSSVGGDMESQSAGSPAISESTSSMQALSPSNSTQEFHKSPSIEEKPQRAVPSEFANGLSPTPVNGGALDLTSSHAEKIIKEDSLGILFPFRDRGKFKNTACDICGKTFACQSALDIHYRSHTKERPFICTVCNRGFSTKGNLKQHMLTHQMRDLPSQLFEPSSNLGPNQNSAVIPANSLSSLIKTEVNGFVHVSPQDSKDTPTSHVPSGPLSSSATSPVLLPALPRRTPKQHYCNTCGKTFSSSSALQIHERTHTGEKPFACTICGRAFTTKGNLKVHMGTHMWNSTPARRGRRLSVDGPMTFLGGNPVKFPEMFQKDLAARSGSGDPSSFWNQYAAALSNGLAMKANEISVIQNGGIPPIPGSLGSGNSSPVSGLTGNLERLQNSEPNAPLAGLEKMASSENGTNFRFTRFVEDSKEIVTS

SEQ ID NO: 7600 - protein, 1227 aa, Homo sapiens
MNDTVNKTDQVDCSDLSEHNGLDREESMEVEAPVANKSGSGTSSGSHSSTAPSSSSSSSSSSGGGGSSSTGTSAITTSLPQLGDLTTLGNFSVINSNVIIENLQSTKVAVAQFSQEARCGGASGGKLAVPALMEQLLALQQQQIHQLQLIEQIRHQILLLASQNADLPTSSSPSQGTLRTSANPLSTLSSHLSQQLAAAAGLAQSLASQSASISGVKQLPPIQLPQSSSGNTIIPSNSGSSPNMNILAAAVTTPSSEKVASSAGASHVSNPAVSSSSSPAFAISSLLSPASNPLLPQQASANSVFPSPLPNIGTTAEDLNSLSALAQQRKSKPPNVTAFEAKSTSDEAFFKHKCRFCAKVFGSDSALQIHLRSHTGERPFKCNICGNRFSTKGNLKVHFQRHKEKYPHIQMNPYPVPEHLDNIPTSTGIPYGMSIPPEKPVTSWLDTKPVLPTLTTSVGLPLPPTLPSLIPFIKTEEPAPIPISHSATSPPGSVKSDSGGPESATRNLGGLPEEAEGSTLPPSGGKSEESGMVTNSVPTASSSVLSSPAADCGPAGSATTFTNPLLPLMSEQFKAKFPFGGLLDSAQASETSKLQQLVENIDKKATDPNECIICHRVLSCQSALKMHYRTHTGERPFKCKICGRAFTTKGNLKTHYSVHRAMPPLRVQHSCPICQKKFTNAVVLQQHIRMHMGGQIPNTPVPDSYSESMESDTGSFDEKNFDDLDNFSDENMEDCPEGSIPDTPKSADASQDSLSSSPLPLEMSSIAALENQMKMINAGLAEQLQASLKSVENGSIEGDVLTNDSSSVGGDMESQSAGSPAISESTSSMQALSPSNSTQEFHKSPSIEEKPQRAVPSEFANGLSPTPVNGGALDLTSSHAEKIIKEDSLGILFPFRDRGKFKNTACDICGKTFACQSALDIHYRSHTKERPFICTVCNRGFSTKGNLKQHMLTHQMRDLPSQLFEPSSNLGPNQNSAVIPANSLSSLIKTEVNGFVHVSPQDSKDTPTSHVPSGPLSSSATSPVLLPALPRRTPKQHYCNTCGKTFSSSSALQIHERTHTGEKPFACTICGRAFTTKGNLKVHMGTHMWNSTPARRGRRLSVDGPMTFLGGNPVKFPEMFQKDLAARSGSGDPSSFWNQYAAALSNGLAMKANEISVIQNGGIPPIPGSLGSGNSSPVSGLTGNLERLQNSEPNAPLAGLEKMASSENGTNFRFTRFVEDSKEIVTS

SEQ ID NO: 7601 - protein, 1300 aa, Homo sapiens
MSRRKQAKPQHLKSDEELLPPDGAPEHAAPGEGAEDADSGPESRSGGEETSVCEKCCAEFFKWADFLEHQRSCTKLPPVLIVHEDAPAPPPEDFPEPSPASSPSERAESEAAEEAGAEGAEGEARPVEKEAEPMDAEPAGDTRAPRPPPAAPAPPTPAYGAPSTNVTLEALLSTKVAVAQFSQGARAAGGSGAGGGVAAAAVPLILEQLMALQQQQIHQLQLIEQIRSQVALMQRPPPRPSLSPAAAPSAPGPAPSQLPGLAALPLSAGAPAAAIAGSGPAAPAAFEGAQPLSRPESGASTPGGPAEPSAPAAPSAAPAPAAPAPAPAPQSAASSQPQSASTPPALAPGSLLGAAPGLPSPLLPQTSASGVIFPNPLVSIAATANALDPLSALMKHRKGKPPNVSVFEPKASAEDPFFKHKCRFCAKVFGSDSALQIHLRSHTGERPFKCNICGNRFSTKGNLKVHFQRHKEKYPHIQMNPYPVPEYLDNVPTCSGIPYGMSLPPEKPVTTWLDSKPVLPTVPTSVGLQLPPTVPGAHGYADSPSATPASRSPQRPSPASSECASLSPGLNHVESGVSATAESPQSLLGGPPLTKAEPVSLPCTNARAGDAPVGAQASAAPTSVDGAPTSLGSPGLPAVSEQFKAQFPFGGLLDSMQTSETSKLQQLVENIDKKMTDPNQCVICHRVLSCQSALKMHYRTHTGERPFKCKICGRAFTTKGNLKTHFGVHRAKPPLRVQHSCPICQKKFTNAVVLQQHIRMHMGGQIPNTPLPEGFQDAMDSELAYDDKNAETLSSYDDDMDENSMEDDAELKDAATDPAKPLLSYAGSCPPSPPSVISSIAALENQMKMIDSVMSCQQLTGLKSVENGSGESDRLSNDSSSAVGDLESRSAGSPALSESSSSQALSPAPSNGESFRSKSPGLGAPEEPQEIPLKTERPDSPAAAPGSGGAPGRAGIKEEAPFSLLFLSRERGKCPSTVCGVCGKPFACKSALEIHYRSHTKERPFVCALCRRGCSTMGNLKQHLLTHRLKELPSQLFDPNFALGPSQSTPSLISSAAPTMIKMEVNGHGKAMALGEGPPLPAGVQVPAGPQTVMGPGLAPMLAPPPRRTPKQHNCQSCGKTFSSASALQIHERTHTGEKPFGCTICGRAFTTKGNLKVHMGTHMWNNAPARRGRRLSVENPMALLGGDALKFSEMFQKDLAARAMNVDPSFWNQYAAAITNGLAMKNNEISVIQNGGIPQLPVSLGGSALPPLGSMASGMDKARTGSSPPIVSLDKASSETAASRPFTRFIEDNKEIGIN

SEQ ID NO: 7602 - protein, 1228 aa, Homo sapiens
MSRRKQAKPQHLKSDEELLPPDGAPEHAAPGEGAEDADSGPESRSGGEETSVCEKCCAEFFKWADFLEHQRSCTKLPPVLIVHEDAPAPPPEDFPEPSPASSPSERAESEAAEEAGAEGAEGEARPVEKEAEPMDAEPAGDTRAPRPPPAAPAPPTPAYGAPSTNVTLEALLSTKVAVAQFSQGARAAGGSGAGGGVAAAAVPLILEQLMALQQQQIHQLQLIEQIRSQVALMQRPPPRPSLSPAAAPSAPGPAPSQLPGLAALPLSAGAPAAAIAGSGPAAPAAFEGAQPLSRPESGASTPGGPAEPSAPAAPSAAPAPAAPAPAPAPQSAASSQPQSASTPPALAPGSLLGAAPGLPSPLLPQTSASGVIFPNPLVSIAATANALDPLSALMKHRKGKPPNVSVFEPKASAEDPFFKHKCRFCAKVFGSDSALQIHLRSHTGERPFKCNICGNRFSTKGNLKVHFQRHKEKYPHIQMNPYPVPEYLDNVPTCSGIPYGMSLPPEKPVTTWLDSKPVLPTVPTSVGLQLPPTVPGAHGYADSPSATPASRSPQRPSPASSECASLSPGLNHVESGVSATAESPQSLLGGPPLTKAEPVSLPCTNARAGDAPVGAQASAAPTSVDGAPTSLGSPGLPAVSEQFKAQFPFGGLLDSMQTSETSKLQQLVENIDKKMTDPNQCVICHRVLSCQSALKMHYRTHTGERPFKCKICGRAFTTKGNLKTHFGVHRAKPPLRVQHSCPICQKKFTNAVVLQQHIRMHMGGQIPNTPLPEGFQDAMDSELAYDDKNAETLSSYDDDMDENSMEDDAELKDAATDPAKPLLSYAGSCPPSPPSVISSIAALENQMKMIDSVMSCQQLTGLKSVENGSGESDRLSNDSSSAVGDLESRSAGSPALSESSSSQALSPAPSNGESFRSKSPGLGAPEEPQEIPLKTERPDSPAAAPGSGGAPGRAGIKEEAPFSLLFLSRERGPSQSTPSLISSAAPTMIKMEVNGHGKAMALGEGPPLPAGVQVPAGPQTVMGPGLAPMLAPPPRRTPKQHNCQSCGKTFSSASALQIHERTHTGEKPFGCTICGRAFTTKGNLKVHMGTHMWNNAPARRGRRLSVENPMALLGGDALKFSEMFQKDLAARAMNVDPSFWNQYAAAITNGLAMKNNEISVIQNGGIPQLPVSLGGSALPPLGSMASGMDKARTGSSPPIVSLDKASSETAASRPFTRFIEDNKEIGIN

SEQ ID NO: 7603 - protein, 1095 aa, Homo sapiens
MDAEPAGDTRAPRPPPAAPAPPTPAYGAPSTNVTLEALLSTKVAVAQFSQGARAAGGSGAGGGVAAAAVPLILEQLMALQQQQIHQLQLIEQIRSQVALMQRPPPRPSLSPAAAPSAPGPAPSQLPGLAALPLSAGAPAAAIAGSGPAAPAAFEGAQPLSRPESGASTPGGPAEPSAPAAPSAAPAPAAPAPAPAPQSAASSQPQSASTPPALAPGSLLGAAPGLPSPLLPQTSASGVIFPNPLVSIAATANALDPLSALMKHRKGKPPNVSVFEPKASAEDPFFKHKCRFCAKVFGSDSALQIHLRSHTGERPFKCNICGNRFSTKGNLKVHFQRHKEKYPHIQMNPYPVPEYLDNVPTCSGIPYGMSLPPEKPVTTWLDSKPVLPTVPTSVGLQLPPTVPGAHGYADSPSATPASRSPQRPSPASSECASLSPGLNHVESGVSATAESPQSLLGGPPLTKAEPVSLPCTNARAGDAPVGAQASAAPTSVDGAPTSLGSPGLPAVSEQFKAQFPFGGLLDSMQTSETSKLQQLVENIDKKMTDPNQCVICHRVLSCQSALKMHYRTHTGERPFKCKICGRAFTTKGNLKTHFGVHRAKPPLRVQHSCPICQKKFTNAVVLQQHIRMHMGGQIPNTPLPEGFQDAMDSELAYDDKNAETLSSYDDDMDENSMEDDAELKDAATDPAKPLLSYAGSCPPSPPSVISSIAALENQMKMIDSVMSCQQLTGLKSVENGSGESDRLSNDSSSAVGDLESRSAGSPALSESSSSQALSPAPSNGESFRSKSPGLGAPEEPQEIPLKTERPDSPAAAPGSGGAPGRAGIKEEAPFSLLFLSRERGPSQSTPSLISSAAPTMIKMEVNGHGKAMALGEGPPLPAGVQVPAGPQTVMGPGLAPMLAPPPRRTPKQHNCQSCGKTFSSASALQIHERTHTGEKPFGCTICGRAFTTKGNLKVHMGTHMWNNAPARRGRRLSVENPMALLGGDALKFSEMFQKDLAARAMNVDPSFWNQYAAAITNGLAMKNNEISVIQNGGIPQLPVSLGGSALPPLGSMASGMDKARTGSSPPIVSLDKASSETAASRPFTRFIEDNKEIGIN

SEQ ID NO: 7604 - protein, 1167 aa, Homo sapiens
MDAEPAGDTRAPRPPPAAPAPPTPAYGAPSTNVTLEALLSTKVAVAQFSQGARAAGGSGAGGGVAAAAVPLILEQLMALQQQQIHQLQLIEQIRSQVALMQRPPPRPSLSPAAAPSAPGPAPSQLPGLAALPLSAGAPAAAIAGSGPAAPAAFEGAQPLSRPESGASTPGGPAEPSAPAAPSAAPAPAAPAPAPAPQSAASSQPQSASTPPALAPGSLLGAAPGLPSPLLPQTSASGVIFPNPLVSIAATANALDPLSALMKHRKGKPPNVSVFEPKASAEDPFFKHKCRFCAKVFGSDSALQIHLRSHTGERPFKCNICGNRFSTKGNLKVHFQRHKEKYPHIQMNPYPVPEYLDNVPTCSGIPYGMSLPPEKPVTTWLDSKPVLPTVPTSVGLQLPPTVPGAHGYADSPSATPASRSPQRPSPASSECASLSPGLNHVESGVSATAESPQSLLGGPPLTKAEPVSLPCTNARAGDAPVGAQASAAPTSVDGAPTSLGSPGLPAVSEQFKAQFPFGGLLDSMQTSETSKLQQLVENIDKKMTDPNQCVICHRVLSCQSALKMHYRTHTGERPFKCKICGRAFTTKGNLKTHFGVHRAKPPLRVQHSCPICQKKFTNAVVLQQHIRMHMGGQIPNTPLPEGFQDAMDSELAYDDKNAETLSSYDDDMDENSMEDDAELKDAATDPAKPLLSYAGSCPPSPPSVISSIAALENQMKMIDSVMSCQQLTGLKSVENGSGESDRLSNDSSSAVGDLESRSAGSPALSESSSSQALSPAPSNGESFRSKSPGLGAPEEPQEIPLKTERPDSPAAAPGSGGAPGRAGIKEEAPFSLLFLSRERGKCPSTVCGVCGKPFACKSALEIHYRSHTKERPFVCALCRRGCSTMGNLKQHLLTHRLKELPSQLFDPNFALGPSQSTPSLISSAAPTMIKMEVNGHGKAMALGEGPPLPAGVQVPAGPQTVMGPGLAPMLAPPPRRTPKQHNCQSCGKTFSSASALQIHERTHTGEKPFGCTICGRAFTTKGNLKVHMGTHMWNNAPARRGRRLSVENPMALLGGDALKFSEMFQKDLAARAMNVDPSFWNQYAAAITNGLAMKNNEISVIQNGGIPQLPVSLGGSALPPLGSMASGMDKARTGSSPPIVSLDKASSETAASRPFTRFIEDNKEIGIN

SEQ ID NO: 7605 - protein, 770 aa, Homo sapiens
MPASAARPRPGPGQPTASPFPLLLLAVLSGPVSGRVPRSVPRTSLPISEADSCLTRFAVPHTYNYSVLLVDPASHTLYVGARDTIFALSLPFSGERPRRIDWMVPEAHRQNCRKKGKKEDECHNFVQILAIANASHLLTCGTFAFDPKCGVIDVSRFQQVERLESGRGKCPFEPAQRSAAVMAGGVLYAATVKNYLGTEPIITRAVGRAEDWIRTDTLPSWLNAPAFVAAVALSPAEWGDEDGDDEIYFFFTETSRAFDSYERIKVPRVARVCAGDLGGRKTLQQRWTTFLKADLLCPGPEHGRASSVLQDVAVLRPELGAGTPIFYGIFSSQWEGATISAVCAFRPQDIRTVLNGPFRELKHDCNRGLPVVDNDVPQPRPGECITNNMKLRHFGSSLSLPDRVLTFIRDHPLMDRPVFPADGHPLLVTTDTAYLRVVAHRVTSLSGKEYDVLYLGTEDGHLHRAVRIGAQLSVLEDLALFPEPQPVENMKLYHSWLLVGSRTEVTQVNTTNCGRLQSCSECILAQDPVCAWSFRLDECVAHAGEHRGLVQDIESADVSSLCPKEPGERPVVFEVPVATAAHVVLPCSPSSAWASCVWHQPSGVTALTPRRDGLEVVVTPGAMGAYACECQEGGAAHVVAAYSLVWGSQRDAPSRAHTVGAGLAGFFLGILAASLTLILIGRRQQRRRQRELLARDKVGLDLGAPPSGTTSYSQDPPSPSPEDERLPLALAKRGSGFGGFSPPFLLDPCPSPAHIRLTGAPLATCDETSI

SEQ ID NO: 7606 - protein, 615 aa, Homo sapiens
MPASAARPRPGPGQPTASPFPLLLLAVLSGPVSGRVPRSVPRTSLPISEADSCLTRFAVPHTYNYSVLLVDPASHTLYVGARDTIFALSLPFSGERPRRIDWMVPEAHRQNCRKKGKKEGDLGGRKTLQQRWTTFLKADLLCPGPEHGRASSVLQDVAVLRPELGAGTPIFYGIFSSQWEGATISAVCAFRPQDIRTVLNGPFRELKHDCNRGLPVVDNDVPQPRPGECITNNMKLRHFGSSLSLPDRVLTFIRDHPLMDRPVFPADGHPLLVTTDTAYLRVVAHRVTSLSGKEYDVLYLGTEDGHLHRAVRIGAQLSVLEDLALFPEPQPVENMKLYHSWLLVGSRTEVTQVNTTNCGRLQSCSECILAQDPVCAWSFRLDECVAHAGEHRGLVQDIESADVSSLCPKEPGERPVVFEVPVATAAHVVLPCSPSSAWASCVWHQPSGVTALTPRRDGLEVVVTPGAMGAYACECQEGGAAHVVAAYSLVWGSQRDAPSRAHTVGAGLAGFFLGILAASLTLILIGRRQQRRRQRELLARDKVGLDLGAPPSGTTSYSQDPPSPSPEDERLPLALAKRGSGFGGFSPPFLLDPCPSPAHIRLTGAPLATCDETSI

SEQ ID NO: 7607 - protein, 1836 aa, Homo sapiens
MARPSLCTLVPLGPECLRPFTRESLAAIEQRAVEEEARLQRNKQMEIEEPERKPRSDLEAGKNLPMIYGDPPPEVIGIPLEDLDPYYSNKKTFIVLNKGKAIFRFSATPALYLLSPFSVVRRGAIKVLIHALFSMFIMITILTNCVFMTMSDPPPWSKNVEYTFTGIYTFESLIKILARGFCVDDFTFLRDPWNWLDFSVIMMAYLTEFVDLGNISALRTFRVLRALKTITVIPGLKTIVGALIQSVKKLSDVMILTVFCLSVFALVGLQLFMGNLRQKCVRWPPPFNDTNTTWYSNDTWYGNDTWYGNEMWYGNDSWYANDTWNSHASWATNDTFDWDAYISDEGNFYFLEGSNDALLCGNSSDAGHCPEGYECIKTGRNPNYGYTSYDTFSWAFLALFRLMTQDYWENLFQLTLRAAGKTYMIFFVVIIFLGSFYLINLILAVVAMAYAEQNEATLAEDKEKEEEFQQMLEKFKKHQEELEKAKAAQALEGGEADGDPAHGKDCNGSLDTSQGEKGAPRQSSSGDSGISDAMEELEEAHQKCPPWWYKCAHKVLIWNCCAPWLKFKNIIHLIVMDPFVDLGITICIVLNTLFMAMEHYPMTEHFDNVLTVGNLVFTGIFTAEMVLKLIAMDPYEYFQQGWNIFDSIIVTLSLVELGLANVQGLSVLRSFRLLRVFKLAKSWPTLNMLIKIIGNSVGALGNLTLVLAIIVFIFAVVGMQLFGKSYKECVCKIALDCNLPRWHMHDFFHSFLIVFRILCGEWIETMWDCMEVAGQAMCLTVFLMVMVIGNLVVLNLFLALLLSSFSADSLAASDEDGEMNNLQIAIGRIKLGIGFAKAFLLGLLHGKILSPKDIMLSLGEADGAGEAGEAGETAPEDEKKEPPEEDLKKDNHILNHMGLADGPPSSLELDHLNFINNPYLTIQVPIASEESDLEMPTEEETDTFSEPEDSKKPPQPLYDGNSSVCSTADYKPPEEDPEEQAEENPEGEQPEECFTEACVQRWPCLYVDISQGRGKKWWTLRRACFKIVEHNWFETFIVFMILLSSGALAFEDIYIEQRRVIRTILEYADKVFTYIFIMEMLLKWVAYGFKVYFTNAWCWLDFLIVDVSIISLVANWLGYSELGPIKSLRTLRALRPLRALSRFEGMRVVVNALLGAIPSIMNVLLVCLIFWLIFSIMGVNLFAGKFYYCINTTTSERFDISEVNNKSECESLMHTGQVRWLNVKVNYDNVGLGYLSLLQVATFKGWMDIMYAAVDSREKEEQPQYEVNLYMYLYFVIFIIFGSFFTLNLFIGVIIDNFNQQKKKLGGKDIFMTEEQKKYYNAMKKLGSKKPQKPIPRPQNKIQGMVYDLVTKQAFDITIMILICLNMVTMMVETDNQSQLKVDILYNINMIFIIIFTGECVLKMLALRQYYFTVGWNIFDFVVVILSIVGLALSDLIQKYFVSPTLFRVIRLARIGRVLRLIRGAKGIRTLLFALMMSLPALFNIGLLLFLVMFIYSIFGMSNFAYVKKESGIDDMFNFETFGNSIICLFEITTSAGWDGLLNPILNSGPPDCDPNLENPGTSVKGDCGNPSIGICFFCSYIIISFLIVVNMYIAIILENFNVATEESSEPLGEDDFEMFYETWEKFDPDATQFIAYSRLSDFVDTLQEPLRIAKPNKIKLITLDLPMVPGDKIHCLDILFALTKEVLGDSGEMDALKQTMEEKFMAANPSKVSYEPITTTLKRKHEEVCAIKIQRAYRRHLLQRSMKQASYMYRHSHDGSGDDAPEKEGLLANTMSKMYGHENGNSSSPSPEEKGEAGDAGPTMGLMPISPSDTAWPPAPPPGQTVRPGVKESLV

SEQ ID NO: 7608 - protein, 2000 aa, Homo sapiens
MAQALLVPPGPESFRLFTRESLAAIEKRAAEEKAKKPKKEQDNDDENKPKPNSDLEAGKNLPFIYGDIPPEMVSEPLEDLDPYYINKKTFIVMNKGKAIFRFSATSALYILTPLNPVRKIAIKILVHSLFSMLIMCTILTNCVFMTLSNPPDWTKNVEYTFTGIYTFESLIKILARGFCLEDFTFLRDPWNWLDFSVIVMAYVTEFVSLGNVSALRTFRVLRALKTISVIPGLKTIVGALIQSVKKLSDVMILTVFCLSVFALIGLQLFMGNLRNKCLQWPPSDSAFETNTTSYFNGTMDSNGTFVNVTMSTFNWKDYIGDDSHFYVLDGQKDPLLCGNGSDAGQCPEGYICVKAGRNPNYGYTSFDTFSWAFLSLFRLMTQDYWENLYQLTLRAAGKTYMIFFVLVIFLGSFYLVNLILAVVAMAYEEQNQATLEEAEQKEAEFQQMLEQLKKQQEEAQAVAAASAASRDFSGIGGLGELLESSSEASKLSSKSAKEWRNRRKKRRQREHLEGNNKGERDSFPKSESEDSVKRSSFLFSMDGNRLTSDKKFCSPHQSLLSIRGSLFSPRRNSKTSIFSFRGRAKDVGSENDFADDEHSTFEDSESRRDSLFVPHRHGERRNSNVSQASMSSRMVPGLPANGKMHSTVDCNGVVSLVGGPSALTSPTGQLPPEGTTTETEVRKRRLSSYQISMEMLEDSSGRQRAVSIASILTNTMEELEESRQKCPPCWYRFANVFLIWDCCDAWLKVKHLVNLIVMDPFVDLAITICIVLNTLFMAMEHYPMTEQFSSVLTVGNLVFTGIFTAEMVLKIIAMDPYYYFQEGWNIFDGIIVSLSLMELGLSNVEGLSVLRSFRLLRVFKLAKSWPTLNMLIKIIGNSVGALGNLTLVLAIIVFIFAVVGMQLFGKSYKECVCKINDDCTLPRWHMNDFFHSFLIVFRVLCGEWIETMWDCMEVAGQTMCLIVFMLVMVIGNLVVLNLFLALLLSSFSSDNLAATDDDNEMNNLQIAVGRMQKGIDYVKNKMRECFQKAFFRKPKVIEIHEGNKIDSCMSNNTGIEISKELNYLRDGNGTTSGVGTGSSVEKYVIDENDYMSFINNPSLTVTVPIAVGESDFENLNTEEFSSESELEESKEKLNATSSSEGSTVDVVLPREGEQAETEPEEDLKPEACFTEGCIKKFPFCQVSTEEGKGKIWWNLRKTCYSIVEHNWFETFIVFMILLSSGALAFEDIYIEQRKTIKTMLEYADKVFTYIFILEMLLKWVAYGFQTYFTNAWCWLDFLIVDVSLVSLVANALGYSELGAIKSLRTLRALRPLRALSRFEGMRVVVNALVGAIPSIMNVLLVCLIFWLIFSIMGVNLFAGKFYHCVNMTTGNMFDISDVNNLSDCQALGKQARWKNVKVNFDNVGAGYLALLQVATFKGWMDIMYAAVDSRDVKLQPVYEENLYMYLYFVIFIIFGSFFTLNLFIGVIIDNFNQQKKKFGGQDIFMTEEQKKYYNAMKKLGSKKPQKPIPRPANKFQGMVFDFVTRQVFDISIMILICLNMVTMMVETDDQGKYMTLVLSRINLVFIVLFTGEFVLKLVSLRHYYFTIGWNIFDFVVVILSIVGMFLAEMIEKYFVSPTLFRVIRLARIGRILRLIKGAKGIRTLLFALMMSLPALFNIGLLLFLVMFIYAIFGMSNFAYVKKEAGIDDMFNFETFGNSMICLFQITTSAGWDGLLAPILNSAPPDCDPDTIHPGSSVKGDCGNPSVGIFFFVSYIIISFLVVVNMYIAVILENFSVATEESAEPLSEDDFEMFYEVWEKFDPDATQFIEFSKLSDFAAALDPPLLIAKPNKVQLIAMDLPMVSGDRIHCLDILFAFTKRVLGESGEMDALRIQMEDRFMASNPSKVSYEPITTTLKRKQEEVSAAIIQRNFRCYLLKQRLKNISSNYNKEAIKGRIDLPIKQDMIIDKLNGNSTPEKTDGSSSTTSPPSYDSVTKPDKEKFEKDKPEKESKGKEVRENQK

SEQ ID NO: 7609 - protein, 1951 aa, Homo sapiens
MAQALLVPPGPESFRLFTRESLAAIEKRAAEEKAKKPKKEQDNDDENKPKPNSDLEAGKNLPFIYGDIPPEMVSEPLEDLDPYYINKKTFIVMNKGKAIFRFSATSALYILTPLNPVRKIAIKILVHSLFSMLIMCTILTNCVFMTLSNPPDWTKNVEYTFTGIYTFESLIKILARGFCLEDFTFLRDPWNWLDFSVIVMAYVTEFVSLGNVSALRTFRVLRALKTISVIPGLKTIVGALIQSVKKLSDVMILTVFCLSVFALIGLQLFMGNLRNKCLQWPPSDSAFETNTTSYFNGTMDSNGTFVNVTMSTFNWKDYIGDDSHFYVLDGQKDPLLCGNGSDAGQCPEGYICVKAGRNPNYGYTSFDTFSWAFLSLFRLMTQDYWENLYQLTLRAAGKTYMIFFVLVIFLGSFYLVNLILAVVAMAYEEQNQATLEEAEQKEAEFQQMLEQLKKQQEEAQAVAAASAASRDFSGIGGLGELLESSSEASKLSSKSAKEWRNRRKKRRQREHLEGNNKGERDSFPKSESEDSVKRSSFLFSMDGNRLTSDKKFCSPHQSLLSIRGSLFSPRRNSKTSIFSFRGRAKDVGSENDFADDEHSTFEDSESRRDSLFVPHRHGERRNSNGTTTETEVRKRRLSSYQISMEMLEDSSGRQRAVSIASILTNTMEELEESRQKCPPCWYRFANVFLIWDCCDAWLKVKHLVNLIVMDPFVDLAITICIVLNTLFMAMEHYPMTEQFSSVLTVGNLVFTGIFTAEMVLKIIAMDPYYYFQEGWNIFDGIIVSLSLMELGLSNVEGLSVLRSFRLLRVFKLAKSWPTLNMLIKIIGNSVGALGNLTLVLAIIVFIFAVVGMQLFGKSYKECVCKINDDCTLPRWHMNDFFHSFLIVFRVLCGEWIETMWDCMEVAGQTMCLIVFMLVMVIGNLVVLNLFLALLLSSFSSDNLAATDDDNEMNNLQIAVGRMQKGIDYVKNKMRECFQKAFFRKPKVIEIHEGNKIDSCMSNNTGIEISKELNYLRDGNGTTSGVGTGSSVEKYVIDENDYMSFINNPSLTVTVPIAVGESDFENLNTEEFSSESELEESKEKLNATSSSEGSTVDVVLPREGEQAETEPEEDLKPEACFTEGCIKKFPFCQVSTEEGKGKIWWNLRKTCYSIVEHNWFETFIVFMILLSSGALAFEDIYIEQRKTIKTMLEYADKVFTYIFILEMLLKWVAYGFQTYFTNAWCWLDFLIVDVSLVSLVANALGYSELGAIKSLRTLRALRPLRALSRFEGMRVVVNALVGAIPSIMNVLLVCLIFWLIFSIMGVNLFAGKFYHCVNMTTGNMFDISDVNNLSDCQALGKQARWKNVKVNFDNVGAGYLALLQVATFKGWMDIMYAAVDSRDVKLQPVYEENLYMYLYFVIFIIFGSFFTLNLFIGVIIDNFNQQKKKFGGQDIFMTEEQKKYYNAMKKLGSKKPQKPIPRPANKFQGMVFDFVTRQVFDISIMILICLNMVTMMVETDDQGKYMTLVLSRINLVFIVLFTGEFVLKLVSLRHYYFTIGWNIFDFVVVILSIVGMFLAEMIEKYFVSPTLFRVIRLARIGRILRLIKGAKGIRTLLFALMMSLPALFNIGLLLFLVMFIYAIFGMSNFAYVKKEAGIDDMFNFETFGNSMICLFQITTSAGWDGLLAPILNSAPPDCDPDTIHPGSSVKGDCGNPSVGIFFFVSYIIISFLVVVNMYIAVILENFSVATEESAEPLSEDDFEMFYEVWEKFDPDATQFIEFSKLSDFAAALDPPLLIAKPNKVQLIAMDLPMVSGDRIHCLDILFAFTKRVLGESGEMDALRIQMEDRFMASNPSKVSYEPITTTLKRKQEEVSAAIIQRNFRCYLLKQRLKNISSNYNKEAIKGRIDLPIKQDMIIDKLNGNSTPEKTDGSSSTTSPPSYDSVTKPDKEKFEKDKPEKESKGKEVRENQK

SEQ ID NO: 7610 - protein, 2000 aa, Homo sapiens
MAQALLVPPGPESFRLFTRESLAAIEKRAAEEKAKKPKKEQDNDDENKPKPNSDLEAGKNLPFIYGDIPPEMVSEPLEDLDPYYINKKTFIVMNKGKAIFRFSATSALYILTPLNPVRKIAIKILVHSLFSMLIMCTILTNCVFMTLSNPPDWTKNVEYTFTGIYTFESLIKILARGFCLEDFTFLRDPWNWLDFSVIVMAYVTEFVDLGNVSALRTFRVLRALKTISVIPGLKTIVGALIQSVKKLSDVMILTVFCLSVFALIGLQLFMGNLRNKCLQWPPSDSAFETNTTSYFNGTMDSNGTFVNVTMSTFNWKDYIGDDSHFYVLDGQKDPLLCGNGSDAGQCPEGYICVKAGRNPNYGYTSFDTFSWAFLSLFRLMTQDYWENLYQLTLRAAGKTYMIFFVLVIFLGSFYLVNLILAVVAMAYEEQNQATLEEAEQKEAEFQQMLEQLKKQQEEAQAVAAASAASRDFSGIGGLGELLESSSEASKLSSKSAKEWRNRRKKRRQREHLEGNNKGERDSFPKSESEDSVKRSSFLFSMDGNRLTSDKKFCSPHQSLLSIRGSLFSPRRNSKTSIFSFRGRAKDVGSENDFADDEHSTFEDSESRRDSLFVPHRHGERRNSNVSQASMSSRMVPGLPANGKMHSTVDCNGVVSLVGGPSALTSPTGQLPPEGTTTETEVRKRRLSSYQISMEMLEDSSGRQRAVSIASILTNTMEELEESRQKCPPCWYRFANVFLIWDCCDAWLKVKHLVNLIVMDPFVDLAITICIVLNTLFMAMEHYPMTEQFSSVLTVGNLVFTGIFTAEMVLKIIAMDPYYYFQEGWNIFDGIIVSLSLMELGLSNVEGLSVLRSFRLLRVFKLAKSWPTLNMLIKIIGNSVGALGNLTLVLAIIVFIFAVVGMQLFGKSYKECVCKINDDCTLPRWHMNDFFHSFLIVFRVLCGEWIETMWDCMEVAGQTMCLIVFMLVMVIGNLVVLNLFLALLLSSFSSDNLAATDDDNEMNNLQIAVGRMQKGIDYVKNKMRECFQKAFFRKPKVIEIHEGNKIDSCMSNNTGIEISKELNYLRDGNGTTSGVGTGSSVEKYVIDENDYMSFINNPSLTVTVPIAVGESDFENLNTEEFSSESELEESKEKLNATSSSEGSTVDVVLPREGEQAETEPEEDLKPEACFTEGCIKKFPFCQVSTEEGKGKIWWNLRKTCYSIVEHNWFETFIVFMILLSSGALAFEDIYIEQRKTIKTMLEYADKVFTYIFILEMLLKWVAYGFQTYFTNAWCWLDFLIVDVSLVSLVANALGYSELGAIKSLRTLRALRPLRALSRFEGMRVVVNALVGAIPSIMNVLLVCLIFWLIFSIMGVNLFAGKFYHCVNMTTGNMFDISDVNNLSDCQALGKQARWKNVKVNFDNVGAGYLALLQVATFKGWMDIMYAAVDSRDVKLQPVYEENLYMYLYFVIFIIFGSFFTLNLFIGVIIDNFNQQKKKFGGQDIFMTEEQKKYYNAMKKLGSKKPQKPIPRPANKFQGMVFDFVTRQVFDISIMILICLNMVTMMVETDDQGKYMTLVLSRINLVFIVLFTGEFVLKLVSLRHYYFTIGWNIFDFVVVILSIVGMFLAEMIEKYFVSPTLFRVIRLARIGRILRLIKGAKGIRTLLFALMMSLPALFNIGLLLFLVMFIYAIFGMSNFAYVKKEAGIDDMFNFETFGNSMICLFQITTSAGWDGLLAPILNSAPPDCDPDTIHPGSSVKGDCGNPSVGIFFFVSYIIISFLVVVNMYIAVILENFSVATEESAEPLSEDDFEMFYEVWEKFDPDATQFIEFSKLSDFAAALDPPLLIAKPNKVQLIAMDLPMVSGDRIHCLDILFAFTKRVLGESGEMDALRIQMEDRFMASNPSKVSYEPITTTLKRKQEEVSAAIIQRNFRCYLLKQRLKNISSNYNKEAIKGRIDLPIKQDMIIDKLNGNSTPEKTDGSSSTTSPPSYDSVTKPDKEKFEKDKPEKESKGKEVRENQK

SEQ ID NO: 7611 - protein, 1951 aa, Homo sapiens
MAQALLVPPGPESFRLFTRESLAAIEKRAAEEKAKKPKKEQDNDDENKPKPNSDLEAGKNLPFIYGDIPPEMVSEPLEDLDPYYINKKTFIVMNKGKAIFRFSATSALYILTPLNPVRKIAIKILVHSLFSMLIMCTILTNCVFMTLSNPPDWTKNVEYTFTGIYTFESLIKILARGFCLEDFTFLRDPWNWLDFSVIVMAYVTEFVDLGNVSALRTFRVLRALKTISVIPGLKTIVGALIQSVKKLSDVMILTVFCLSVFALIGLQLFMGNLRNKCLQWPPSDSAFETNTTSYFNGTMDSNGTFVNVTMSTFNWKDYIGDDSHFYVLDGQKDPLLCGNGSDAGQCPEGYICVKAGRNPNYGYTSFDTFSWAFLSLFRLMTQDYWENLYQLTLRAAGKTYMIFFVLVIFLGSFYLVNLILAVVAMAYEEQNQATLEEAEQKEAEFQQMLEQLKKQQEEAQAVAAASAASRDFSGIGGLGELLESSSEASKLSSKSAKEWRNRRKKRRQREHLEGNNKGERDSFPKSESEDSVKRSSFLFSMDGNRLTSDKKFCSPHQSLLSIRGSLFSPRRNSKTSIFSFRGRAKDVGSENDFADDEHSTFEDSESRRDSLFVPHRHGERRNSNGTTTETEVRKRRLSSYQISMEMLEDSSGRQRAVSIASILTNTMEELEESRQKCPPCWYRFANVFLIWDCCDAWLKVKHLVNLIVMDPFVDLAITICIVLNTLFMAMEHYPMTEQFSSVLTVGNLVFTGIFTAEMVLKIIAMDPYYYFQEGWNIFDGIIVSLSLMELGLSNVEGLSVLRSFRLLRVFKLAKSWPTLNMLIKIIGNSVGALGNLTLVLAIIVFIFAVVGMQLFGKSYKECVCKINDDCTLPRWHMNDFFHSFLIVFRVLCGEWIETMWDCMEVAGQTMCLIVFMLVMVIGNLVVLNLFLALLLSSFSSDNLAATDDDNEMNNLQIAVGRMQKGIDYVKNKMRECFQKAFFRKPKVIEIHEGNKIDSCMSNNTGIEISKELNYLRDGNGTTSGVGTGSSVEKYVIDENDYMSFINNPSLTVTVPIAVGESDFENLNTEEFSSESELEESKEKLNATSSSEGSTVDVVLPREGEQAETEPEEDLKPEACFTEGCIKKFPFCQVSTEEGKGKIWWNLRKTCYSIVEHNWFETFIVFMILLSSGALAFEDIYIEQRKTIKTMLEYADKVFTYIFILEMLLKWVAYGFQTYFTNAWCWLDFLIVDVSLVSLVANALGYSELGAIKSLRTLRALRPLRALSRFEGMRVVVNALVGAIPSIMNVLLVCLIFWLIFSIMGVNLFAGKFYHCVNMTTGNMFDISDVNNLSDCQALGKQARWKNVKVNFDNVGAGYLALLQVATFKGWMDIMYAAVDSRDVKLQPVYEENLYMYLYFVIFIIFGSFFTLNLFIGVIIDNFNQQKKKFGGQDIFMTEEQKKYYNAMKKLGSKKPQKPIPRPANKFQGMVFDFVTRQVFDISIMILICLNMVTMMVETDDQGKYMTLVLSRINLVFIVLFTGEFVLKLVSLRHYYFTIGWNIFDFVVVILSIVGMFLAEMIEKYFVSPTLFRVIRLARIGRILRLIKGAKGIRTLLFALMMSLPALFNIGLLLFLVMFIYAIFGMSNFAYVKKEAGIDDMFNFETFGNSMICLFQITTSAGWDGLLAPILNSAPPDCDPDTIHPGSSVKGDCGNPSVGIFFFVSYIIISFLVVVNMYIAVILENFSVATEESAEPLSEDDFEMFYEVWEKFDPDATQFIEFSKLSDFAAALDPPLLIAKPNKVQLIAMDLPMVSGDRIHCLDILFAFTKRVLGESGEMDALRIQMEDRFMASNPSKVSYEPITTTLKRKQEEVSAAIIQRNFRCYLLKQRLKNISSNYNKEAIKGRIDLPIKQDMIIDKLNGNSTPEKTDGSSSTTSPPSYDSVTKPDKEKFEKDKPEKESKGKEVRENQK

SEQ ID NO: 7612 - protein, 541 aa, Homo sapiens
MASMGTLAFDEYGRPFLIIKDQDRKSRLMGLEALKSHIMAAKAVANTMRTSLGPNGLDKMMVDKDGDVTVTNDGATILSMMDVDHQIAKLMVELSKSQDDEIGDGTTGVVVLAGALLEEAEQLLDRGIHPIRIADGYEQAARVAIEHLDKISDSVLVDIKDTEPLIQTAKTTLGSKVVNSCHRQMAEIAVNAVLTVADMERRDVDFELIKVEGKVGGRLEDTKLIKGVIVDKDFSHPQMPKKVEDAKIAILTCPFEPPKPKTKHKLDVTSVEDYKALQKYEKEKFEEMIQQIKETGANLAICQWGFDDEANHLLLQNNLPAVRWVGGPEIELIAIATGGRIVPRFSELTAEKLGFAGLVQEISFGTTKDKMLVIEQCKNSRAVTIFIRGGNKMIIEEAKRSLHDALCVIRNLIRDNRVVYGGGAAEISCALAVSQEADKCPTLEQYAMRAFADALEVIPMALSENSGMNPIQTMTEVRARQVKEMNPALGIDCLHKGTNDMKQQHVIETLIGKKQQISLATQMVRMILKIDDIRKPGESEE

SEQ ID NO: 7613 - protein, 448 aa, Homo sapiens
MAAKAVANTMRTSLGPNVLAGALLEEAEQLLDRGIHPIRIADGYEQAARVAIEHLDKISDSVLVDIKDTEPLIQTAKTTLGSKVVNSCHRQMAEIAVNAVLTVADMERRDVDFELIKVEGKVGGRLEDTKLIKGVIVDKDFSHPQMPKKVEDAKIAILTCPFEPPKPKTKHKLDVTSVEDYKALQKYEKEKFEEMIQQIKETGANLAICQWGFDDEANHLLLQNNLPAVRWVGGPEIELIAIATGGRIVPRFSELTAEKLGFAGLVQEISFGTTKDKMLVIEQCKNSRAVTIFIRGGNKMIIEEAKRSLHDALCVIRNLIRDNRVVYGGGAAEISCALAVSQEADKCPTLEQYAMRAFADALEVIPMALSENSGMNPIQTMTEVRARQVKEMNPALGIDCLHKGTNDMKQQHVIETLIGKKQQISLATQMVRMILKIDDIRKPGESEE

SEQ ID NO: 7614 - protein, 274 aa, Homo sapiens
MDRPGFVAALVAGGVAGVSVDLILFPLDTIKTRLQSPQGFSKAGGFHGIYAGVPSAAIGSFPNAAAFFITYEYVKWFLHADSSSYLTPMKHMLAASAGEVVACLIRVPSEVVKQRAQVSASTRTFQIFSNILYEEGIQGLYRGYKSTVLREIPFSLVQFPLWESLKALWSWRQDHVVDSWQSAVCGAFAGGFAAAVTTPLDVAKTRITLAKAGSSTADGNVLSVLHGVWRSQGLAGLFAGVFPRMAAISLGGFIFLGAYDRTHSLLLEVGRKSP

SEQ ID NO: 7615 - protein, 186 aa, Homo sapiens
MKHMLAASAGEVVACLIRVPSEVVKQRAQVSASTRTFQIFSNILYEEGIQGLYRGYKSTVLREIPFSLVQFPLWESLKALWSWRQDHVVDSWQSAVCGAFAGGFAAAVTTPLDVAKTRITLAKAGSSTADGNVLSVLHGVWRSQGLAGLFAGVFPRMAAISLGGFIFLGAYDRTHSLLLEVGRKSP

SEQ ID NO: 7616 - protein, 66 aa, Homo sapiens
MKHMLAASAGEVVACLIRVPSEVVKQRAQVSASTRTFQIFSNILYEEGIQGLYRGYKSTVLREEED

SEQ ID NO: 7617 - protein, 446 aa, Homo sapiens
MAVNPLLTPTGQQTIPLIPSPFGPPTVDRDVLPSTVAPTDPRQFCVPSQFGSSVLPNTNMANVLSSRIYPGWGILPPESIKAVARRNEMIQRHHTARTEMEMYAIYQQRRMEKINPKGLAGLGIPFLYGSSVPAAPAAYHGRSMLPAGDLHFHRSTLRNLQGNPMLAATAPHFEESWGQRCRRLRKNTGNQKALDSDAESSKSQAEEKILGQTHAVPYEEDHYAKDPDIEAPSNQKSSETNEKPTTALANTCGELEPTHRKPWGSHTTTLKAKAWDDGKEEASEQIFATCDEKNGVCPPVPRPSLPGTHALVTIGGNLSLDEDIQKWTVDDVHSFIRSLPGCSDYAQVFKDHAIDGETLPLLTEEHLRGTMGLKLGPALKIQSQVSQHVGSMFYKKTLSFPIRQAFDQPADTSPLLDPNSWSDTMNIFCPQDTIIPKGIERGSMRN

SEQ ID NO: 7618 - protein, 552 aa, Homo sapiens
MGCSAKARWAAGALGVAGLLCAVLGAVMIVMVPSLIKQQVLKNVRIDPSSLSFNMWKEIPIPFYLSVYFFDVMNPSEILKGEKPQVRERGPYVYREFRHKSNITFNNNDTVSFLEYRTFQFQPSKSHGSESDYIVMPNILVLGAAVMMENKPMTLKLIMTLAFTTLGERAFMNRTVGEIMWGYKDPLVNLINKYFPGMFPFKDKFGLFAELNNSDSGLFTVFTGVQNISRIHLVDKWNGLSKVDFWHSDQCNMINGTSGQMWPPFMTPESSLEFYSPEACRSMKLMYKESGVFEGIPTYRFVAPKTLFANGSIYPPNEGFCPCLESGIQNVSTCRFSAPLFLSHPHFLNADPVLAEAVTGLHPNQEAHSLFLDIHPVTGIPMNCSVKLQLSLYMKSVAGIGQTGKIEPVVLPLLWFAESGAMEGETLHTFYTQLVLMPKVMHYAQYVLLALGCVLLLVPVICQIRSQVGAGQRAARADSHSLACWGKGASDRTLWPTAAWSPPPAAVLRLCRSGSGHCWGLRSTLASFACRVATTLPVLEGLGPSLGGGTGS

SEQ ID NO: 7619 - protein, 509 aa, Homo sapiens
MGCSAKARWAAGALGVAGLLCAVLGAVMIVMVPSLIKQQVLKNVRIDPSSLSFNMWKEIPIPFYLSVYFFDVMNPSEILKGEKPQVRERGPYVYREFRHKSNITFNNNDTVSFLEYRTFQFQPSKSHGSESDYIVMPNILVLGAAVMMENKPMTLKLIMTLAFTTLGERAFMNRTVGEIMWGYKDPLVNLINKYFPGMFPFKDKFGLFAELNNSDSGLFTVFTGVQNISRIHLVDKWNGLSKVDFWHSDQCNMINGTSGQMWPPFMTPESSLEFYSPEACRSMKLMYKESGVFEGIPTYRFVAPKTLFANGSIYPPNEGFCPCLESGIQNVSTCRFSAPLFLSHPHFLNADPVLAEAVTGLHPNQEAHSLFLDIHPVTGIPMNCSVKLQLSLYMKSVAGIGQTGKIEPVVLPLLWFAESGAMEGETLHTFYTQLVLMPKVMHYAQYVLLALGCVLLLVPVICQIRSQEKCYLFWSSSKKGSKDKEAIQAYSESLMTSAPKGSVLQEAKL

SEQ ID NO: 7620 - protein, 409 aa, Homo sapiens
MGCSAKARWAAGALGVAGLLCAVLGAVMIVMVPSLIKQQVLKGAAVMMENKPMTLKLIMTLAFTTLGERAFMNRTVGEIMWGYKDPLVNLINKYFPGMFPFKDKFGLFAELNNSDSGLFTVFTGVQNISRIHLVDKWNGLSKVDFWHSDQCNMINGTSGQMWPPFMTPESSLEFYSPEACRSMKLMYKESGVFEGIPTYRFVAPKTLFANGSIYPPNEGFCPCLESGIQNVSTCRFSAPLFLSHPHFLNADPVLAEAVTGLHPNQEAHSLFLDIHPVTGIPMNCSVKLQLSLYMKSVAGIGQTGKIEPVVLPLLWFAESGAMEGETLHTFYTQLVLMPKVMHYAQYVLLALGCVLLLVPVICQIRSQEKCYLFWSSSKKGSKDKEAIQAYSESLMTSAPKGSVLQEAKL

SEQ ID NO: 7621 - protein, 474 aa, Homo sapiens
MALQPSWNVRIDPSSLSFNMWKEIPIPFYLSVYFFDVMNPSEILKGEKPQVRERGPYVYREFRHKSNITFNNNDTVSFLEYRTFQFQPSKSHGSESDYIVMPNILVLGAAVMMENKPMTLKLIMTLAFTTLGERAFMNRTVGEIMWGYKDPLVNLINKYFPGMFPFKDKFGLFAELNNSDSGLFTVFTGVQNISRIHLVDKWNGLSKVDFWHSDQCNMINGTSGQMWPPFMTPESSLEFYSPEACRSMKLMYKESGVFEGIPTYRFVAPKTLFANGSIYPPNEGFCPCLESGIQNVSTCRFSAPLFLSHPHFLNADPVLAEAVTGLHPNQEAHSLFLDIHPVTGIPMNCSVKLQLSLYMKSVAGIGQTGKIEPVVLPLLWFAESGAMEGETLHTFYTQLVLMPKVMHYAQYVLLALGCVLLLVPVICQIRSQEKCYLFWSSSKKGSKDKEAIQAYSESLMTSAPKGSVLQEAKL

SEQ ID NO: 7622 - protein, 506 aa, Homo sapiens
MGCSAKARWAAGALGVAGLLCAVLGAVMIVMVPSLIKQQVLKNVRIDPSSLSFNMWKEIPIPFYLSVYFFDVMNPSEILKGEKPQVRERGPYVYREFRHKSNITFNNNDTVSFLEYRTFQFQPSKSHGSESDYIVMPNILVLGAAVMMENKPMTLKLIMTLAFTTLGERAFMNRTVGEIMWGYKDPLVNLINKYFPGMFPFKDKFGLFAELNNSDSGLFTVFTGVQNISRIHLVDKWNGLSKVDFWHSDQCNMINGTSGQMWPPFMTPESSLEFYSPEACRSMKLMYKESGVFEGIPTYRFVAPKTLFANGSIYPPNEGFCPCLESGIQNVSTCRFSAPLFLSHPHFLNADPVLAEAVTGLHPNQEAHSLFLDIHPVTGIPMNCSVKLQLSLYMKSVAGIGQTGKIEPVVLPLLWFAESGAMEGETLHTFYTQLVLMPKVMHYAQYVLLALGCVLLLVPVICQIRSQGPEDTVSQPGLAAGPDRPPSPYTPLLPDSPSGQPPSPTA

SEQ ID NO: 7623 - protein, 371 aa, Homo sapiens
MAWTKYQLFLAGLMLVTGSINTLSAKWADNFMAEGCGGSKEHSFQHPFLQAVGMFLGEFSCLAAFYLLRCRAAGQSDSSVDPQQPFNPLLFLPPALCDMTGTSLMYVALNMTSASSFQMLRGAVIIFTGLFSVAFLGRRLVLSQWLGILATIAGLVVVGLADLLSKHDSQHKLSEVITGDLLIIMAQIIVAIQMVLEEKFVYKHNVHPLRAVGTEGLFGFVILSLLLVPMYYIPAGSFSGNPRGTLEDALDAFCQVGQQPLIAVALLGNISSIAFFNFAGISVTKELSATTRMVLDSLRTVVIWALSLALGWEAFHALQILGFLILLIGTALYNGLHRPLLGRLSRGRPLAEESEQERLLGGTRTPINDAS

SEQ ID NO: 7624 - protein, 350 aa, Homo sapiens
MCRCPPEHHDGRMTSAEVGAAAGGAQAAGPPEWPPGSPQALRQPGRARVAMAALVWLLAGASMSSLNKWIFTVHGFGRPLLLSALHMLVAALACHRGARRPMPGGTRCRVLLLSLTFGTSMACGNVGLRAVPLDLAQLVTTTTPLFTLALSALLLGRRHHPLQLAAMGPLCLGAACSLAGEFRTPPTGCGFLLAATCLRGLKSVQQSALLQEERLDAVTLLYATSLPSFCLLAGAALVLEAGVAPPPTAGDSRLWACILLSCLLSVLYNLASFSLLALTSALTVHVLGNLTVVGNLILSRLLFGSRLSALSYVGIALTLSGMFLYHNCEFVASWAARRGLWRRDQPSKGL

SEQ ID NO: 7625 - protein, 234 aa, Homo sapiens
MCRCPPEHHDGRMTSAEVGAAAGGAQAAGPPEWPPGSPQALRQPGRARVAMAALVWLLAGASMSSLNKWIFTVHGFGRPLLLSALHMLVAALACHRGARRPMPGGTRCRVLLLSLTFGTSMACGNVGLRAVPLDLAQLVTTTTPLFTLALSALLLGRRHHPLQLAAMGPLCLGAACSLAGEFRTPPTGCGFLLAATCLRGLKSVQQSLSFQICKMELMIPMERVRMRSAGQGQE

SEQ ID NO: 7626 - protein, 739 aa, Homo sapiens
MSSESKEQHNVSPRDSAEGNDSYPSGIHLELQRESSTDFKQFETNDQCRPYHRILIERQEKSDTNFKEFVIKKLQKNCQCSPAKAKNMILGFLPVLQWLPKYDLKKNILGDVMSGLIVGILLVPQSIAYSLLAGQEPVYGLYTSFFASIIYFLLGTSRHISVGIFGVLCLMIGETVDRELQKAGYDNAHSAPSLGMVSNGSTLLNHTSDRICDKSCYAIMVGSTVTFIAGVYQVAMGFFQVGFVSVYLSDALLSGFVTGASFTILTSQAKYLLGLNLPRTNGVGSLITTWIHVFRNIHKTNLCDLITSLLCLLVLLPTKELNEHFKSKLKAPIPIELVVVVAATLASHFGKLHENYNSSIAGHIPTGFMPPKVPEWNLIPSVAVDAIAISIIGFAITVSLSEMFAKKHGYTVKANQEMYAIGFCNIIPSFFHCFTTSAALAKTLVKESTGCHTQLSGVVTALVLLLVLLVIAPLFYSLQKSVLGVITIVNLRGALRKFRDLPKMWSISRMDTVIWFVTMLSSALLSTEIGLLVGVCFSIFCVILRTQKPKSSLLGLVEESEVFESVSAYKNLQIKPGIKIFRFVAPLYYINKECFKSALYKQTVNPILIKVAWKKAAKRKIKEKVVTLGGIQDEMSVQLSHDPLELHTIVIDCSAIQFLDTAGIHTLKEVRRDYEAIGIQVLLAQCNPTVRDSLTNGEYCKKEEENLLFYSVYEAMAFAEVSKNQKGVCVPNGLSLSSD

SEQ ID NO: 7627 - protein, 424 aa, Homo sapiens
MGSSSLSEDYRQCLERELRRGRAGVCGDPSLRAVLWQILVEDFDLHGALQDDALALLTDGLWGRADLAPALRGLARAFELLELAAVHLYLLPWRKEFTTIKTFSGGYVHVLKGVLSDDLLLKSFQKMGYVRRDSHRLMVTALPPACQLVQVALGCFALRLECEILGEVLAQLGTSVLPAEELLQARRASGDVASCVAWLQQRLAQDEEPPPLPPRGSPAAYRAPLDLYRDLQEDEGSEDASLYGEPSPGPDSPPAELAYRPPLWEQSAKLWGTGGRAWEPPAEELPQASSPPYGALEEGLEPEPSAFSFLSLRRELSRPGDLATPESSAAASPRRIRAEGVPASAYRSVSEPPGYQAHSCLSPGALPTLCCDTCRQLHAAHCAALPACRPGHSLRVLLGDAQRRLWLQRAQMDTLLYNSPGARP

SEQ ID NO: 7628 - protein, 152 aa, Homo sapiens
MGSSSLSEDYRQCLERELRRGRAGVCGDPSLRAVLWQILVEDFDLHGALQDDALALLTDGLWGRADLAPALRGLARAFELLELAAVHLYLLPWRKEFTTIKTFSGGYVHVLKGVLSDDLLLKSFQKMGYVRRDSHRLMLCWSQSAGLCRVHG

SEQ ID NO: 7629 - protein, 376 aa, Homo sapiens
MLTAVCGSLGSQHTEAPHASPPRLDLQPLQTYQGHTSPEAGDYPSPLQPGELQSLPLGPEVDFSQGYELPGASSRVTCEDLESDSPLAPGPFSKLLQPDMSHHYESWFRPTHPGAEDGSWWDLHPGTSWMDLPHTQGALTSPGHPGALQAGLGGYVGDHQLCAPPPHPHAHHLLPAAGGQHLLGPPDGAKALEVAAPESQGLDSSLDGAARPKGSRRSVPRSSGQTVCRCPNCLEAERLGAPCGPDGGKKKHLHNCHIPGCGKAYAKTSHLKAHLRWHSGDRPFVCNWLFCGKRFTRSDELQRHLQTHTGTKKFPCAVCSRVFMRSDHLAKHMKTHEGAKEEAAGAASGEGKAGGAVEPPGGKGKREAEGSVAPSN

SEQ ID NO: 7630 - protein, 418 aa, Homo sapiens
MDMLHPSSVSTTSEPENASSAWPPDATLGNVSAGPSPAGLAVSGVLIPLVYLVVCVVGLLGNSLVIYVVLRHTASPSVTNVYILNLALADELFMLGLPFLAAQNALSYWPFGSLMCRLVMAVDGINQFTSIFCLTVMSVDRYLAVVHPTRSARWRTAPVARTVSAAVWVASAVVVLPVVVFSGVPRGMSTCHMQWPEPAAAWRAGFIIYTAALGFFGPLLVICLCYLLIVVKVRSAGRRVWAPSCQRRRRSERRVTRMVVAVVALFVLCWMPFYVLNIVNVVCPLPEEPAFFGLYFLVVALPYANSCANPILYGFLSYRFKQGFRRVLLRPSRRVRSQEPTVGPPEKTEEEDEEEEDGEESREGGKGKEMNGRVSQITQPGTSGQERPPSRVASKEQQLLPQEASTGEKSSTMRISYL

SEQ ID NO: 7631 - protein, 566 aa, Homo sapiens
MSPPGSAAGESAAGGGGGGGGPGVSEELTAAAAAAAADEGPAREEQRPIQPSFTKSLCRESHWKCLLLSLLMYGCLGAVAWCHVTTVTRLTFSSAYQGNSLMYHDSPCSNGYVYIPLAFLLMLYAVYLVECWHCQARHELQHRVDVSSVRERVGRMQQATPCIWWKAISYHYVRRTRQVTRYRNGDAYTTTQVYHERVNTHVAEAEFDYARCGVRDVSKTLVGLEGAPATRLRFTKCFSFASVEAENAYLCQRARFFAENEGLDDYMEAREGMHLKNVDFREFMVAFPDPARPPWYACSSAFWAAALLTLSWPLRVLAEYRTAYAHYHVEKLFGLEGPGSASSAGGGLSPSDELLPPLTHRLPRVNTVDSTELEWHIRSNQQLVPSYSEAVLMDLAGLGTRCGGAGGGYAPSCRYGGVGGPGAAGVAPYRRSCEHCQRAVSSSSIFSRSALSICASPRAGPGPGGGAGCGGSRFSLGRLYGSRRSCLWRSRSGSVNEASCPTEQTRLSSQASMGDDEDDDEEEAGPPPPYHDALYFPVLIVHRQEGCLGHSHRPLHRHGSCVETSL

SEQ ID NO: 7632 - protein, 222 aa, Homo sapiens
MSPPGSAAGESAAGGGGGGGGPGVSEELTAAAAAAAADEGPAREEQRPIQPSFTKSLCRESHWKCLLLSLLMYGCLGAVAWCHVTTVTRLTFSSAYQGNSLMYHDSPCSNGYVYIPLAFLLMLYAVYLVECWHCQARHELQHRVDVSSVRERVGRMQQATPCIWWKAISYHYVRRTRQVTRYRNGDAYTTTQVPGCLGSQVVPLRSPWRNAQLDAGSDEEPA

SEQ ID NO: 7633 - protein, 556 aa, Homo sapiens
MGQDTDMLNTYQQLVRTPSVRPGQDVRLQAPGTRTGLLKLLSTVSQDKQGCLGSGDGVPNQDLQQRSQSSRQTAKKDRKPRGQSKKGQGSEESEDHFPLLPRKPSFPFQWAWESIATDVRAVLQPSSPTPGHQALPMPSSFSQRQSRRKSTANLPEAHGCCWKTEAQNLKARQQLGAWGGVSIPTGKGELGSEPPSGLQLPGRRPGSGSASDKQVQLQSLGAEEAERGLSSGVLPQRPRRGSISEEEQFSEATEEAEEGEHRTPCRRRAGCQRKGQISGEEASDEGEVQGQSQGSSPSFNNLRRRQWRKTRAKELQGPWDLEKLHRQLQRDLDCGPQKLPWKTLRAAFQASKRNGKAYASGYDETFVSANLPNRTFHKRQEATRSLLQAWERQRQEERQQAELRRARTQHVQRQVAHCLAAYAPRGSRGPGAAQRKLEELRRQERQRFAEYQAELQGIQHRVQARPFLFQQAMQANARLTVTRRFSQVLSALGLDEEQLLSEAGKVDREGTPRKPRSHRSMGVRMEHSPQRPPRTEPTGSQPDRHYNPSLDPECSP

SEQ ID NO: 7634 - protein, 403 aa, Homo sapiens
MGQDTDMLNTYQQLVRTPSVRPGQDVRLQAPGTRTGLLKLLSTVSQDKQGCLGSGDGVPNQDLQQRSQSSRQTAKKDRKPRGQSKKGQGSEESEDHFPLLPRKPSFPFQWAWESIATDVRAVLQPSSPTPGHQALPMPSSFSQRQSRRKSTANLPEAHGCCWKTEAQNLKARQQLGAWGGVSIPTGKGELGSEPPSGLQLPGRRPGSGSASDKQVQLQSLGAEEAERGLSSGVLPQRPRRGSISEEEQFSEATEEAEEGEHRTPCRRRAGCQRKGQISGEEASDEGEVQGQSQGSSPSFNNLRRRQWRKTRAKELQGPWDLEKLHRQLQRDLDCGSHQEPAAGLGAAAAGGAAAGRAAAGPDTACTAAGGPLPGSLRTQREPGPWGGPAQAGGAEAPGATALC

SEQ ID NO: 7635 - protein, 1099 aa, Homo sapiens
MCPSEMGTLWHHWSPVLISLAALFSKVTEGRGILESIQRFSLLPTYLPVTYHINNADVSFFLKEANQDIMRNSSLQSRVESFLIYKSRRLPVLNASYGPFSIEQVVPQDLMLPSNPFGFTNKFSLNWKLKAHILRDKVYLSRPKVQVLFHIMGRDWDDRSAGEKLPCLRVFAFRETREVRGSCRLQGDLGLCVAELELLSSWFSPPTVVAGRRKSVDQPEGTPVELYYTVHPGGERGDCVREDARRSNGIRTGHSDIDESGPPLQRIGSIFLYQTHRKPSLRELRLDNSVAIHYIPKTVRKGDVLTFPVSISRNSTEDRFTLRAKVKKGVNIIGVRASSPSIWDVKERTDYTGKYAPAVIVCQKKAAGSENSADGASYEVMQIDVEVEEPGDLPATQLVTWQVEYPGEITSDLGVSKIYVSPKDLIGVVPLAMEAEILNTAILTGKTVAVPVKVVSVEDDGTVTELLESVECRSSDEDVIKVSDRCDYVFVNGKEMKGKVNVVVNFTYQHLSSPLEMTVWVPRLPLQIEVSDTELNQIKGWRVPIVSSRRPAGDSEEEEDDERRGRGCTLQYQHAMVRVLTQFVAEAAGPGGHLAHLLGSDWQVDITELINDFMQVEEPRIAKLQGGQILMGQELGMTTIQILSPLSDTILAEKTITVLDEKVTITDLGVQLVTGLSLSLQLSPGSNRAIFATAVAQELLQRPKQEAAISCWVQFSDGSVTPLDIYDGKDFSLMATSLDEKVVSIHQDPKFKWPIIAAETEGQGTLVKVEMVISESCQKSKRKSVLAVGTANIKVKFGQNDANPNTSDSRHTGAGVHMENNVSDRRPKKPSQEWGSQEGQYYGSSSMGLMEGRGTTTDRSILQKKKGQESLLDDNSHLQTIPSDLTSFPAQVDLPRSNGEMDGNDLMQASKGLSDLEIGMYALLGVFCLAILVFLINCVTFALKYRHKQVPFEEQEGMSHSHDWVGLSNRTELLENHINFASSQDEQITAIDRGMDFEESKYLLSTNSQKSINGQLFKPLGPIIIDGKDQKSEPPTSPTSKRKRVKFTTFTAVSSDDEYPTRNSIVMSSEDDIKWVCQDLDPGDCKELHNYMERLHENV

SEQ ID NO: 7636 - protein, 637 aa, Homo sapiens
MQRDESSPFPPLFSLTSSQVSDRCDYVFVNGKEMKGKVNVVVNFTYQHLSSPLEMTVWVPRLPLQIEVSDTELNQIKGWRVPIVSSRRPAGDSEEEEDDERRGRGCTLQYQHAMVRVLTQFVAEAAGPGGHLAHLLGSDWQVDITELINDFMQVEEPRIAKLQGGQILMGQELGMTTIQILSPLSDTILAEKTITVLDEKVTITDLGVQLVTGLSLSLQLSPGSNRAIFATAVAQELLQRPKQEAAISCWVQFSDGSVTPLDIYDGKDFSLMATSLDEKVVSIHQDPKFKWPIIAAETEGQGTLVKVEMVISESCQKSKRKSVLAVGTANIKVKFGQNDANPNTSDSRHTGAGVHMENNVSDRRPKKPSQEWGSQEGQYYGSSSMGLMEGRGTTTDRSILQKKKGQESLLDDNSHLQTIPSDLTSFPAQVDLPRSNGEMDGNDLMQASKGLSDLEIGMYALLGVFCLAILVFLINCVTFALKYRHKQVPFEEQEGMSHSHDWVGLSNRTELLENHINFASSQDEQITAIDRGMDFEESKYLLSTNSQKSINGQLFKPLGPIIIDGKDQKSEPPTSPTSKRKRVKFTTFTAVSSDDEYPTRNSIVMSSEDDIKWVCQDLDPGDCKELHNYMERLHENV

SEQ ID NO: 7637 - protein, 3432 aa, Homo sapiens
MASERPEPEVEEAGQVFLLMKKDYRISRNVRLAWFLSHLHQTVQATPQEMLLQSEQELEVLSVLPPGWQPDEPVVPRPFLLVPSTRVTFLAWQYRFVIELDLSPSTGIVDDSTGEILFDEVFHALSRCLGGLLRPFRVPGSCIDFQPEIYVTIQAYSSIIGLQSHQVLVQGCLLDPSQREVFLQQIYEQLCLFEDKVATMLQQQYDPQSQAEDQSPDSGDLLGRKVGVSMVTADLGLVSMIRQGILALQLLPSNSSAGIIVITDGVTSVPDVAVCETLLNQLRSGTVACSFVQVGGVYSYDCSFGHVPNVELMKFIAMATFGSYLSTCPEPEPGNLGLTVYHRAFLLYSFLRSGEALNPEYYCGSQHRLFNEHLVSASSNPALALRRKKHTEKEVPADLVSTVSVRLREGYSVREVTLAKGGSQLEVKLVLLWKHNMRIEYVAMAPWPLEPEGPRVTRVEVTMEGGYDILHDVSCALRQPIRSLYRTHVIRRFWNTLQSINQTDQMLAHLQSFSSVPEHFTLPDSTKSGVPLFYIPPGSTTPVLSLQPSGSDSSHAQFAAYWKPVLSMDANSWQRWLHMHRLVLILEHDTPIPKHLHTPGSNGRYSTIQCRISHSSLTSLLRDWSSFVLVEGYSYVKLLSSAPDQPPNSFYMVRIISKAPCMVLRLGFPIGTPAPARHKIVSGLREEILRLRFPHRVQSKEPTPKVKRKGLGGAGGGSSPSKSPPVLGPQQALSDRPCLVVLHKPLDKLLIRYEKLPLDYRAPFLLTLEPPGPLPLVSGRSASSSLASLSRYLYHQRWLWSVPSGLAPALPLSAIAQLLSILTEVRLSEGFHFACSGEGIINMVLELPIQNEPPGQAAAEEKHTCVVQYILFPPHSTSTKDSFSTDDDNDVEVEALEGDSELNLVTEVWVEPQYGRVGPGPGIWKHLQDLTYSEIPQALHPRDAACIGSMLSFEYLIQLCQSKEWGPLPPEPRVSDGLDQGGDTCVHEIPFHFDLMGLLPQCQQLQMFFLLLAREPEGVPFAEGSCPANDMVLCLLHSCLGQELSDREIPLTPVDQAAFLSEVLRRTCHVPGAEGPLLGVHGIPKEQAVGSTQATGDSAFTSLSVGLPETLKPLISAQPPQWRCYARLVNPQHVFLTFLPATFSDVQRLAACGLEGPPQEETKPKFGDWSGAPSLKDLGGTGIKATKSHVPVLSVTLASDNAQNQGELSPPFRRDLQAYAGRQASQTESADGPRTRCPVYIYSCSLEALREQMVGMQPPQAPRDLIFRTQFLDHPSPSSAWMEPRYKEAANHCALLQEHAQRCYVRGLFRSLQQAQSVTSQDLLTAVDACEELLQEIDITPFLLALCGHTWGLPHAPPSPGPLSPGPFSSSMEEGAEPRERAILASESSIETEDLSEPEFQSTRVPGIPDPGPEISLTDVCQLRGEAHGALHSVIQEKFLEISRLHFRTVPSNPHYFFYCPPSSRREDEGPRDTVDRKISDLEFSEAELMGEEGDTSACCVVTESDPELEVEYRESRESDLGPAGLDSASLSDVDTVNPDEDSFSILGGDSPTGPESFLHDLPPLFLHLTCSVRLRGQHSSVPVCSLPTCLGQVLSSLEGPPVGGRVPLRDLSVTLDVFMLTLPLEVELPTASDPQHHRSTSESSASFPRSPGQPSSLRSDDGLGPPLPPPEEERHPGLSNLATPHRLAIETTMNEIRWLLEDEMVGALRRGGIPQSPALHRAAAHIHSSPGRSTCLRQTLPLSFVFGPERSLTQFKEEFRRLHLPGHVLLEDPDSGFFFVAAGQQPGGSHGEPSSAAWAWHSHEDRAEGIEGETLTASPQAPGSPEDSEGVPLISLPRVPQGGSQPGPSRGLSLMSSQGSVDSDHLGYDGGSSGSDSEGPNDTLGEKAPFTLRTPPGPAPPQPSLSGLPGPCLPDFWLIVRVLQDRVEVYAHARSLIREDGGPGTECRHLQQLLVRRVGEICREVNQRLLLQDLHDSHVCNSLLVAESEEDLWRSETPFHSRQRAPLPSDDYAADESCAPRGYLAATMQFVPGHFSCDVVWGTVIRVHSRLKMGPSMGVSRAIQALRSVLNAFSVVNRKNMFVYQERATKAVYYLRLLETSCSDRPWKGDALPPSLALSRSQEPIYSEEASGPRSPLDMVSSRSSDAARPVGQVDRHIQLLVHGVGQAGPEITDELVRVLCRRLDEATLDVITVMLVRNCKLTPADVEFIQPPGSLPSEVLHLALPTSCRPWLPALAWYLRQNLLIFLHSPKYTDSNSRNHFQHPLPPQGGLPDLDIYLYNKPGGQGTGGKGVACITLAFVDEGGAPLSLALWPPSSPGPPDPLREEEFEQLTQVIRCPVVVDSSSAQNGAPRLRLDVWEKGNISIVQLEEKLRGAARQALADAIIELQLLPASLCTEDTPTGSLRNGSLETKSSAGRASTFPPAPVPGEPVTPPSKAGRRSFWDMLSKTECGDLGSPKTTDDIVLDRPEDTRGRRRHKTESVRTPGGAERAPGSDSGAQRQKRRTTQLEEGEVGTLHPVFARVAQRWMEFMVQIGCASVSRSSAHMVSRFLLPSILSEFTALVTSMAGDTSVRIFEQHLGSEPEIFGPCSPGQLGPSPRPAAERHLLLLGRNFLQWRRPTQQAAKAMQRFEPGGDGSSGRNAPRQRLLLLEVVDKKLQLLTYNWAPDLGAALGRALVRLVQWQNARAHLIFCLLSQKLGLFHHYGQLDFPVRDEKEPNPFLLPTMEVETLIRSASPPLSREQGRLSGSSRGGGPLPLDTFPFDEALRDITAARPSSVLGPVPRPPDPVTYHGQQFLEIKMAERRELERQMKMENLFVTWQQRSTPATMPISAGELETLKQSSRLVHYCATAMLFDPAAWLHGPPETSGPPDGQRRHRPESGSGSREAPTSCESLDVSPPGAREEPWLKELSLAFLQQYVQYLQSIGFVLVPLRPPSPARSTSRPRAMAILGTEGRGSFSCPKTKTDGSPKSTSSPVTTYHLQRALPGGIILMELAFQGCYFCVKQFALECSRIPMGQAVNSQLSMLFTEECDKVRDLMHVHSFSYDFHLRLVHQHVLGAHLVLRHGYHLTTFLRHFLAHHPDGPHFGRNHIYQGTLELPTPLIAAHQLYNYVADHASSYHMKPLRMARPGGPEHNEYALVSAWHSSGSYLDSEGLRHQDDFDVSLLVCHCAAPFEEQGEAERHVLRLQFFVVLTSQRELFPRLTADMRRFRKPPRLPPEPEAPGSSAGSPGEASGLILAPGPAPLFPPLAAEVGMARARLAQLVRLAGGHCRRDTLWKRLFLLEPPGPDRLRLGGRLALAELEELLEAVHAKSIGDIDPQLDCFLSMTVSWYQSLIKVLLSRFPQSCRHFQSPDLGTQYLVVLNQKFTDCFVLVFLDSHLGKTSLTVVFREPFPVQPQDSESPPAQLVSTYHHLESVINTACFTLWTRLL

SEQ ID NO: 7638 - protein, 1020 aa, Homo sapiens
MASERPEPEVEEAGQVFLLMKKDYRISRNVRLAWFLSHLHQTVQATPQEMLLQSEQELEVLSVLPPGWQPDEPVVPRPFLLVPSTRVTFLAWQYRFVIELDLSPSTGIVDDSTGEILFDEVFHALSRCLGGLLRPFRVPGSCIDFQPEIYVTIQAYSSIIGLQSHQVLVQGCLLDPSQREVFLQQIYEQLCLFEDKVATMLQQQYDPQSQAEDQSPDSGDLLGRKVGVSMVTADLGLVSMIRQGILALQLLPSNSSAGIIVITDGVTSVPDVAVCETLLNQLRSGTVACSFVQVGGVYSYDCSFGHVPNVELMKFIAMATFGSYLSTCPEPEPGNLGLTVYHRAFLLYSFLRSGEALNPEYYCGSQHRLFNEHLVSASSNPALALRRKKHTEKEVPADLVSTVSVRLREGYSVREVTLAKGGSQLEVKLVLLWKHNMRIEYVAMAPWPLEPEGPRVTRVEVTMEGGYDILHDVSCALRQPIRSLYRTHVIRRFWNTLQSINQTDQMLAHLQSFSSVPEHFTLPDSTKSGVPLFYIPPGSTTPVLSLQPSGSDSSHAQFAAYWKPVLSMDANSWQRWLHMHRLVLILEHDTPIPKHLHTPGSNGRYSTIQCRISHSSLTSLLRDWSSFVLVEGYSYVKLLSSAPDQPPNSFYMVRIISKAPCMVLRLGFPIGTPAPARHKIVSGLREEILRLRFPHRVQSKEPTPKVKRKGLGGAGGGSSPSKSPPVLGPQQALSDRPCLVVLHKPLDKLLIRYEKLPLDYRAPFLLTLEPPGPLPLVSGRSASSSLASLSRYLYHQRWLWSVPSGLAPALPLSAIAQLLSILTEVRLSEGFHFACSGEGIINMVLELPIQNEPPGQAAAEEKHTCVVQYILFPPHSTSTKDSFSTDDDNDVEVEALEGDSELNLVTEVWVEPQYGRVGPGPGIWKHLQDLTYSEIPQALHPRDAACIGSMLSFEYLIQLCQSKEWGPLPPEPRVSDGLDQGGDTCVHEIPFHFDLMGLLPQCQQLQMFFLLLARAAWGRS

SEQ ID NO: 7639 - protein, 3375 aa, Homo sapiens
MASERPEPEVEEAGQVFLLMKKDYRISRNVRLAWFLSHLHQTVQATPQEMLLQSEQELEVLSVLPPGWQPDEPVVPRPFLLVPSTRVTFLAWQYRFVIELDLSPSTGIVDDSTGEILFDEVFHALSRCLGGLLRPFRVPGSCIDFQPEIYVTIQAYSSIIGLQSHQVLVQGCLLDPSQREVFLQQIYEQLCLFEDKVATMLQQQYDPQSQAEDQSPDSGDLLGRKVGVSMVTADLGLVSMIRQGILALQLLPSNSSAGIIVITDGVTSVPDVAVCETLLNQLRSGTVACSFVQVGGVYSYDCSFGHVPNVELMKFIAMATFGSYLSTCPEPEPGNLGLTVYHRAFLLYSFLRSGEALNPEYYCGSQHRLFNEHLVSASSNPALALRRKKHTEKEVPADLVSTVSVRLREGYSVREVTLAKGGSQLEVKLVLLWKHNMRIEYVAMAPWPLEPEGPRVTRVEVTMEGGYDILHDVSCALRQPIRSLYRTHVIRRFWNTLQSINQTDQMLAHLQSFSSVPEHFTLPDSTKSGVPLFYIPPGSTTPVLSLQPSGSDSSHAQFAAYWKPVLSMDANSWQRWLHMHRLVLILEHDTPIPKHLHTPGSNGRYSTIQCRISHSSLTSLLRDWSSFVLVEGYSYVKLLSSAPDQPPNSFYMVRIISKAPCMVLRLGFPIGTPAPARHKIVSGLREEILRLRFPHRVQSKEPTPKVKRKGLGGAGGGSSPSKSPPVLGPQQALSDRPCLVVLHKPLDKLLIRYEKLPLDYRAPFLLTLEPPGPLPLVSGRSASSSLASLSRYLYHQRWLWSVPSGLAPALPLSAIAQLLSILTEVRLSEGFHFACSGEGIINMVLELPIQNEPPGQAAAEEKHTCVVQYILFPPHSTSTKDSFSTDDDNDVEVEALEGDSELNLVTEVWVEPQYGRVGPGPGIWKHLQDLTYSEIPQALHPRDAACIGSMLSFEYLIQLCQSKEWGPLPPEPRVSDGLDQGGDTCVHEIPFHFDLMGLLPQCQQLQMFFLLLARGAEGPLLGVHGIPKEQAVGSTQATGDSAFTSLSVGLPETLKPLISAQPPQWRCYARLVNPQHVFLTFLPATFSDVQRLAACGLEGPPQEETKPKFGDWSGAPSLKDLGGTGIKATKSHVPVLSVTLASDNAQNQGELSPPFRRDLQAYAGRQASQTESADGPRTRCPVYIYSCSLEALREQMVGMQPPQAPRDLIFRTQFLDHPSPSSAWMEPRYKEAANHCALLQEHAQRCYVRGLFRSLQQAQSVTSQDLLTAVDACEELLQEIDITPFLLALCGHTWGLPHAPPSPGPLSPGPFSSSMEEGAEPRERAILASESSIETEDLSEPEFQSTRVPGIPDPGPEISLTDVCQLRGEAHGALHSVIQEKFLEISRLHFRTVPSNPHYFFYCPPSSRREDEGPRDTVDRKISDLEFSEAELMGEEGDTSACCVVTESDPELEVEYRESRESDLGPAGLDSASLSDVDTVNPDEDSFSILGGDSPTGPESFLHDLPPLFLHLTCSVRLRGQHSSVPVCSLPTCLGQVLSSLEGPPVGGRVPLRDLSVTLDVFMLTLPLEVELPTASDPQHHRSTSESSASFPRSPGQPSSLRSDDGLGPPLPPPEEERHPGLSNLATPHRLAIETTMNEIRWLLEDEMVGALRRGGIPQSPALHRAAAHIHSSPGRSTCLRQTLPLSFVFGPERSLTQFKEEFRRLHLPGHVLLEDPDSGFFFVAAGQQPGGSHGEPSSAAWAWHSHEDRAEGIEGETLTASPQAPGSPEDSEGVPLISLPRVPQGGSQPGPSRGLSLMSSQGSVDSDHLGYDGGSSGSDSEGPNDTLGEKAPFTLRTPPGPAPPQPSLSGLPGPCLPDFWLIVRVLQDRVEVYAHARSLIREDGGPGTECRHLQQLLVRRVGEICREVNQRLLLQDLHDSHVCNSLLVAESEEDLWRSETPFHSRQRAPLPSDDYAADESCAPRGYLAATMQFVPGHFSCDVVWGTVIRVHSRLKMGPSMGVSRAIQALRSVLNAFSVVNRKNMFVYQERATKAVYYLRLLETSCSDRPWKGDALPPSLALSRSQEPIYSEEASGPRSPLDMVSSRSSDAARPVGQVDRHIQLLVHGVGQAGPEITDELVRVLCRRLDEATLDVITVMLVRNCKLTPADVEFIQPPGSLPSEVLHLALPTSCRPWLPALAWYLRQNLLIFLHSPKYTDSNSRNHFQHPLPPQGGLPDLDIYLYNKPGGQGTGGKGVACITLAFVDEGGAPLSLALWPPSSPGPPDPLREEEFEQLTQVIRCPVVVDSSSAQNGAPRLRLDVWEKGNISIVQLEEKLRGAARQALADAIIELQLLPASLCTEDTPTGSLRNGSLETKSSAGRASTFPPAPVPGEPVTPPSKAGRRSFWDMLSKTECGDLGSPKTTDDIVLDRPEDTRGRRRHKTESVRTPGGAERAPGSDSGAQRQKRRTTQLEEGEVGTLHPVFARVAQRWMEFMVQIGCASVSRSSAHMVSRFLLPSILSEFTALVTSMAGDTSVRIFEQHLGSEPEIFGPCSPGQLGPSPRPAAERHLLLLGRNFLQWRRPTQQAAKAMQRFEPGGDGSSGRNAPRQRLLLLEVVDKKLQLLTYNWAPDLGAALGRALVRLVQWQNARAHLIFCLLSQKLGLFHHYGQLDFPVRDEKEPNPFLLPTMEVETLIRSASPPLSREQGRLSGSSRGGGPLPLDTFPFDEALRDITAARPSSVLGPVPRPPDPVTYHGQQFLEIKMAERRELERQMKMENLFVTWQQRSTPATMPISAGELETLKQSSRLVHYCATAMLFDPAAWLHGPPETSGPPDGQRRHRPESGSGSREAPTSCESLDVSPPGAREEPWLKELSLAFLQQYVQYLQSIGFVLVPLRPPSPARSTSRPRAMAILGTEGRGSFSCPKTKTDGSPKSTSSPVTTYHLQRALPGGIILMELAFQGCYFCVKQFALECSRIPMGQAVNSQLSMLFTEECDKVRDLMHVHSFSYDFHLRLVHQHVLGAHLVLRHGYHLTTFLRHFLAHHPDGPHFGRNHIYQGTLELPTPLIAAHQLYNYVADHASSYHMKPLRMARPGGPEHNEYALVSAWHSSGSYLDSEGLRHQDDFDVSLLVCHCAAPFEEQGEAERHVLRLQFFVVLTSQRELFPRLTADMRRFRKPPRLPPEPEAPGSSAGSPGEASGLILAPGPAPLFPPLAAEVGMARARLAQLVRLAGGHCRRDTLWKRLFLLEPPGPDRLRLGGRLALAELEELLEAVHAKSIGDIDPQLDCFLSMTVSWYQSLIKVLLSRFPQSCRHFQSPDLGTQYLVVLNQKFTDCFVLVFLDSHLGKTSLTVVFREPFPVQPQDSESPPAQLVSTYHHLESVINTACFTLWTRLL

SEQ ID NO: 7640 - protein, 178 aa, Homo sapiens
MASERPEPEVEEAGQVFLLMKKDYRISRNVRLAWFLSHLHQTVQATPQEMLSEQELEVLSVLPPGWQPDEPVVPRPFLLVPSTRVTFLAWQYRFVIELDLSPSTGIVDDSTGEILFDEVFHALSRCLGGLLRPFRVPGSCIDFQPEIYVTIQAYSSIIGLQSHQRQGFTMLARLPSNF

SEQ ID NO: 7641 - protein, 159 aa, Homo sapiens
MDKPRKENEEEPQSAPKTDEERPPVEHSPEKQSPEEQSSEEQSSEEEFFPEELLPELLPEMLLSEERPPQEGLSRKDLFEGRPPMEQPPCGVGKHKLEEGSFKERLARSRPQFRGDIHGRNLSNEEMIQAADELEEMKRVRNKLMIMHWKAKRSRPYPI

SEQ ID NO: 7642 - protein, 445 aa, Homo sapiens
MREIVHIQAGQCGNQIGAKFWEVISDEHGIDPTGSYHGDSDLQLERINVYYNEAAGNKYVPRAILVDLEPGTMDSVRSGPFGQIFRPDNFVFGQSGAGNNWAKGHYTEGAELVDSVLDVVRKESESCDCLQGFQLTHSLGGGTGSGMGTLLISKIREEYPDRIMNTFSVMPSPKVSDTVVEPYNATLSVHQLVENTDETYSIDNEALYDICFRTLKLTTPTYGDLNHLVSATMSGVTTCLRFPGQLNADLRKLAVNMVPFPRLHFFMPGFAPLTSRGSQQYRALTVPELTQQMFDSKNMMAACDPRHGRYLTVAAIFRGRMSMKEVDEQMLNVQNKNSSYFVEWIPNNVKTAVCDIPPRGLKMSATFIGNSTAIQELFKRISEQFTAMFRRKAFLHWYTGEGMDEMEFTEAESNMNDLVSEYQQYQDATADEQGEFEEEEGEDEA

SEQ ID NO: 7643 - protein, 108 aa, Homo sapiens
MADPRVRQIKIKTGVVKRLVKEKVMYEKEAKQQEEKIEKMRAEDGENYDIKKQAEILQESRMMIPDCQRRLEAAYLDLQRILENEKDLEEAEEYKEARLVLDSVKLEA

SEQ ID NO: 7644 - protein, 129 aa, Homo sapiens
MADPRVRQIKIKTGVVKRLVKEKVMYEKEAKQQEEKIEKMRAEDGENYDIKKQAEILQESRMMIPDCQRRLEAAYLDLQRILVSKDFCVMFKFFFSIQYMESQKFKYLTLRTSWQYFLFTCPLYRYILK

SEQ ID NO: 7645 - protein, 514 aa, Homo sapiens
MSISSDEVNFLVYRYLQESGFSHSAFTFGIESHISQSNINGALVPPAALISIIQKGLQYVEAEVSINEDGTLFDGRPIESLSLIDAVMPDVVQTRQQAYRDKLAQQQAAAAAAAAAAASQQGSAKNGENTANGEENGAHTIANNHTDMMEVDGDVEIPPNKAVVLRGHESEVFICAWNPVSDLLASGSGDSTARIWNLSENSTSGSTQLVLRHCIREGGQDVPSNKDVTSLDWNSEGTLLATGSYDGFARIWTKDGNLASTLGQHKGPIFALKWNKKGNFILSAGVDKTTIIWDAHTGEAKQQFPFHSAPALDVDWQSNNTFASCSTDMCIHVCKLGQDRPIKTFQGHTNEVNAIKWDPTGNLLASCSDDMTLKIWSMKQDNCVHDLQAHNKEIYTIKWSPTGPGTNNPNANLMLASASFDSTVRLWDVDRGICIHTLTKHQEPVYSVAFSPDGRYLASGSFDKCVHIWNTQTGALVHSYRGTGGIFEVCWNAAGDKVGASASDGSVCVLDLRK

SEQ ID NO: 7646 - protein, 198 aa, Homo sapiens
MHSEAEESKEVATDVFNSKNLAVQAQKKILGKMVSKSIATTLIDDTSSEVLDELYRVTREYTQNKKEAEKIIKNLIKTVIKLAILYRNNQFNQDELALMEKFKKKVHQLAMTVVSFHQVDYTFDRNVLSRLLNECREMLHQIIQRHLTAKSHGRVNNVFDHFSDCEFLAALYNPFGNFKPHLQKLCDGINKMLDEENI

SEQ ID NO: 7647 - protein, 190 aa, Homo sapiens
MAVATDVFNSKNLAVQAQKKILGKMVSKSIATTLIDDTSSEVLDELYRVTREYTQNKKEAEKIIKNLIKTVIKLAILYRNNQFNQDELALMEKFKKKVHQLAMTVVSFHQVDYTFDRNVLSRLLNECREMLHQIIQRHLTAKSHGRVNNVFDHFSDCEFLAALYNPFGNFKPHLQKLCDGINKMLDEENI

SEQ ID NO: 7648 - protein, 188 aa, Homo sapiens
MATDVFNSKNLAVQAQKKILGKMVSKSIATTLIDDTSSEVLDELYRVTREYTQNKKEAEKIIKNLIKTVIKLAILYRNNQFNQDELALMEKFKKKVHQLAMTVVSFHQVDYTFDRNVLSRLLNECREMLHQIIQRHLTAKSHGRVNNVFDHFSDCEFLAALYNPFGNFKPHLQKLCDGINKMLDEENI

SEQ ID NO: 7649 - protein, 210 aa, Homo sapiens
MTLPRYCEVVLLIAHGEKMLKLVATDVFNSKNLAVQAQKKILGKMVSKSIATTLIDDTSSEVLDELYRVTREYTQNKKEAEKIIKNLIKTVIKLAILYRNNQFNQDELALMEKFKKKVHQLAMTVVSFHQVDYTFDRNVLSRLLNECREMLHQIIQRHLTAKSHGRVNNVFDHFSDCEFLAALYNPFGNFKPHLQKLCDGINKMLDEENI

SEQ ID NO: 7650 - protein, 400 aa, Homo sapiens
MSSLHKSRIADFQDVLKEPSIALEKLRELSFSGIPCEGGLRCLCWKILLNYLPLERASWTSILAKQRELYAQFLREMIIQPGIAKANMGVSREDVTFEDHPLNPNPDSRWNTYFKDNEVLLQIDKDVRRLCPDISFFQRATDYPCLLILDPQNEFETLRKRVEQTTLKSQTVARNRSGVTNMSSPHKNSVPSSLNEYEVLPNGCEAHWEVVERILFIYAKLNPGIAYVQGMNEIVGPLYYTFATDPNSEWKEHAEADTFFCFTNLMAEIRDNFIKSLDDSQCGITYKMEKVYSTLKDKDVELYLKLQEQNIKPQFFAFRWLTLLLSQEFLLPDVIRIWDSLFADDNRFDFLLLVCCAMLMLIREQLLEGDFTVNMRLLQDYPITDVCQILQKAKELQDSK

SEQ ID NO: 7651 - protein, 275 aa, Homo sapiens
MSSLHKSRIADFQDVLKEPSIALEKLRELSFSGIPCEGGLRCLCWKILLNYLPLERASWTSILAKQRELYAQFLREMIIQPGIAKANMGVSREDVTFEDHPLNPNPDSRWNTYFKDNEVLLQIDKDVRRLCPDISFFQRATDYPCLLILDPQNEFETLRKRVEQTTLKSQTVARNRSGVTNQEQNIKPQFFAFRWLTLLLSQEFLLPDVIRIWDSLFADDNRFDFLLLVCCAMLMLIREQLLEGDFTVNMRLLQDYPITDVCQILQKAKELQDSK

SEQ ID NO: 7652 - protein, 219 aa, Homo sapiens
MSSPHKNSVPSSLNEYEVLPNGCEAHWEVVERILFIYAKLNPGIAYVQGMNEIVGPLYYTFATDPNSEWKEHAEADTFFCFTNLMAEIRDNFIKSLDDSQCGITYKMEKVYSTLKDKDVELYLKLQEQNIKPQFFAFRWLTLLLSQEFLLPDVIRIWDSLFADDNRFDFLLLVCCAMLMLIREQLLEGDFTVNMRLLQDYPITDVCQILQKAKELQDSK

SEQ ID NO: 7653 - protein, 1168 aa, Homo sapiens
MEPITFTARKHLLSNEVSVDFGLQLVGSLPVHSLTTMPMLPWVVAEVRRLSRQSTRKEPVTKQVRLCVSPSGLRCEPEPGRSQQWDPLIYSSIFECKPQRVHKLIHNSHDPSYFACLIKEDAVHRQSICYVFKADDQTKVPEIISSIRQAGKIARQEELHCPSEFDDTFSKKFEVLFCGRVTVAHKKAPPALIDECIEKFNHVSGSRGSESPRPNPPHAAPTGSQEPVRRPMRKSFSQPGLRSLAFRKELQDGGLRSSGFFSSFEESDIENHLISGHNIVQPTDIEENRTMLFTIGQSEVYLISPDTKKIALEKNFKEISFCSQGIRHVDHFGFICRESSGGGGFHFVCYVFQCTNEALVDEIMMTLKQAFTVAAVQQTAKAPAQLCEGCPLQSLHKLCERIEGMNSSKTKLELQKHLTTLTNQEQATIFEEVQKLRPRNEQRENELIISFLRCLYEEKQKEHIHIGEMKQTSQMAAENIGSELPPSATRFRLDMLKNKAKRSLTESLESILSRGNKARGLQEHSISVDLDSSLSSTLSNTSKEPSVCEKEALPISESSFKLLGSSEDLSSDSESHLPEEPAPLSPQQAFRRRANTLSHFPIECQEPPQPARGSPGVSQRKLMRYHSVSTETPHERKDFESKANHLGDSGGTPVKTRRHSWRQQIFLRVATPQKACDSSSRYEDYSELGELPPRSPLEPVCEDGPFGPPPEEKKRTSRELRELWQKAILQQILLLRMEKENQKLQASENDLLNKRLKLDYEEITPCLKEVTTVWEKMLSTPGRSKIKFDMEKMHSAVGQGVPRHHRGEIWKFLAEQFHLKHQFPSKQQPKDVPYKELLKQLTSQQHAILIDLGRTFPTHPYFSAQLGAGQLSLYNILKAYSLLDQEVGYCQGLSFVAGILLLHMSEEEAFKMLKFLMFDMGLRKQYRPDMIILQIQMYQLSRLLHDYHRDLYNHLEEHEIGPSLYAAPWFLTMFASQFPLGFVARVFDMIFLQGTEVIFKVALSLLGSHKPLILQHENLETIVDFIKSTLPNLGLVQMEKTINQVFEMDIAKQLQAYEVEYHVLQEELIDSSPLSDNQRMDKLEKTNSSLRKQNLDLLEQLQVANGRIQSLEATIEKLLSSESKLKQAMLTLELERSALLQTVEELRRRSAEPSDREPECTQPEPTGD

SEQ ID NO: 7654 - protein, 1159 aa, Homo sapiens
MEPITFTARKHLLSNEVSVDFGLQLVGSLPVHSLTTMPMLPWVVAEVRRLSRQSTRKEPVTKQVRLCVSPSGLRCEPEPGRSQQWDPLIYSSIFECKPQRVHKLIHNSHDPSYFACLIKEDAVHRQSICYVFKADDQTKVPEIISSIRQAGKIARQEELHCPSEFDDTFSKKFEVLFCGRVTVAHKKAPPALIDECIEKFNHVSGSRGSESPRPNPPHAAPTGSQEPVRRPMRKSFSQPGLRSLAFRKELQDGGLRSSGFFSSFEESDIENHLISGHNIVQPTDIEENRTMLFTIGQSEVYLISPDTKKIALEKNFKEISFCSQGIRHVDHFGFICRESSGGGGFHFVCYVFQCTNEALVDEIMMTLKQAFTVAAVQQTAKAPAQLCEGCPLQSLHKLCERIEGMNSSKTKLELQKHLTTLTNQEQATIFEEVQKLRPRNEQRENELIISFLRCLYEEKQKEHIHIGEMKQTSQMAAENIGSELPPSATRFRLDMLKNKAKRSLTESLESILSRGNKARGLQEHSISVDLDSSLSSTLSNTSKEPSVCEKEALPISESSFKLLGSSEDLSSDSESHLPEEPAPLSPQQAFRRRANTLSHFPIECQEPPQPARGSPGVSQRKLMRYHSVSTETPHERNVDPSPVGESKHRPGQSSAPAPPPRLNPSASSPNFFKYLKHNSSGEQSGNAVPKSISYRNALRKKLHSSSSVPNFLKFLAPVDENNTSDFMNTKRDFESKANHLGDSGGTPVKTRRHSWRQQIFLRVATPQKACDSSSRYEDYSELGELPPRSPLEPVCEDGPFGPPPEEKKRTSRELRELWQKAILQQILLLRMEKENQKLQASENDLLNKRLKLDYEEITPCLKEVTTVWEKMLSTPGRSKIKFDMEKMHSAVGQGVPRHHRGEIWKFLAEQFHLKHQFPSKQQPKDVPYKELLKQLTSQQHAILIDLGRTFPTHPYFSAQLGAGQLSLYNILKAYSLLDQEVGYCQGLSFVAGILLLHMSEEEAFKMLKFLMFDMGLRKQYRPDMIILQMEKTINQVFEMDIAKQLQAYEVEYHVLQEELIDSSPLSDNQRMDKLEKTNSSLRKQNLDLLEQLQVANGRIQSLEATIEKLLSSESKLKQAMLTLELERSALLQTVEELRRRSAEPSDREPECTQPEPTGD

SEQ ID NO: 7655 - protein, 150 aa, Homo sapiens
MGHLDKEGLCTQGSSFSWLLRVLNDGISLGLTPCLWDMYLLEGEQMLMLITSIAFKVQRSLYEETNKETWGPATPRALKGTGRARPICESLHSSLQALTASESSRGPSLLQTPPRVPGQQALSRGDKGISVSLSLPSLPSRRGRCGRIIG

SEQ ID NO: 7656 - protein, 630 aa, Homo sapiens
MAAVAMTPNPVQTLQEEAVCAICLDYFTDPVSIGCGHNFCRVCVTQLWGGEDEEDRDELDREEEEEDGEEEEVEAVGAGAGWDTPMRDEDYEGDMEEEVEEEEEGVFWTSGMSRSSWDNMDYVWEEEDEEEDLDYYLGDMEEEDLRGEDEEDEEEVLEEVEEEDLDPVTPLPPPPAPRRCFTCPQCRKSFPRRSFRPNLQLANMVQVIRQMHPTPGRGSRVTDQGICPKHQEALKLFCEVDEEAICVVCRESRSHKQHSVVPLEEVVQEYKAKLQGHVEPLRKHLEAVQKMKAKEERRVTELKSQMKSELAAVASEFGRLTRFLAEEQAGLERRLREMHEAQLGRAGAAASRLAEQAAQLSRLLAEAQERSQQGGLRLLQDIKETFNRCEEVQLQPPEVWSPDPCQPHSHDFLTDAIVRKMSRMFCQAARVDLTLDPDTAHPALMLSPDRRGVRLAERRQEVADHPKRFSADCCVLGAQGFRSGRHYWEVEVGGRRGWAVGAARESTHHKEKVGPGGSSVGSGDASSSRHHHRRRRLHLPQQPLLQREVWCVGTNGKRYQAQSSTEQTLLSPSEKPRRFGVYLDYEAGRLGFYNAETLAHVHTFSAAFLGERVFPFFRVLSKGTRIKLCP

SEQ ID NO: 7657 - protein, 518 aa, Homo sapiens
MAAVAMTPNPVQTLQEEAVCAICLDYFTDPVSIGCGHNFCRVCVTQLWGGEDEEDRDELDREEEEEDGEEEEVEAVGAGAGWDTPMRDEDYEGDMEEEVEEEEEGVFWTSGMSRSSWDNMDYVWEEEDEEEDLDYYLGDMEEEDLRGEDEEDEEEVLEEVEEEDLDPVTPLPPPPAPRRCFTCPQCRKSFPRRSFRPNLQLANMVQVIRQMHPTPGRGSRVTDQGICPKHQEALKLFCEVDEEAICVVCRESRSHKQHSVVPLEEVVQEYKAKLQGHVEPLRKHLEAVQKMKAKEERRVTELKSQMKSELAAVASEFGRLTRFLAEEQAGLERRLREMHEAQLGRAGAAASRLAEQAAQLSRLLAEAQERSQQGGLRLLQDIKETFNRCEEVQLQPPEVWSPDPCQPHSHDFLTDAIVRKMSRMFCQAARVDLTLDPDTAHPALMLSPDRRGVRLAERRQEVADHPKRFSADCCVLGAQGFRSGRHYWEEPKEPSWPPAQPSLTYYVCPTDRPEFSFT

SEQ ID NO: 7658 - protein, 210 aa, Homo sapiens
MSRMFCQAARVDLTLDPDTAHPALMLSPDRRGVRLAERRQEVADHPKRFSADCCVLGAQGFRSGRHYWEVEVGGRRGWAVGAARESTHHKEKVGPGGSSVGSGDASSSRHHHRRRRLHLPQQPLLQREVWCVGTNGKRYQAQSSTEQTLLSPSEKPRRFGVYLDYEAGRLGFYNAETLAHVHTFSAAFLGERVFPFFRVLSKGTRIKLCP

SEQ ID NO: 7659 - protein, 381 aa, Homo sapiens
MAAVAMTPNPVQTLQEEAVCAICLDYFTDPVSIGCGHNFCRVCVTQLWGGEDEEDRDELDREEEEEDGEEEEVEAVGAGAGWDTPMRDEDYEGDMEEEVEEEEEGVFWTSGMSRSSWDNMDYVWEEEDEEEDLDYYLGDMEEEDLRGEDEEDEEEVLEEVEEEDLDPVTPLPPPPAPRRCFTCPQCRKSFPRRSFRPNLQLANMVQVIRQMHPTPGRGSRVTDQGICPKHQEALKLFCEVDEEAICVVCRESRSHKQHSVVPLEEVVQEYKAKLQGHVEPLRKHLEAVQKMKAKEERRVTELKSQMKSELAAVASEFGRLTRFLAEEQAGLERRLREMHEAQLGRAGAAASRLAEQAAQLSRLLAEAQERSQQGGLRLLQV

SEQ ID NO: 7660 - protein, 241 aa, Homo sapiens
MAQHGAMGAFRALCGLALLCALSLGQRPTGGPGCGPGRLLLGTGTDARCCRVHTTRCCRDYPGEECCSEWDCMCVQPEFHCGDPCCTTCRHHPCPPGQGVQSQGKFSFGFQCIDCASGTFSGGHEGHCKPWTDCTQFGFLTVFPGNKTHNAVCVPGSPPAEPLGWLTVVLLAVAACVLLLTSAQLGLHIWQLRSQCMWPRETQLLLEVPPSTEDARSCQFPEEERGERSAEEKGRLGDLWV

SEQ ID NO: 7661 - protein, 255 aa, Homo sapiens
MAQHGAMGAFRALCGLALLCALSLGQRPTGGPGCGPGRLLLGTGTDARCCRVHTTRCCRDYPGEECCSEWDCMCVQPEFHCGDPCCTTCRHHPCPPGQGVQSQGKFSFGFQCIDCASGTFSGGHEGHCKPWTDCCWRCRRRPKTPEAASSPRKSGASDRQRRRGGWETCGCEPGRPPGPPTAASPSPGAPQAAGALRSALGRALLPWQQKWVQEGGSDQRPGPCSSAAAAGPCRRERETQSWPPSSLAGPDGVGS

SEQ ID NO: 7662 - protein, 234 aa, Homo sapiens
MAQHGAMGAFRALCGLALLCALSLGQRPTGGPGCGPGRLLLGTGTDARCCRVHTTRCCRDYPGEECCSEWDCMCVQPEFHCGDPCCTTCRHHPCPPGQGVQSQGKFSFGFQCIDCASGTFSGGHEGHCKPWTDCTQFGFLTVFPGNKTHNAVCVPGSPPAEPLGWLTVVLLAVAACVLLLTSAQLGLHIWQLRKTQLLLEVPPSTEDARSCQFPEEERGERSAEEKGRLGDLWV

SEQ ID NO: 7663 - protein, 465 aa, Homo sapiens [sequence omitted]

SEQ ID NO: 7664 - protein, 115 aa, Homo sapiens
MPATPSLKVVHELPACTLCAGPLEDAVTIPCGHTFCRLCLPALSQMGAQSSGKILLCPLCQEEEQAETPMAPVPLGPLGETYCEEHGEKIYFFCENDAEFLCTSECRTTDGFGCA

SEQ ID NO: 7665 - protein, 500 aa, Homo sapiens
MEAEDIQEELTCPICLDYFQDPVSIECGHNFCRGCLHRNWAPGGGPFPCPECRHPSAPAALRPNWALARLTEKTQRRRLGPVPPGLCGRHWEPLRLFCEDDQRPVCLVCRESQEHQTHAMAPIDEAFESYRTGNFDIHVDEWKRRLIRLLLYHFKQEEKLLKSQRNLVAKMKKVMHLQDVEVKNATQWKDKIKSQRMRISTEFSKLHNFLVEEEDLFLQRLNKEEEETKKKLNENTLKLNQTIASLKKLILEVGEKSQAPTLELLQNPKEVLTRSEIQDVNYSLEAVKVKTVCQIPLMKEMLKRFQVAVNLAEDTAHPKLVFSQEGRYVKNTASASSWPVFSSAWNYFAGWRNPQKTAFVERFQHLPCVLGKNVFTSGKHYWEVESRDSLEVAVGVCREDVMGITDRSKMSPDVGIWAIYWSAAGYWPLIGFPGTPTQQEPALHRVGVYLDRGTGNVSFYSAVDGVHLHTFSCSSVSRLRPFFWLSPLASLVIPPVTDRK

SEQ ID NO: 7666 - protein, 474 aa, Homo sapiens
MEAEDIQEELTCPICLDYFQDPVSIECGHNFCRGCLHRNWAPGGGPFPCPECRHPSAPAALRPNWALARLTEKTQRRRLGPVPPGLCGRHWEPLRLFCEDDQRPVCLVCRESQEHQTHAMAPIDEAFESYREKLLKSQRNLVAKMKKVMHLQDVEVKNATQWKDKIKSQRMRISTEFSKLHNFLVEEEDLFLQRLNKEEEETKKKLNENTLKLNQTIASLKKLILEVGEKSQAPTLELLQNPKEVLTRSEIQDVNYSLEAVKVKTVCQIPLMKEMLKRFQVAVNLAEDTAHPKLVFSQEGRYVKNTASASSWPVFSSAWNYFAGWRNPQKTAFVERFQHLPCVLGKNVFTSGKHYWEVESRDSLEVAVGVCREDVMGITDRSKMSPDVGIWAIYWSAAGYWPLIGFPGTPTQQEPALHRVGVYLDRGTGNVSFYSAVDGVHLHTFSCSSVSRLRPFFWLSPLASLVIPPVTDRK

SEQ ID NO: 7667 - protein, 294 aa, Homo sapiens
MEAEDIQEELTCPICLDYFQDPVSIECGHNFCRGCLHRNWAPGGGPFPCPECRHPSAPAALRPNWALARLTEKTQRRRLGPVPPGLCGRHWEPLRLFCEDDQRPVCLVCRESQEHQTHAMAPIDEAFESYREKLLKSQRNLVAKMKKVMHLQDVEVKNATQWKDKIKSQRMRISTEFSKLHNFLVEEEDLFLQRLNKEEEETKKKLNENTLKLNQTIASLKKLILEVGEKSQAPTLELLQNPKEVLTRSEIQDVNYSLEAVKVKTVCQIPLMKEMLKRFQATKIKTQKQNRHNM

SEQ ID NO: 7668 - protein, 253 aa, Homo sapiens
MMAQSKANGSHYALTAIGLGMLVLGVIMAMWNLVPGFSAAEKPTAQGSNKTEVGGGILKSKTFSVAYVLVGAGVMLLLLSICLSIRDKRKQRQGEDLAHVQHPTGAGPHAQEEDSQEEEEEDEEAASRYYVPSYEEVMNTNYSEARGEEQNPRLSISLPSYESLTGLDETTPTSTRADVEASPGNPPDRQNSKLAKRLKPLKVRRIKSEKLHLKDFRINLPDKNVPPPSIEPLTPPPQYDEVQEKAPDTRPPD

SEQ ID NO: 7669 - protein, 247 aa, Homo sapiens
MADTTPNGPQGAGAVQFMMTNKLDTAMWLSRLFTVYCSALFVLPLLGLHEAASFYQRALLANALTSALRLHQRLPHFQLSRAFLAQALLEDSCHYLLYSLIFVNSYPVTMSIFPVLLFSLLHAATYTKKVLDARGSNSLPLLRSVLDKLSANQQNILKFIACNEIFLMPATVFMLFSGQGSLLQPFIYYRFLTLRYSSRRNPYCRTLFNELRIVVEHIIMKPACPLFVRRLCLQSIAFISRLAPTVP

SEQ ID NO: 7670 - protein, 311 aa, Homo sapiens
MGLTLLLLLLLGLEGQGIVGSLPEVLQAPVGSSILVQCHYRLQDVKAQKVWCRFLPEGCQPLVSSAVDRRAPAGRRTFLTDLGGGLLQVEMVTLQEEDAGEYGCMVDGARGPQILHRVSLNILPPEEEEETHKIGSLAENAFSDPAGSANPLEPSQDEKSIPLIWGAVLLVGLLVAAVVLFAVMAKRKQGNRLGVCGRFLSSRVSGMNPSSVVHHVSDSGPAAELPLDVPHIRLDSPPSFDNTTYTSLPLDSPSGKPSLPAPSSLPPLPPKVLVCSKPVTYATVIFPGGNKGGGTSCGPAQNPPNNQTPSS

SEQ ID NO: 7671 - protein, 199 aa, Homo sapiens
MGLTLLLLLLLGLEGQGIVGSLPEVLQAPVGSSILVQCHYRLQDVKAQKVWCRFLPEGCQPLVSSAVDRRAPAGRRTFLTDLGGGLLQVEMVTLQEEDAGEYGCMVDGARGPQILHRVSLNILPPEEEEETHKIGSLAENAFSDPAGSANPLEPSQDEKSIPLIWGAVLLVGLLVAAVVLFAVMAKRKQESLLSGPPRQ

SEQ ID NO: 7672 - protein, 200 aa, Homo sapiens
MGLTLLLLLLLGLEEEEEETHKIGSLAENAFSDPAGSANPLEPSQDEKSIPLIWGAVLLVGLLVAAVVLFAVMAKRKQGNRLGVCGRFLSSRVSGMNPSSVVHHVSDSGPAAELPLDVPHIRLDSPPSFDNTTYTSLPLDSPSGKPSLPAPSSLPPLPPKVLVCSKPVTYATVIFPGGNKGGGTSCGPAQNPPNNQTPSS

SEQ ID NO: 7673 - protein, 292 aa, Homo sapiens
MGEKSENCGVPEDLLNGLKVTDTQEAECAGPPVPDPKNQHSQSKLLRDDEAHLQEDQGEEECFHDCSASFEEEPGADKVENKSNEDVNSSELDEEYLIELEKNMSDEEKQKRREESTRLKEEGNEQFKKGDYIEAESSYSRALEMCPSCFQKERSILFSNRAAARMKQDKKEMAINDCSKAIQLNPSYIRAILRRAELYEKTDKLDEALEDYKSILEKDPSIHQAREACMRLPKQIEERNERLKEEMLGKLKDLGNLVLRPFGLSTENFQIKQDSSTGSYSINFVQNPNNNR

SEQ ID NO: 7674 - protein, 963 aa, Homo sapiens
MAVAPRLFGGLCFRFRDQNPEVAVEGRLPISHSCVGCRRERTAMATVAANPAAAAAAVAAAAAVTEDREPQHEELPGLDSQWRQIENGESGRERPLRAGESWFLVEKHWYKQWEAYVQGGDQDSSTFPGCINNATLFQDEINWRLKEGLVEGEDYVLLPAAAWHYLVSWYGLEHGQPPIERKVIELPNIQKVEVYPVELLLVRHNDLGKSHTVQFSHTDSIGLVLRTARERFLVEPQEDTRLWAKNSEGSLDRLYDTHITVLDAALETGQLIIMETRKKDGTWPSAQLHVMNNNMSEEDEDFKGQPGICGLTNLGNTCFMNSALQCLSNVPQLTEYFLNNCYLEELNFRNPLGMKGEIAEAYADLVKQAWSGHHRSIVPHVFKNKVGHFASQFLGYQQHDSQELLSFLLDGLHEDLNRVKKKEYVELCDAAGRPDQEVAQEAWQNHKRRNDSVIVDTFHGLFKSTLVCPDCGNVSVTFDPFCYLSVPLPISHKRVLEVFFIPMDPRRKPEQHRLVVPKKGKISDLCVALSKHTGISPERMMVADVFSHRFYKLYQLEEPLSSILDRDDIFVYEVSGRIEAIEGSREDIVVPVYLRERTPARDYNNSYYGLMLFGHPLLVSVPRDRFTWEGLYNVLMYRLSRYVTKPNSDDEDDGDEKEDDEEDKDDVPGPSTGGSLRDPEPEQAGPSSGVTNRCPFLLDNCLGTSQWPPRRRRKQLFTLQTVNSNGTSDRTTSPEEVHAQPYIAIDWEPEMKKRYYDEVEAEGYVKHDCVGYVMKKAPVRLQECIELFTTVETLEKENPWYCPSCKQHQLATKKLDLWMLPEILIIHLKRFSYTKFSREKLDTLVEFPIRDLDFSEFVIQPQNESNPELYKYDLIAVSNHYGGMRDGHYTTFACNKDSGQWHYFDDNSVSPVNENQIESKAAYVLFYQRQDVARRLLSPAGSSGAPASPACSSPPSSEFMDVN

SEQ ID NO: 7675 - protein, 221 aa, Homo sapiens
MGRFRGGLRCIKYLLLGFNLLFWLAGSAVIAFGLWFRFGGAIKELSSEDKSPEYFYVGLYVLVGAGALMMAVGFFGCCGAMRESQCVLGSFFTCLLVIFAAEVTTGVFAFIGKGVAIRHVQTMYEEAYNDYLKDRGKGNGTLITFHSTFQCCGKESSEQVQPTCPKELLGHKNCIDEIETIISVKLQLIGIVGIGIAGLTIFGMIFSMVLCCAIRNSRDVI

SEQ ID NO: 7676 - protein, 193 aa, Homo sapiens
MGRFRGGLRCIKYLLLGFNLLFWLAGSAVIAFGLWFRFGGAIKELSSEDKSPEYFYVGLYVLVGAGALMMAVGFFGCCGAMRESQCVLGSFFTCLLVIFAAEVTTGVFAFIGKGVAIRHVQTMYEEAYNDYLKDRGKGNGTLITFHSTFQCCGKESSEQVQPTCPKELLGHKIFGMIFSMVLCCAIRNSRDVI

SEQ ID NO: 7677 - protein, 90 aa, Homo sapiens
MIDPETRHKAFLKAWPWQNSTITFVPGLAICHYSSVQVPRRGAILPMLYALCYVKMPSFQHGPGRMYHLTCDWPRKMSLSCHVCRAHFRD

SEQ ID NO: 7678 - protein, 669 aa, Homo sapiens
MSALLSLCFVLPLAAPGHGTQGWEPCTDLRPLDILAEVVPSDGATSGIRIVQVHGARGLQLSVAAPRTMSFPASRIFSQCDLFPEEFSIVVTLRVPNLPPKRNEYLLTVVAEESDLLLLGLRLSPAQLHFLFLREDTAGAWQTRVSFRSPALVDGRWHTLVLAVSAGVFSLTTDCGLPVDIMADVPFPATLSVKGARFFVGSRRRAKGLFMGLVRQLVLLPGSDATPRLCPSRNAPLAVLSIPRVLQALTGKPEDNEVLKYPYETNIRVTLGPQPPCTEVEDAQFWFDASRKGLYLCVGNEWVSVLAAKERLDYVEEHQNLSTNSETLGIEVFRIPQVGLFVATANRKATSAVYKWTEEKFVSYQNIPTHQAQAWRHFTIGKKIFLAVANFEPDEKGQEFSVIYKWSHRKLKFTPYQSIATHSARDWEAFEVDGEHFLAVANHREGDNHNIDSVIYKWNPATRLFEANQTIATSGAYDWEFFSVGPYSFLVVANTFNGTSTKVHSHLYIRLLGSFQLFQSFPTFGAADWEVFQIGERIFLAVANSHSYDVEMQVQNDSYVINSVIYELNVTAQAFVKFQDILTCSALDWEFFSVGEDYFLVVANSFDGRTFSVNSIIYRWQGYEGFVAVHSLPTVGCRDWEAFSTTAGAYLIYSSAKEPLSRVLRLRTR

SEQ ID NO: 7679 - protein, 598 aa, Homo sapiens
MSALLSLCFVLPLAAPGHGTQGWEPCTDLRPLDILAEVVPSDGATSGIRIVQVHGARGLQLSVAAPRTMSFPASRIFSQCDLFPEEFSIVVTLRVPNLPPKRNEYLLTVVAEESDLLLLGLRLSPAQLHFLFLREDTAGAWQTRVSFRSPALVDGRWHTLVLAVSAGVFSLTTDCGLPVDIMADVPFPATLSVKGARFFVGSRRRAKGLFMGLVRQLVLLPGSDATPRLCPSRNAPLAVLSIPRVLQALTGKPEDNEVLKYPYETNIRVTLGPQPPCTEVEDAQFWFDASRKGLYLCVGNEWVSVLAAKERLDYVEEHQNLSTNSETLGIEVFRIPQVGLFVATANRKATSAVYKWTEEKFVSYQNIPTHQAQAWRHFTIGKKIFLAVANFEPDEKGQEFSVIYKWSHRKLKFTPYQSIATHSARDWEAFEVDGEHFLAVANHREGDNHNIDSVIYKWNPATRLFEANQTIATSGAYDWEFFSVGPYSFLVVANTFNGTSTKVHSHLYIRLLGSFQLFQSFPTFGAADWEVFQIGERIFLAVANSHSYDVEMQVQNDSYVINSVIYELNVTAQAFVKFQDILTCSGGRRGLHARRAEG

SEQ ID NO: 7680 - protein, 563 aa, Homo sapiens
MTVLEITLAVILTLLGLAILAILLTRWARCKQSEMYISRYSSEQSARLLDYEDGRGSRHAYSTQSDTSYDNRERSKRDYTPSTNSLVSMASKFSLGQTELILLLMCFILALSRSSIGSIKCLQTTEEPPSRTAGAMMQFTAPIPGATGPIKLSQKTIVQTPGPIVQYPGSNAGPPSAPRGPPMAPIIISQRTARIPQVHTMDSSGKITLTPVVILTGYMDEELAKKSCSKIQILKCGGTARSQNSREENKEALKNDIIFTNSVESLKSAHIKEPEREGKGTDLEKDKIGMEVKVDSDAGIPKRQETQLKISEMSIPQGQGAQIKKSVSDVPRGQESQVKKSESGVPKGQEAQVTKSGLVVLKGQEAQVEKSEMGVPRRQESQVKKSQSGVSKGQEAQVKKRESVVLKGQEAQVEKSELKVPKGQEGQVEKTEADVPKEQEVQEKKSEAGVLKGPESQVKNTEVSVPETLESQVKKSESGVLKGQEAQEKKESFEDKGNNDKEKERDAEKDPNKKEKGDKNTKGDKGKDKVKGKRESEINGEKSKGSKRAKANTGRKYNKKVEE

SEQ ID NO: 7681 - protein, 562 aa, Homo sapiens
MTVLEITLAVILTLLGLAILAILLTRWARCKQSEMYISRYSSEQSARLLDYEDGRGSRHAYSTQSDTSYDNRERSKRDYTPSTNSLALSRSSIALPQGSMSSIKCLQTTEEPPSRTAGAMMQFTAPIPGATGPIKLSQKTIVQTPGPIVQYPGSNVRSHPHTITGPPSAPRGPPMAPIIISQRTASQLAAPIRIPQVHTMDSSGKITLTPVVILTGYMDEELAKKSCSKIQILKCGGTARSQNSREENKEALKNDIIFTNSVESLKSAHIKEPEREGKGTDLEKDKIGMEVKVDSDAGIPKRQETQLKISEMSIPQGQGAQIKKSVSDVPRGQESQVKKSESGVPKGQEAQVTKSGLVVLKGQEAQVEKSEMGVPRRQESQVKKSQSGVSKGQEAQVKKRESVVLKGQEAQVEKSELKVPKGQEGQVEKTEADVPKEQEVQEKKSEAGVLKGPESQVKNTEVSVPETLESQVKKSESGVLKGQEAQEKKESFEDKGNNDKEKERDAEKDPNKKEKGDKNTKGDKGKDKVKGKRESEINGEKSKGSKRAKANTGRKYNKKVEE

SEQ ID NO: 7682 - protein, 561 aa, Homo sapiens
MTVLEITLAVILTLLGLAILAILLTRWARCKQSEMYISRYSSEQSARLLDYEDGRGSRHAYSTQSDTSYDNRERSKRDYTPSTNSLALSRSSIALPQGSMSSIKCLQTTEEPPSRTAGAMMQFTAPIPGATGPIKLSQKTIVQTPGPIVQYPGSNAGPPSAPRGPPMAPIIISQRTASQLAAPIIISQRTARIPQVHTMDSSGKITLTPVVILTGYMDEELAKKSCSKIQILKCGGTARSQNSREENKEALKNDIIFTNSVESLKSAHIKEPEREGKGTDLEKDKIGMEVKVDSDAGIPKRQETQLKISEMSIPQGQGAQIKKSVSDVPRGQESQVKKSESGVPKGQEAQVTKSGLVVLKGQEAQVEKSEMGVPRRQESQVKKSQSGVSKGQEAQVKKRESVVLKGQEAQVEKSELKVPKGQEGQVEKTEADVPKEQEVQEKKSEAGVLKGPESQVKNTEVSVPETLESQVKKSESGVLKGQEAQEKKESFEDKGNNDKEKERDAEKDPNKKEKGDKNTKGDKGKDKVKGKRESEINGEKSKGSKRAKANTGRKYNKKVEE

SEQ ID NO: 7683 - protein, 314 aa, Homo sapiens
MRPEGSLTYRVPERLRQGFCGVGRAAQALVCASAKEGTAFRMEAVQEGAAGVESEQAALGEEAVLLLDDIMAEVEVVAEVEVVAEEEGLVERREEAQRAQQAVPGPGPMTPESALEELLAVQVELEPVNAQARKAFSRQREKMERRRKPHLDRRGAVIQSVPGFWANVIANHPQMSALITDEDEDMLSYMVSLEVEEEKHPVHLCKIMLFFRSNPYFQNKVITKEYLVNITEYRASHSTPIEWYPDYEVEAYRRRHHNSSLNFFNWFSDHNFAGSNKIAEILCKDLWRNPLQYYKRMKPPEEGTETSGDSQLLS

SEQ ID NO: 7684 - protein, 1516 aa, Homo sapiens
MAPAKATNVVRLLLGSTALWLSQLGSGTVAASKSVTAHLAAKWPETPLLLEASEFMAEESNEKFWQFLETVQELAIYKQTESDYSYYNLILKKAGQFLDNLHINLLKFAFSIRAYSPAIQMFQQIAADEPPPDGCNAFVVIHKKHTCKINEIKKLLKKAASRTRPYLFKGDHKFPTNKENLPVVILYAEMGTRTFSAFHKVLSEKAQNEEILYVLRHYIQKPSSRKMYLSGYGVELAIKSTEYKALDDTQVKTVTNTTVEDETETNEVQGFLFGKLKEIYSDLRDNLTAFQKYLIESNKQMMPLKVWELQDLSFQAASQIMSAPVYDSIKLMKDISQNFPIKARSLTRIAVNQHMREEIKENQKDLQVRFKIQPGDARLFINGLRVDMDVYDAFSILDMLKLEGKMMNGLRNLGINGEDMSKFLKLNSHIWEYTYVLDIRHSSIMWINDLENDDLYITWPTSCQKLLKPVFPGSVPSIRRNFHNLVLFIDPAQEYTLDFIKLADVFYSHEVPLRIGFVFILNTDDEVDGANDAGVALWRAFNYIAEEFDISEAFISIVHMYQKVKKDQNILTVDNVKSVLQNTFPHANIWDILGIHSKYDEERKAGASFYKMTGLGPLPQALYNGEPFKHEEMNIKELKMAVLQRMMDASVYLQREVFLGTLNDRTNAIDFLMDRNNVVPRINTLILRTNQQYLNLISTSVTADVEDFSTFFFLDSQDKSAVIAKNMYYLTQDDESIISAVTLWIIADFDKPSGRKLLFNALKHMKTSVHSRLGIIYNPTSKINEENTAISRGILAAFLTQKNMFLRSFLGQLAKEEIATAIYSGDKIKTFLIEGMDKNAFEKKYNTVGVNIFRTHQLFCQDVLKLRPGEMGIVSNGRFLGPLDEDFYAEDFYLLEKITFSNLGEKIKGIVENMGINANNMSDFIMKVDALMSSVPKRASRYDVTFLRENHSVIKTNPQENDMFFNVIAIVDPLTREAQKMAQLLVVLGKIINMKIKLFMNCRGRLSEAPLESFYRFVLEPELMSGANDVSSLGPVAKFLDIPESPLLILNMITPEGWLVETVHSNCDLDNIHLKDTEKTVTAEYELEYLLLEGQCFDKVTEQPPRGLQFTLGTKNKPAVVDTIVMAHHGYFQLKANPGAWILRLHQGKSEDIYQIVGHEGTDSQADLEDIIVVLNSFKSKILKVKVKKETDKIKEDILTDEDEKTKGLWDSIKSFTVSLHKENKKEKDVLNIFSVASGHLYERFLRIMMLSVLRNTKTPVKFWLLKNYLSPTFKEVIPHMAKEYGFRYELVQYRWPRWLRQQTERQRIIWGYKILFLDVLFPLAVDKIIFVDADQIVRHDLKELRDFDLDGAPYGYTPFCDSRREMDGYRFWKTGYWASHLLRRKYHISALYVVDLKKFRRIGAGDRLRSQYQALSQDPNSLSNLDQDLPNNMIYQVAIKSLPQDWLWCETWCDDESKQRAKTIDLCNNPKTKESKLKAAARIVPEWVEYDAEIRQLLDHLENKKQDTILTHDEL

SEQ ID NO: 7685 - protein, 278 aa, Homo sapiens
MAPAKATNVVRLLLGSTALWLSQLGSGTVAASKSVTAHLAAKWPETPLLLEASEFMAEESNEKFWQFLETVQELAIYKQTESDYSYYNLILKKAGQFLDNLHINLLKFAFSIRAYSPAIQMFQQIAADEPPPDGCNAFVVIHKKHTCKINEIKKLLKKAASRTRPYLFKGDHKFPTNKENLPVVILYAEMGTRTFSAFHKVLSEKAQNEEILYVLRHYIQKPSSRKMYLSGYGVELAIKSTEYKALDDTQVKTVTNTTVEDETETNEVQGFLFGKLKS

SEQ ID NO: 7686 - protein, 154 aa, Homo sapiens
MAASRRLMKELEEIRKCGMENFRNIQVDEANLLTWQGLIVPDNPPYNKGAFRIEINFPAEYPFKPPRITFKTKIYHPNIDEKGQVCLPVISAENWKPATKTDQVIQSLIALVNDPQPEHPLRADLAEEYSNDRKKFCKNAEEFTKKYGEKRPVD

SEQ ID NO: 7687 - protein, 1416 aa, Homo sapiens
MKSLKSRLRRQDVPGPASSGAAAASAHAADWNKYDDRLMKAAERGDVEKVTSILAKKGVNPGKLDVEGRSVFHVVTSKGNLECLNAILIHGVDITTSDTAGRNALHLAAKYGHALCLQKLLQYNCPTEHADLQGRTALHDAAMADCPSSIQLLCDHGASVNAKDVDGRTPLVLATQMSRPTICQLLIDRGADVNSRDKQNRTALMLGCEYGCRDAVEVLIKNGADISLLDALGHDSSYYARIGDNLDILTLLKTASENTNKGRELWKKGPSLQQRNLTHMQDEVNVKSHQREHQNIQDLEIENEDLKERLRKIQQEQRILLDKVNGLQLQLNEEVMVADDLESEREKLKSLLAAKEKQHEESLRTIEALKNRFKYFESDHLGSGSHFSNRKEDMLLKQGQMYMADSQCTSPGIPAHMQSRSMLRPLELSLPSQTSYSENEILKKELEAMRTFCESAKQDRLKLQNELAHKVAECKALALECERVKEDSDEQIKQLEDALKDVQKRMYESEGKVKQMQTHFLALKEHLTSEAASGNHRLTEELKDQLKDLKVKYEGASAEVGKLRNQIKQNEMIVEEFKRDEGKLIEENKRLQKELSMCEMEREKKGRKVTEMEGQAKELSAKLALSIPAEKFENMKSSLSNEVNEKAKKLVEMEREHEKSLSEIRQLKRELENVKAKLAQHVKPEEHEQVKSRLEQKSGELGKKITELTLKNQTLQKEIEKVYLDNKLLKEQAHNLTIEMKNHYVPLKVSEDMKKSHDAIIDDLNRKLLDVTQKYTEKKLEMEKLLLENDSLSKDVSRLETVFVPPEKHEKEIIALKSNIVELKKQLSELKKKCGEDQEKIHALTSENTNLKKMMSNQYVPVKTHEEVKMTLNDTLAKTNRELLDVKKKFEDINQEFVKIKDKNEILKRNLENTQNQIKAEYISLAEHEAKMSSLSQSMRKVQDSNAEILANYRKGQEEIVTLHAEIKAQKKELDTIQECIKVKYAPIVSFEECERKFKATEKELKDQLSEQTQKYSVSEEEVKKNKQENDKLKKEIFTLQKDLRDKTVLIEKSHEMERALSRKTDELNKQLKDLSQKYTEVKNVKEKLVEENAKQTSEILAVQNLLQKQHVPLEQVEALKKSLNGTIENLKEELKSMQRCYEKEQQTVTKLHQLLENQKNSSVPLAEHLQIKEAFEKEVGIIKASLREKEEESQNKMEEVSKLQSEVQNTKQALKKLETREVVDLSKYKATKSDLETQISSLNEKLANLNRKYEEVCEEVLHAKKKEISAKDEKELLHFSIEQEIKDQKERCDKSLTTITELQRRIQESAKQIEAKDNKITELLNDVERLKQALNGLSQLTYTSGNPTKRQSQLIDTLQHQVKSLEQQLADADRQHQEVIAIYRTHLLSAAQGHMDEDVQEALLQIIQMRQGLVC

SEQ ID NO: 7688 - protein, 1403 aa, Homo sapiens
MMNCWFSCTPKNRHAADWNKYDDRLMKAAERGDVEKVTSILAKKGVNPGKLDVEGRSVFHVVTSKGNLECLNAILIHGVDITTSDTAGRNALHLAAKYGHALCLQKLLQYNCPTEHADLQGRTALHDAAMADCPSSIQLLCDHGASVNAKDVDGRTPLVLATQMSRPTICQLLIDRGADVNSRDKQNRTALMLGCEYGCRDAVEVLIKNGADISLLDALGHDSSYYARIGDNLDILTLLKTASENTNKGRELWKKGPSLQQRNLTHMQDEVNVKSHQREHQNIQDLEIENEDLKERLRKIQQEQRILLDKVNGLQLQLNEEVMVADDLESEREKLKSLLAAKEKQHEESLRTIEALKNRFKYFESDHLGSGSHFSNRKEDMLLKQGQMYMADSQCTSPGIPAHMQSRSMLRPLELSLPSQTSYSENEILKKELEAMRTFCESAKQDRLKLQNELAHKVAECKALALECERVKEDSDEQIKQLEDALKDVQKRMYESEGKVKQMQTHFLALKEHLTSEAASGNHRLTEELKDQLKDLKVKYEGASAEVGKLRNQIKQNEMIVEEFKRDEGKLIEENKRLQKELSMCEMEREKKGRKVTEMEGQAKELSAKLALSIPAEKFENMKSSLSNEVNEKAKKLVEMEREHEKSLSEIRQLKRELENVKAKLAQHVKPEEHEQVKSRLEQKSGELGKKITELTLKNQTLQKEIEKVYLDNKLLKEQAHNLTIEMKNHYVPLKVSEDMKKSHDAIIDDLNRKLLDVTQKYTEKKLEMEKLLLENDSLSKDVSRLETVFVPPEKHEKEIIALKSNIVELKKQLSELKKKCGEDQEKIHALTSENTNLKKMMSNQYVPVKTHEEVKMTLNDTLAKTNRELLDVKKKFEDINQEFVKIKDKNEILKRNLENTQNQIKAEYISLAEHEAKMSSLSQSMRKVQDSNAEILANYRKGQEEIVTLHAEIKAQKKELDTIQECIKVKYAPIVSFEECERKFKATEKELKDQLSEQTQKYSVSEEEVKKNKQENDKLKKEIFTLQKDLRDKTVLIEKSHEMERALSRKTDELNKQLKDLSQKYTEVKNVKEKLVEENAKQTSEILAVQNLLQKQHVPLEQVEALKKSLNGTIENLKEELKSMQRCYEKEQQTVTKLHQLLENQKNSSVPLAEHLQIKEAFEKEVGIIKASLREKEEESQNKMEEVSKLQSEVQNTKQALKKLETREVVDLSKYKATKSDLETQISSLNEKLANLNRKYEEVCEEVLHAKKKEISAKDEKELLHFSIEQEIKDQKERCDKSLTTITELQRRIQESAKQIEAKDNKITELLNDVERLKQALNGLSQLTYTSGNPTKRQSQLIDTLQHQVKSLEQQLADADRQHQEVIAIYRTHLLSAAQGHMDEDVQEALLQIIQMRQGLVC

SEQ ID NO: 7689 - protein, 274 aa, Homo sapiens
MLSVASRSGPFAPVLSATSRGVAGALRPLVQATVPATPEQPVLDLKRPFLSRESLSGQAVRRPLVASVGLNVPASVCYSHTDIKVPDFSEYRRLEVLDSTKSSRESSEARKGFSYLVTGVTTVGVAYAAKNAVTQFVSSMSASADVLALAKIEIKLSDIPEGKNMAFKWRGKPLFVRHRTQKEIEQEAAVELSQLRDPQHDLDRVKKPEWVILIGVCTHLGCVPIANAGDFGGYYCPCHGSHYDASGRIRLGPAPLNLEVPTYEFTSDDMVIVG

SEQ ID NO: 7690 - protein, 147 aa, Homo sapiens
MAATTGSGVKVPRNFRLLEELEEGQKGVGDGTVSWGLEDDEDMTLTRWTGMIIGPPRTIYENRIYSLKIECGPKYPEAPPFVRFVTKINMNGVNSSNGVVDPRAISVLAKWQNSYSIKVVLQELRRLMMSKENMKLPQPPEGQCYSN

SEQ ID NO: 7691 - protein, 221 aa, Homo sapiens
MAYKFRTHSPEALEQLYPWECFVFCLIIFGTFTNQIHKWSHTYFGLPRWVTLLQDWHVILPRKHHRIHHVSPHETYFCITTGVKVPRNFRLLEELEEGQKGVGDGTVSWGLEDDEDMTLTRWTGMIIGPPRTIYENRIYSLKIECGPKYPEAPPFVRFVTKINMNGVNSSNGVVDPRAISVLAKWQNSYSIKVVLQELRRLMMSKENMKLPQPPEGQCYSN

SEQ ID NO: 7692 - protein, 170 aa, Homo sapiens
MPGEVQASYLKSQSKLSDEGRLEPRKFHCKGSKSPSQFRLLEELEEGQKGVGDGTVSWGLEDDEDMTLTRWTGMIIGPPRTIYENRIYSLKIECGPKYPEAPPFVRFVTKINMNGVNSSNGVVDPRAISVLAKWQNSYSIKVVLQELRRLMMSKENMKLPQPPEGQCYSN

SEQ ID NO: 7693 - protein, 103 aa, Homo sapiens
MKEDLNLENFTAKTIYENRIYSLKIECGPKYPEAPPFVRFVTKINMNGVNSSNGVVDPRAISVLAKWQNSYSIKVVLQELRRLMMSKENMKLPQPPEGQCYSN

SEQ ID NO: 7694 - protein, 170 aa, Homo sapiens
MPGEVQASYLKSQSKLSDEGRLEPRKFHCKGVKVPRNFRLLEELEEGQKGVGDGTVSWGLEDDEDMTLTRWTGMIIGPPRTIYENRIYSLKIECGPKYPEAPPFVRFVTKINMNGVNSSNGVVDPRAISVLAKWQNSYSIKVVLQELRRLMMSKENMKLPQPPEGQCYSN

SEQ ID NO: 7695 - protein, 105 aa, Homo sapiens
MAATTGSGVKVPRNFRLLEELEEGQKGVGDGTVSWGLEDDEDMTLTRWTGMIIGPPRVDPRAISVLAKWQNSYSIKVVLQELRRLMMSKENMKLPQPPEGQCYSN

SEQ ID NO: 7696 - protein, 227 aa, Homo sapiens
MGNCVGRQRRERPAAPGHPRKRAGRNEPLKKERLKWKSDYPMTDGQLRSKRDEFWDTAPAFEGRKEIWDALKAAAYAAEANDHELAQAILDGASITLPHGTLCECYDELGNRYQLPIYCLSPPVNLLLEHTEEESLEPPEPPPSVRREFPLKVRLSTGKDVRLSASLPDTVGQLKRQLHAQEGIEPSWQRWFFSGKLLTDRTRLQETKIQKDFVIQVIINQPPPPQD

SEQ ID NO: 7697 - protein, 297 aa, Homo sapiens
MAELTALESLIEMGFPRGRAEKALALTGNQGIEAAMDWLMEHEDDPDVDEPLETPLGHILGREPTSSEQGGLEGSGSAAGEGKPALSEEERQEQTKRMLELVAQKQREREEREEREALERERQRRRQGQELSAARQRLQEDEMRRAAEERRREKAEELAARQRVREKIERDKAERAKKYGGSVGSQPPPVAPEPGPVPSSPSQEPPTKREYDQCRIQVRLPDGTSLTQTFRAREQLAAVRLYVELHRGEELGGGQDPVQLLSGFPRRAFSEADMERPLQELGLVPSAVLIVAKKCPS

SEQ ID NO: 7698 - protein, 312 aa, Homo sapiens
MAELTALESLIEMGFPRGRAEKALALTGNQGIEAAMDWLMEHEDDPDVDEPLETPLGHILGREPTSSEQGGLEGSGSAAGEGKPALSEEERQEQTKRMLELVAQKQREREEREEREALERERQRRRQGQELSAARQRLQEDEMRRAAEERRREKAEELAARQRVREKIERDKAERAKKYGGSVGSQPPPVAPEPGPVPSSPSQEPPTKREYDQCRIQVRLPDGTSLTQTFRAREQLAAVRLYVELHRGEELGGGQDPVQLLSGFPRRAFSEADMERPLQELGMAARLETRTRNWGSREACLGKGGMQREGAL

SEQ ID NO: 7699 - protein, 758 aa, Homo sapiens
MAVSAGSARTSPSSDKVQKDKAELISGPRQDSRIGKLLGFEWTDLSSWRRLVTLLNRPTDPASLAVFRFLFGFLMVLDIPQERGLSSLDRKYLDGLDVCRFPLLDALRPLPLDWMYLVYTIMFLGALGMMLGLCYRISCVLFLLPYWYVFLLDKTSWNNHSYLYGLLAFQLTFMDANHYWSVDGLLNAHRRNAHVPLWNYAVLRGQIFIVYFIAGVKKLDADWVEGYSMEYLSRHWLFSPFKLLLSEELTSLLVVHWGGLLLDLSAGFLLFFDVSRSIGLFFVSYFHCMNSQLFSIGMFSYVMLASSPLFCSPEWPRKLVSYCPRRLQQLLPLKAAPQPSVSCVYKRSRGKSGQKPGLRHQLGAAFTLLYLLEQLFLPYSHFLTQGYNNWTNGLYGYSWDMMVHSRSHQHVKITYRDGRTGELGYLNPGVFTQSRRWKDHADMLKQYATCLSRLLPKYNVTEPQIYFDIWVSINDRFQQRIFDPRVDIVQAAWSPFQRTSWVQPLLMDLSPWRAKLQEIKSSLDNHTEVVFIADFPGLHLENFVSEDLGNTSIQLLQGEVTVELVAEQKNQTLREGEKMQLPAGEYHKVYTTSPSPSCYMYVYVNTTELALEQDLAYLQELKEKVENGSETGPLPPELQPLLEGEVKGGPEPTPLVQTFLRRQQRLQEIERRRNTPFHERFFRFLLRKLYVFRRSFLMTCISLRNLILGRPSLEQLAQEVTYANLRPFEAVGELNPSNTDSSHSNPPESNPDPVHSEF

SEQ ID NO: 7700 - protein, 701 aa, Homo sapiens
MAVSAGSARTSPSSGFLMVLDIPQERGLSSLDRKYLDGLDVCRFPLLDALRPLPLDWMYLVYTIMFLGALGMMLGLCYRISCVLFLLPYWYVFLLDKTSWNNHSYLYGLLAFQLTFMDANHYWSVDGLLNAHRRNAHVPLWNYAVLRGQIFIVYFIAGVKKLDADWVEGYSMEYLSRHWLFSPFKLLLSEELTSLLVVHWGGLLLDLSAGFLLFFDVSRSIGLFFVSYFHCMNSQLFSIGMFSYVMLASSPLFCSPEWPRKLVSYCPRRLQQLLPLKAAPQPSVSCVYKRSRGKSGQKPGLRHQLGAAFTLLYLLEQLFLPYSHFLTQGYNNWTNGLYGYSWDMMVHSRSHQHVKITYRDGRTGELGYLNPGVFTQSRRWKDHADMLKQYATCLSRLLPKYNVTEPQIYFDIWVSINDRFQQRIFDPRVDIVQAAWSPFQRTSWVQPLLMDLSPWRAKLQEIKSSLDNHTEVVFIADFPGLHLENFVSEDLGNTSIQLLQGEVTVELVAEQKNQTLREGEKMQLPAGEYHKVYTTSPSPSCYMYVYVNTTELALEQDLAYLQELKEKVENGSETGPLPPELQPLLEGEVKGGPEPTPLVQTFLRRQQRLQEIERRRNTPFHERFFRFLLRKLYVFRRSFLMTCISLRNLILGRPSLEQLAQEVTYANLRPFEAVGELNPSNTDSSHSNPPESNPDPVHSEF

SEQ ID NO: 7701 - protein, 1081 aa, Homo sapiens
MDIRKEKRLNMALQMSNFKKALNRFEKLVEQTAAQKRDERAGLFIHKEDAIGYDKFYASVQKLFGPDVKNQDVKRFYRKLCNNTDASADWCEIFGYFSSEEDPIASQLDEENLVFFVSRKRRILISGSRRRDVIKSIVKIPHLDLLITATQKGLITVFNNQDTSWITGCDYLLQLKRIVATTERTIIVWDYKAQGSSQENYFVIKPMDHCLLCVCVVPLPDHLCRDDILLGDDGGFVNRFTVNSDDFGIKQAKSKRKLQNQVLDSKNFKSVKRKLHNDWVMKIRYISALNCFGSCSLDSNHSLVLESLKRLEDNLPVREFSMPRGANTFCYCVKANVIVTGGDDKVIRLWHPNISTKPVGKLVGHMFSIAEIVTNEKDQHVVSLSSAKVFRVWDIQTLSLLQVFHDSQGGPGDMQIYSMIYDANHGMLITGSSVMDMYPLTRMIQDTKQVPHTHEREINVMLYNKYFHQVLTICSESIIRVWELETGLQVYQILEPHGFNTEVTSAAVDESGFLFATGAYNGTVRIWDFGSGQEMKVLPEGKDWKEDEHCLRRLIFLKAQEKHQQLVLALERNGTIKMIQGKEDDIYLMVIWELPDVVPFLQDGKHAVHLRMSTRDRNMAIPFPDVELIVERNFSQPTDNPTMDLLRVNCIDLLQVEGYNLIAAGTLNGVIILWNFVTSTVKKVYRPEDCFTVNPDLHPKHFKINDILFLFRTPECARRSSQDSICSSSQCESSKGPQSSKGSKQSIHDSEVKGEQTDVMVGKQQPMDKKHPGIANLPEAQPPILVTAHEDGHLRLWTLEGRLLKDMLPFTKHSAISLTSLYTDSCTRILLAGNVEGHVILCNISSFLDPPHDEKKFKQLLSWRAHSLEIIQVIYVEEKQVVLTASIDGSVRLWHALNGHYCGYFGQRRLFELSQTRDFILPCDVTEYPIEIKEESKFTEKQKYEYPLIFDREKWRKMSSVSLLFKRTPPKAFEVEQDFKFFKSLSSPKIRRYPLEGFVTENREAGIVFGSLPIYSISSPTSLRFLPLIGVEAQKDSSDGITGKKKGGHVQREKAPRRRSLKKNLVPQINLASSFFPAIPK

SEQ ID NO: 7702 - protein, 914 aa, Homo sapiens
MDIRKEKRLNMALQMSNFKKALNRFEKLVEQTAAQKRDERAGLFIHKEDAIGYDKFYASVQKLFGPDVKNQDVKRFYRKLCNNTDASADWCEIFGYFSSEEDPIASQLDEENLVFFVSRKRRILISGSRRRDVIKSIVKIPHLDLLITATQKGLITVFNNQDTSWITGCDYLLQLKRIVATTERTIIVWDYKAQGSSQENYFVIKPMDHCLLCVCVVPLPDHLCRDDILLGDDGGFVNRFTVNSDDFGIKQAKSKRKLQNQVLDSKNFKSVKRKLHNDWVMKIRYISALNCFGSCSLDSNHSLVLESLKRLEDNLPVREFSMPRGANTFCYCVKANVIVTGGDDKVIRLWHPNISTKPVGKLVGHMFSIAEIVTNEKDQHVVSLSSAKVFRVWDIQTLSLLQVFHDSQGGPGDMQIYSMIYDANHGMLITGSSVMDMYPLTRMIQDTKQVPHTHEREINVMLYNKYFHQVLTICSESIIRVWELETGLQVYQILEPHGFNTEVTSAAVDESGFLFATGAYNGTVRIWDFGSGQEMKVLPEGKDWKEDEHCLRRLIFLKAQEKHQQLVLALERNGTIKMIQGKEDDIYLMVIWELPDVVPFLQDGKHAVHLRMSTRDRNMAIPFPDVELIVERNFSQPTDNPTMDLLRVNCIDLLQVEGYNLIAAGTLNEGHVILCNISSFLDPPHDEKKFKQLLSWRAHSLEIIQVIYVEEKQVVLTASIDGSVRLWHALNGHYCGYFGQRRLFELSQTRDFILPCDVTEYPIEIKEESKFTEKQKYEYPLIFDREKWRKMSSVSLLFKRTPPKAFEVEQDFKFFKSLSSPKIRRYPLEGFVTENREAGIVFGSLPIYSISSPTSLRFLPLIGVEAQKDSSDGITGKKKGGHVQREKAPRRRSLKKNLVPQINLASSFFPAIPK

SEQ ID NO: 7703 - protein, 596 aa, Homo sapiens
MAAHLSYGRVNLNVLREAVRRELREFLDKCAGSKAIVWDEYLTGPFGLIAQYSLLKEHEVEKMFTLKGNRLPAADVKNIIFFVRPRLELMDIIAENVLSEDRRGPTRDFHILFVPRRSLLCEQRLKDLGVLGSFIHREEYSLDLIPFDGDLLSMESEGAFKECYLEGDQTSLYHAAKGLMTLQALYGTIPQIFGKGECARQVANMMIRMKREFTGSQNSIFPVFDNLLLLDRNVDLLTPLATQLTYEGLIDEIYGIQNSYVKLPPEKFAPKKQGDGGKDLPTEAKKLQLNSAEELYAEIRDKNFNAVGSVLSKKAKIISAAFEERHNAKTVGEIKQFVSQLPHMQAARGSLANHTSIAELIKDVTTSEDFFDKLTVEQEFMSGIDTDKVNNYIEDCIAQKHSLIKVLRLVCLQSVCNSGLKQKVLDYYKREILQTYGYEHILTLHNLEKAGLLKPQTGGRNNYPTIRKTLRLWMDDVNEQNPTDISYVYSGYAPLSVRLAQLLSRPGWRSIEEVLRILPGPHFEERQPLPTGLQKKRQPGENRVTLIFFLGGVTFAEIAALRFLSQLEDGGTEYVIATTKLMNGTSWIEALMEKPF

SEQ ID NO: 7704 - protein, 140 aa, Homo sapiens
MFARLCPVSETFGRLCPVSETFARLCPVSETFARLCPVSETFARLCPVSETFGRLCPVSEMFGRLSPVSETFGRLCPVSETFGRLCPVSEMFARLCPVSETFGRLSPVSEMFGRLCPVSEMFGRLCPVSEMFGRLCPVIT

SEQ ID NO: 7705 - protein, 416 aa, Homo sapiens
MAAILLTTRPKVPVSFEDVSVYFTKTEWKLLDLRQKVLYKRVMLENYSHLVSLGFSFSKPHLISQLERGEGPWVADIPRTWATAGLHIGDRTQSKTSTSTQKHSGRQLPGADPQGGKEGQAARSSVLQRGAQGLGQSSAAGPQGPKGAEKRYLCQQCGKAFSRSSNLIKHRIIHSGEKPYACPECGKLFRRSFALLEHQRIHSGEKPYACPECSKTFTRSSNLIKHQVIHSGERPFACGDCGKLFRRSFALLEHARVHSGERPYACPECGKAFSRSSNLIEHQRTHRGEKPYACGQCAKAFKGVSQLIHHQRSHSGERPFACRECGKAFRGRSGLSQHRRVHSGEKPYECSDCGKAFGRRANLFKHQAVHGARRPAKAETARRLAGPGSTGPGSAVAATSPPRPSTAARPSRPSRR

SEQ ID NO: 7706 - protein, 526 aa, Homo sapiens
MPQQLLITLPTEASTWVKLQHPKKAVEGAPLWEDVTKMFEGEALLSQDAEDVKTQRESLEDEVTPGLPTAESQELLTFKDISIDFTQEEWGQLAPAHQNLYREVMLENYSNLVSVGYQLSKPSVISQLEKGEEPWMAEKEGPGDPSSDLKSKIETIESTAKSTISQERLYHGIMMESFMRDDIIYSTLRKVSTYDDVLERHQETCMRDVRQAILTHKKRVQETNKFGENIIVHSNVIIEQRHHKYDTPTKRNTYKLDLINHPTSYIRTKTYECNICEKIFKQPIHLTEHMRIHTGEKPFRCKECGRAFSQSASLSTHQRIHTGEKPFECEECGKAFRHRSSLNQHHRTHTGEKPYVCDKCQKAFSQNISLVQHLRTHSGEKPFTCNECGKTFRQIRHLSEHIRIHTGEKPYACTACCKTFSHRAYLTHHQRIHTGERPYKCKECGKAFRQRIHLSNHKTVHTGVKAYECNRCGKAYRHDSSFKKHQRHHTGEKPYECNECGKAFSYNSSLSRHHEIHRRNAFRNKV

SEQ ID NO: 7707 - protein, 738 aa, Homo sapiens
MTKFQEAVTFKDVAVAFTEEELGLLDSAQRKLYRDVMLENFRNLVSVGHQSFKPDMISQLEREEKLWMKELQTQRGKHSGDRNQNEMATLHKAGLRCFSLGELSCWQIKRHIASKLARSQDSMINIEGKSSQFPKHHDSPCQVGAGESIQASVDDNCLVNHIGDHSSIIENQEFPTGKVPNSWSKIYLNETQNYQRSCKQTQMKNKLCIFAPYVDIFSCISHHHDDNIVHKRDKVHSNSDCGKDTLKVSPLTQRSIHTGQKTYQGNECEEAFNDSSSLELHKQVHLGKKSPACSTHEKDTSYSSGIPVQQSVRTGKKRYWCHECGKGFSQSSNLQTHQRVHTGEKPYTCHECGKSFNQSSHLYAHLPIHTGEKPYRCDSCGKGFSRSTDLNIHCRVHTGEKPYKCEVCGKGFTQRSHLQAHERIHTGEKPYKCGDCGKRFSCSSNLHTHQRVHTEEKPYKCDECGKCFSLSFNLHSHQRVHTGEKPYKCEECGKGFSSASSFQSHQRVHTGEKPFRCNVCGKGFSQSSYFQAHQRVHTGEKPYKCEVCGKRFNWSLNLHNHQRVHTGEKPYKCEECGKGFSQASNLQAHQSVHTGEKPFKCDACQKRFSQASHLQAHQRVHTGEKPYKCDTCGKAFSQRSNLQVHQIIHTGEKPFKCEECGKEFSWSAGLSAHQRVHTGEKPYTCQQCGKGFSQASHFHTHQRVHTGERPYICDVCCKGFSQRSHLIYHQRVHTGGNL

SEQ ID NO: 7708 - protein, 734 aa, Homo sapiens
MTKFQEAVTFKDVAVAFTEEELGLLDSAQRKLYRDVMLENFRNLVSVGHQSFKPDMISQLEREEKLWMKELQTQRGDRNQNEMATLHKAGLRCFSLGELSCWQIKRHIASKLARSQDSMINIEGKSSQFPKHHDSPCQVGAGESIQASVDDNCLVNHIGDHSSIIENQEFPTGKVPNSWSKIYLNETQNYQRSCKQTQMKNKLCIFAPYVDIFSCISHHHDDNIVHKRDKVHSNSDCGKDTLKVSPLTQRSIHTGQKTYQGNECEEAFNDSSSLELHKQVHLGKKSPACSTHEKDTSYSSGIPVQQSVRTGKKRYWCHECGKGFSQSSNLQTHQRVHTGEKPYTCHECGKSFNQSSHLYAHLPIHTGEKPYRCDSCGKGFSRSTDLNIHCRVHTGEKPYKCEVCGKGFTQRSHLQAHERIHTGEKPYKCGDCGKRFSCSSNLHTHQRVHTEEKPYKCDECGKCFSLSFNLHSHQRVHTGEKPYKCEECGKGFSSASSFQSHQRVHTGEKPFRCNVCGKGFSQSSYFQAHQRVHTGEKPYKCEVCGKRFNWSLNLHNHQRVHTGEKPYKCEECGKGFSQASNLQAHQSVHTGEKPFKCDACQKRFSQASHLQAHQRVHTGEKPYKCDTCGKAFSQRSNLQVHQIIHTGEKPFKCEECGKEFSWSAGLSAHQRVHTGEKPYTCQQCGKGFSQASHFHTHQRVHTGERPYICDVCCKGFSQRSHLIYHQRVHTGGNL

SEQ ID NO: 7709 - protein, 803 aa, Homo sapiens
MNMFKEAVTFKDVAVAFTEEELGLLGPAQRKLYRDVMVENFRNLLSVGHPPFKQDVSPIERNEQLWIMTTATRRQGNLGEKNQSKLITVQDRESEEELSCWQIWQQIANDLTRCQDSMINNSQCHKQGDFPYQVGTELSIQISEDENYIVNKADGPNNTGNPEFPILRTQDSWRKTFLTESQRLNRDQQISIKNKLCQCKKGVDPIGWISHHDGHRVHKSEKSYRPNDYEKDNMKILTFDHNSMIHTGQKSYQCNECKKPFSDLSSFDLHQQLQSGEKSLTCVERGKGFCYSPVLPVHQKVHVGEKLKCDECGKEFSQGAHLQTHQKVHVIEKPYKCKQCGKGFSRRSALNVHCKVHTAEKPYNCEECGRAFSQASHLQDHQRLHTGEKPFKCDACGKSFSRNSHLQSHQRVHTGEKPYKCEECGKGFICSSNLYIHQRVHTGEKPYKCEECGKGFSRPSSLQAHQGVHTGEKSYICTVCGKGFTLSSNLQAHQRVHTGEKPYKCNECGKSFRRNSHYQVHLVVHTGEKPYKCEICGKGFSQSSYLQIHQKAHSIEKPFKCEECGQGFNQSSRLQIHQLIHTGEKPYKCEECGKGFSRRADLKIHCRIHTGEKPYNCEECGKVFRQASNLLAHQRVHSGEKPFKCEECGKSFGRSAHLQAHQKVHTGDKPYKCDECGKGFKWSLNLDMHQRVHTGEKPYKCGECGKYFSQASSLQLHQSVHTGEKPYKCDVCGKVFSRSSQLQSHQRVHTGEKPYKCEICGKSFSWRSNLTVHHRIHVGDKSYKSNRGGKNIRESTQEKKSIK

SEQ ID NO: 7710 - protein, 94 aa, Homo sapiens
MNMFKEAVTFKDVAVAFTEEELGLLGPAQRKLYRDVMVENFRNLLSVGHPPFKQDVSPIERNEQLWIMTTATRRQGNLDTLLVKALLLYDLAQT

SEQ ID NO: 7711 - protein, 805 aa, Homo sapiens
MDEDGLELQQEPNSFFDATGADGTHMDGDQIVVEVQETVFVSDVVDSDITVHNFVPDDPDSVVIQDVIEDVVIEDVQCPDIMEEADVSETVIIPEQVLDSDVTEEVSLAHCTVPDDVLASDITSASMSMPEHVLTGDSIHVSDVGHVGHVGHVEHVVHDSVVEAEIVTDPLTTDVVSEEVLVADCASEAVIDANGIPVDQQDDDKGNCEDYLMISLDDAGKIEHDGSSGMTMDTESEIDPCKVDGTCPEVIKVYIFKADPGEDDLGGTVDIVESEPENDHGVELLDQNSSIRVPREKMVYMTVNDSQPEDEDLNVAEIADEVYMEVIVGEEDAAAAAAAAAVHEQQMDDNEIKTFMPIAWAAAYGNNSDGIENRNGTASALLHIDESAGLGRLAKQKPKKRRRPDSRQYQTAIIIGPDGHPLTVYPCMICGKKFKSRGFLKRHMKNHPEHLAKKKYRCTDCDYTTNKKISLHNHLESHKLTSKAEKAIECDECGKHFSHAGALFTHKMVHKEKGANKMHKCKFCEYETAEQGLLNRHLLAVHSKNFPHICVECGKGFRHPSELKKHMRIHTGEKPYQCQYCEYRSADSSNLKTHVKTKHSKEMPFKCDICLLTFSDTKEVQQHALIHQESKTHQCLHCDHKSSNSSDLKRHIISVHTKDYPHKCDMCDKGFHRPSELKKHVAAHKGKKMHQCRHCDFKIADPFVLSRHILSVHTKDLPFRCKRCRKGFRQQSELKKHMKTHSGRKVYQCEYCEYSTTDASGFKRHVISIHTKDYPHRCEYCKKGFRRPSEKNQHIMRHHKEVGLP

SEQ ID NO: 7712 - protein, 576 aa, Homo sapiens
MTMDTESEIDPCKVDGTCPEVIKVYIFKADPGEDDLGGTVDIVESEPENDHGVELLDQNSSIRVPREKMVYMTVNDSQPEDEDLNVAEIADEVYMEVIVGEEDAAAAAAAAAVHEQQMDDNEIKTFMPIAWAAAYGNNSDGIENRNGTASALLHIDESAGLGRLAKQKPKKRRRPDSRQYQTAIIIGPDGHPLTVYPCMICGKKFKSRGFLKRHMKNHPEHLAKKKYRCTDCDYTTNKKISLHNHLESHKLTSKAEKAIECDECGKHFSHAGALFTHKMVHKEKGANKMHKCKFCEYETAEQGLLNRHLLAVHSKNFPHICVECGKGFRHPSELKKHMRIHTGEKPYQCQYCEYRSADSSNLKTHVKTKHSKEMPFKCDICLLTFSDTKEVQQHALIHQESKTHQCLHCDHKSSNSSDLKRHIISVHTKDYPHKCDMCDKGFHRPSELKKHVAAHKGKKMHQCRHCDFKIADPFVLSRHILSVHTKDLPFRCKRCRKGFRQQSELKKHMKTHSGRKVYQCEYCEYSTTDASGFKRHVISIHTKDYPHRCEYCKKGFRRPSEKNQHIMRHHKEVGLP

SEQ ID NO: 7713 - protein, 844 aa, Homo sapiens
MDEDGLELQQEPNSFFDATDRVSFCHPGWSTVAPSGSTATSASQAQVICSASRVTGATGADGTHMDGDQIVVEVQETVFVSDVVDSDITVHNFVPDDPDSVVIQDVIEDVVIEDVQCPDIMEEADVSETVIIPEQVLDSDVTEEVSLAHCTVPDDVLASDITSASMSMPEHVLTGDSIHVSDVGHVGHVGHVEHVVHDSVVEAEIVTDPLTTDVVSEEVLVADCASEAVIDANGIPVDQQDDDKGNCEDYLMISLDDAGKIEHDGSSGMTMDTESEIDPCKVDGTCPEVIKVYIFKADPGEDDLGGTVDIVESEPENDHGVELLDQNSSIRVPREKMVYMTVNDSQPEDEDLNVAEIADEVYMEVIVGEEDAAAAAAAAAVHEQQMDDNEIKTFMPIAWAAAYGNNSDGIENRNGTASALLHIDESAGLGRLAKQKPKKRRRPDSRQYQTAIIIGPDGHPLTVYPCMICGKKFKSRGFLKRHMKNHPEHLAKKKYRCTDCDYTTNKKISLHNHLESHKLTSKAEKAIECDECGKHFSHAGALFTHKMVHKEKGANKMHKCKFCEYETAEQGLLNRHLLAVHSKNFPHICVECGKGFRHPSELKKHMRIHTGEKPYQCQYCEYRSADSSNLKTHVKTKHSKEMPFKCDICLLTFSDTKEVQQHALIHQESKTHQCLHCDHKSSNSSDLKRHIISVHTKDYPHKCDMCDKGFHRPSELKKHVAAHKGKKMHQCRHCDFKIADPFVLSRHILSVHTKDLPFRCKRCRKGFRQQSELKKHMKTHSGRKVYQCEYCEYSTTDASGFKRHVISIHTKDYPHRCEYCKKGFRRPSEKNQHIMRHHKEVGLP

SEQ ID NO: 7714 - protein, 1074 aa, Homo sapiens
MIPICPVVSFTYVPSRLGEDAKMATGNYFGFTHSGAAAAAAAAQYSQQPASGVAYSHPTTVASYTVHQAPVAAHTVTAAYAPAAATVAVARPAPVAVAAAATAAAYGGYPTAHTATDYGYTQRQQEAPPPPPPATTQNYQDSYSYVRSTAPAVAYDSKQYYQQPTATAAAVAAAAQPQPSVAETYYQTAPKAGYSQGATQYTQAQQTRQVTAIKPATPSPATTTFSIYPVSSTVQPVAAAATVVPSYTQSATYSTTAVTYSGTSYSGYEAAVYSAASSYYQQQQQQQKQAAAAAAAAAATAAWTGTTFTKKAPFQNKQLKPKQPPKPPQIHYCDVCKISCAGPQTYKEHLEGQKHKKKEAALKASQNTSSSNSSTRGTQNQLRCELCDVSCTGADAYAAHIRGAKHQKVVKLHTKLGKPIPSTEPNVVSQATSSTAVSASKPTASPSSIAANNCTVNTSSVATSSMKGLTTTGNSSLNSTSNTKVSAVPTNMAAKKTSTPKINFVGGNKLQSTGNKAEDIKGTECVKSTPVTSAVQIPEVKQDTVSEPVTPASLAALQSDVQPVGHDYVEEVRNDEGKVIRFHCKLCECSFNDPNAKEMHLKGRRHRLQYKKKVNPDLQVEVKPSIRARKIQEEKMRKQMQKEEYWRRREEEERWRMEMRRYEEDMYWRRMEEEQHHWDDRRRMPDGGYPHGPPGPLGLLGVRPGMPPQPQGPAPLRRPDSSDDRYVMTKHATIYPTEEELQAVQKIVSITERALKLVSDSLSEHEKNKNKEGDDKKEGGKDRALKGVLRVGVLAKGLLLRGDRNVNLVLLCSEKPSKTLLSRIAENLPKQLAVISPEKYDIKCAVSEAAIILNSCVEPKMQVTITLTSPIIREENMREGDVTSGMVKDPPDVLDRQKCLDALAALRHAKWFQARANGLQSCVIIIRILRDLCQRVPTWSDFPSWAMELLVEKAISSASSPQSPGDALRRVFECISSGIILKGSPGLLDPCEKDPFDTLATMTDQQREDITSSAQFALRLLAFRQIHKVLGMDPLPQMSQRFNIHNNRKRRRDSDGVDGFEAEGKKDKKDYDNF

SEQ ID NO: 7715 - protein, 263 aa, Homo sapiens
MLALRLLNVVAPAYFLCISLVTFVLQLFLFLPSMREDPAAARLFSPALLHGALFLFLSANALGNYVLVIQNSPDDLGACQGASARKTPCPSPSTHFCRVCARVTLRHDHHCFFTGNCIGSRNMRNFVLFCLYTSLACLYSMVAGVAYISAVLSISFAHPLAFLTLLPTSISQFFSGAVLGSEMFVILMLYLWFAIGLACAGFCCHQLLLILRGQTRHQVRKGVAVRARPWRKNLQEVFGKRWLLGLLVPMFNVGSESSKQQDK

SEQ ID NO: 7716 - protein, 478 aa, Homo sapiens
MSQVTFSDVAIDFSHEEWACLDSAQRDLYKDVMVQNYENLVSVGLSVTKPYVIMLLEDGKEPWMMEKKLSKAYPFPLSHSVPASVNFGFSALFEHCSEVTEIFELSELCVFWVLHFLSNSPNSTVEAFSRSKKKKKKKKKRQCFAFLIYFRLGIKMGKQGIINKEGYLYEDSPQPVTMEKVVKQSYEFSNSNKNLEYTECDTFRSTFHSKSTLSEPQNNSAEGNSHKYDILKKNLSKKSVIKSERINGGKKLLNSNKSGAAFNQSKSLTLPQTCNREKIYTCSECGKAFGKQSILSRHWRIHTGEKPYECRECGKTFSHGSSLTRHQISHSGEKPYKCIECGKAFSHGSSLTNHQSTHTGEKPYECMNCGKSFSRVSLLIQHLRIHTQEKRYECRICGKAFIHSSSLIHHQKSHTGEKPYECRECGKAFCCSSHLTQHQRIHSMKKKYECNKCLKVFSSFSFLVQHQSIHTEEKPFEV

SEQ ID NO: 7717 - protein, 399 aa, Homo sapiens
MSQVTFSDVAIDFSHEEWACLDSAQRDLYKDVMVQNYENLVSVGLSVTKPYVIMLLEDGKEPWMMEKKLSKDWESRWENKELSTKKDIYDEDSPQPVTMEKVVKQSYEFSNSNKNLEYTECDTFRSTFHSKSTLSEPQNNSAEGNSHKYDILKKNLSKKSVIKSERINGGKKLLNSNKSGAAFNQSKSLTLPQTCNREKIYTCSECGKAFGKQSILSRHWRIHTGEKPYECRECGKTFSHGSSLTRHQISHSGEKPYKCIECGKAFSHGSSLTNHQSTHTGEKPYECMNCGKSFSRVSLLIQHLRIHTQEKRYECRICGKAFIHSSSLIHHQKSHTGEKPYECRECGKAFCCSSHLTQHQRIHSMKKKYECNKCLKVFSSFSFLVQHQSIHTEEKPFEV

SEQ ID NO: 7718 - protein, 499 aa, Homo sapiens
MRVLTFRDVAVEFSPEEWECLDSAQQRLYRDVMLENYGNLFSLGLAIFKPDLITYLEQRKEPWNARRQKTVAKHPAGSLHFTAEILLEHDINDSFQKVILRKSGSCDLNTLRLKKDYQRVGNCKGQKSSYNGIHQCLSATRSKTCQYNKCGKAFGLCSIFTEHKKIFSREKCYKCEECGKDCRLSDFTIQKRIHTADRSYKCEECGKACKKFSNLTEHNRVHTGKKPYKCEECGKTFTCSSALTKHKRNHTGDRPYKCEECHKAFRCCSDLTKHKRIHTGEKPYKCKECHKAFRCCSDLTKHKRIHTGEKPYKCNECGKAFMWISALSQHNRIHTGEKPYICEECGKAFTYSSTLISHKRIHMELRPYKCEECGKTFKWFSDLTNHKRIHTGEKPYKCEECGKSFTCSSNLIKHKRIHMEVRPYKCEECGKTFKWFPDLTNHKRIHTGEKPYKCEECGKTFTCSSSLIKHKRSHTGDRPTSAKNVAKPLGGSQTLLNIR

SEQ ID NO: 7719 - protein, 1067 aa, Homo sapiens
MNSMDRHIQQTNDRLQCIKQHLQNPANFHNAATELLDWCGDPRAFQRPFEQSLMGCLTVVSRVAAQQGFDLDLGYRLLAVCAANRDKFTPKSAALLSSWCEELGRLLLLRHQKSRQSDPPGKLPMQPPLSSMSSMKPTLSHSDGSFPYDSVPWQQNTNQPPGSLSVVTTVWGVTNTSQSQVLGNPMANANNPMNPGGNPMASGMTTSNPGLNSPQFAGQQQQFSAKAGPAQPYIQQSMYGRPNYPGSGGFGASYPGGPNAPAGMGIPPHTRPPADFTQPAAAAAAAAVAAAAATATATATATVAALQETQNKDINQYGPMGPTQAYNSQFMNQPGPRGPASMGGSMNPASMAAGMTPSGMSGPPMGMNQPRPPGISPFGTHGQRMPQQTYPGPRPQSLPIQNIKRPYPGEPNYGNQQYGPNSQFPTQPGQYPAPNPPRPLTSPNYPGQRMPSQPSSGQYPPPTVNMGQYYKPEQFNGQNNTFSGSSYSNYSQGNVNRPPRPVPVANYPHSPVPGNPTPPMTPGSSIPPYLSPSQDVKPPFPPDIKPNMSALPPPPANHNDELRLTFPVRDGVVLEPFRLEHNLAVSNHVFHLRPTVHQTLMWRSDLELQFKCYHHEDRQMNTNWPASVQVSVNATPLTIERGDNKTSHKPLHLKHVCQPGRNTIQITVTACCCSHLFVLQLVHRPSVRSVLQGLLKKRLLPAEHCITKIKRNFSSVAASSGNTTLNGEDGVEQTAIKVSLKCPITFRRIQLPARGHDCKHVQCFDLESYLQLNCERGTWRCPVCNKTALLEGLEVDQYMWGILNAIQHSEFEEVTIDPTCSWRPVPIKSDLHIKDDPDGIPSKRFKTMSPSQMIMPNVMEMIAALGPGPSPYPLPPPPGGTNSNDYSSQGNNYQGHGNFDFPHGNPGGTSMNDFMHGPPQLSHPPDMPNNMAALEKPLSHPMQETMPHAGSSDQPHPSIQQGLHVPHPSSQSGPPLHHSGAPPPPPSQPPRQPPQAAPSSHPHSDLTFNPSSALEGQAGAQGASDMPEPSLDLLPELTNPDELLSYLDPPDLPSNSNDDLLSLFENN

SEQ ID NO: 7720 - protein, 997 aa, Homo sapiens
RPPPAGPQAPEGARAGSRPVQLLALLSSWCEELGRLLLLRHQKSRQSDPPGKLPMQPPLSSMSSMKPTLSHSDGSFPYDSVPWQQNTNQPPGSLSVVTTVWGVTNTSQSQVLGNPMANANNPMNPGGNPMASGMTTSNPGLNSPQFAGQQQQFSAKAGPAQPYIQQSMYGRPNYPGSGGFGASYPGGPNAPAGMGIPPHTRPPADFTQPAAAAAAAAVAAAAATATATATATVAALQETQNKDINQYGPMGPTQAYNSQFMNQPGPRGPASMGGSMNPASMAAGMTPSGMSGPPMGMNQPRPPGISPFGTHGQRMPQQTYPGPRPQSLPIQNIKRPYPGEPNYGNQQYGPNSQFPTQPGQYPAPNPPRPLTSPNYPGQRMPSQPSSGQYPPPTVNMGQYYKPEQFNGQNNTFSGSSYSNYSQGNVNRPPRPVPVANYPHSPVPGNPTPPMTPGSSIPPYLSPSQDVKPPFPPDIKPNMSALPPPPANHNDELRLTFPVRDGVVLEPFRLEHNLAVSNHVFHLRPTVHQTLMWRSDLELQFKCYHHEDRQMNTNWPASVQVSVNATPLTIERGDNKTSHKPLHLKHVCQPGRNTIQITVTACCCSHLFVLQLVHRPSVRSVLQGLLKKRLLPAEHCITKIKRNFSSVAASSGNTTLNGEDGVEQTAIKVSLKCPITFRRIQLPARGHDCKHVQCFDLESYLQLNCERGTWRCPVCNKTALLEGLEVDQYMWGILNAIQHSEFEEVTIDPTCSWRPVPIKSDLHIKDDPDGIPSKRFKTMSPSQMIMPNVMEMIAALGPGPSPYPLPPPPGGTNSNDYSSQGNNYQGHGNFDFPHGNPGGTSMNDFMHGPPQLSHPPDMPNNMAALEKPLSHPMQETMPHAGSSDQPHPSIQQGLHVPHPSSQSGPPLHHSGAPPPPPSQPPRQPPQAAPSSHPHSDLTFNPSSALEGQAGAQGASDMPEPSLDLLPELTNPDELLSYLDPPDLPSNSNDDLLSLFENN

SEQ ID NO: 7721 - protein, 340 aa, Homo sapiens
MPEWPPCLSVAPALVITMAAGKGAPLSPSAENRWRLSEPELGRGCKPVLLEKTNRLGPEAAVGRAGRDVGSAELALLVAPGKPRPGKPLPPKTRGEQRQSAFTELPRMKDRQVDAQAQEREHDDPTGQPGAPQLTQNIPRGPAGSKVFSVWPSGARSEQRSAFSKPTKRPAERPELTSVFPAGESADALGELSGLLNTTDLACWGRLSTPKLLVGDLWNLQALPQNAPLCSTFLGAPTLWLEHTQAQVPPPSSSSTTSWALLPPTLTSLGLSTQNWCAKCNLSFRLTSDLVFHMRSHHKKEHAGPDPHSQKRREEALACPVCQEHFRERHHLSRHMTSHS

SEQ ID NO: 7722 - protein, 233 aa, Homo sapiens
MKDRQVDAQAQEREHDDPTGQPGAPQLTQNIPRGPAGSKVFSVWPSGARSEQRSAFSKPTKRPAERPELTSVFPAGESADALGELSGLLNTTDLACWGRLSTPKLLVGDLWNLQALPQNAPLCSTFLGAPTLWLEHTQAQVPPPSSSSTTSWALLPPTLTSLGLSTQNWCAKCNLSFRLTSDLVFHMRSHHKKEHAGPDPHSQKRREEALACPVCQEHFRERHHLSRHMTSHS

SEQ ID NO: 7723 - protein, 902 aa, Homo sapiens
MADPEVCCFITKILCAHGGRMALDALLQEIALSEPQLCEVLQVAGPDRFVVLETGGEAGITRSVVATTRARVCRRKYCQRPCDNLHLCKLNLLGRCNYSQSERNLCKYSHEVLSEENFKVLKNHELSGLNKEELAVLLLQSDPFFMPEICKSYKGEGRQQICNQQPPCSRLHICDHFTRGNCRFPNCLRSHNLMDRKVLAIMREHGLNPDVVQNIQDICNSKHMQKNPPGPRAPSSHRRNMAYRARSKSRDRFFQGSQEFLASASASAERSCTPSPDQISHRASLEDAPVDDLTRKFTYLGSQDRARPPSGSSKATDLGGTSQAGTSQRFLENGSQEDLLHGNPGSTYLASNSTSAPNWKSLTSWTNDQGARRKTVFSPTLPAARSSLGSLQTPEAVTTRKGTGLLSSDYRIINGKSGTQDIQPGPLFNNNADGVATDITSTRSLNYKSTSSGHREISSPRIQDAGPASRDVQATGRIADDADPRVALVNDSLSDVTSTTSSRVDDHDSEEICLDHLCKGCPLNGSCSKVHFHLPYRWQMLIGKTWTDFEHMETIEKGYCNPGIHLCSVGSYTINFRVMSCDSFPIRRLSTPSSVTKPANSVFTTKWIWYWKNESGTWIQYGEEKDKRKNSNVDSSYLESLYQSCPRGVVPFQAGSRNYELSFQGMIQTNIASKTQKDVIRRPTFVPQWYVQQMKRGPDHQPAKTSSVSLTATFRPQEDFCFLSSKKYKLSEIHHLHPEYVRVSEHFKASMKNFKIEKIKKIENSELLDKFTWKKSQMKEEGKLLFYATSRAYVESICSNNFDSFLHETHENKYGKGIYFAKDAIYSHKNCPYDAKNVVMFVAQVLVGKFTEGNITYTSPPPQFDSCVDTRSNPSVFVIFQKDQVYPQYVIEYTEDKACVIS

SEQ ID NO: 7724 - protein, 699 aa, Homo sapiens
MADPEVCCFITKILCAHGGRMALDALLQEIALSEPQLCEVLQVAGPDRFVVLETGGEAGITRSVVATTRARVCRRKYCQRPCDNLHLCKLNLLGRCNYSQSERNLCKYSHEVLSEENFKVLKNHELSGLNKEELAVLLLQSDPFFMPEICKSYKGEGRQQICNQQPPCSRLHICDHFTRGNCRFPNCLRSHNLMDRKVLAIMREHGLNPDVVQNIQDICNSKHMQKNPPGPRAPSSHRRNMAYRARSKSRDRFFQGSQEFLASASASAERSCTPSPDQISHRASLEDAPVDDLTRKFTYLGSQDRARPPSGSSKATDLGGTSQAGTSQRFLENGSQEDLLHGNPGSTYLASNSTSAPNWKSLTSWTNDQGARRKTVFSPTLPAARSSLGSLQTPEAVTTRKGTGLLSSDYRIINGKSGTQDIQPGPLFNNNADGVATDITSTRSLNYKSTSSGHREISSPRIQDAGPASRDVQATGRIADDADPRVALVNDSLSDVTSTTSSRVDDHDSEEICLDHLCKGCPLNGSCSKVHFHLPYRWQMLIGKTWTDFEHMETIEKGYCNPGIHLCSVGSYTINFRVMSCDSFPIRRLSTPSSVTKPANSVFTTKWIWYWKNESGTWIQYGEEKDKRKNSNVDSSYLESLYQSCPRGVVPFQAGSRNYELSFQGMIQTNIASKTQKDVIRRPTFVPQWYVQQMKRGPE

SEQ ID NO: 7725 - protein, 624 aa, Homo sapiens
MADPEVCCFITKILCAHGGRMALDALLQEIALSEPQLCEVLQVAGPDRFVVLETGGEAGITRSVVATTRARVCRRKYCQRPCDNLHLCKLNLLGRCNYSQSERNLCKYSHEVLSEENFKVLKNHELSGLNKEELAVLLLQSDPFFMPEICKSYKGEGRQQICNQQPPCSRLHICDHFTRGNCRFPNCLRSHNLMDRKVLAIMREHGLNPDVVQNIQDICNSKHMQKNPPGPRAPSSHRRNMAYRARSKSRDRFFQGSQEFLASASASAERSCTPSPDQISHRASLEDAPVDDLTRKFTYLGSQDRARPPSGSSKATDLGGTSQAGTSQRFLENGSQEDLLHGNPGSTYLASNSTSAPNWKSLTSWTNDQGARRKTVFSPTLPAARSSLGSLQTPEAVTTRKGTGLLSSDYRIINGKSGTQDIQPGPLFNNNADGVATDITSTRSLNYKSTSSGHREISSPRIQDAGPASRDVQATGRIADDADPRVALVNGKYKGKTLWASTFVHDIPNGSSQVVDKTTDVEKTGATGFGLTMAVKAEKDMLCTGSQSLRNLVPTTPGESTAPAQVSTLPQSPAALSSSNRAAVWGAQGQNCTQVPVSSASELTRKTTGSAQCKSLKDKGASVS

SEQ ID NO: 7726 - protein, 363 aa, Homo sapiens
MLIGKTWTDFEHMETIEKGYCNPGIHLCSVGSYTINFRVMSCDSFPIRRLSTPSSVTKPANSVFTTKWIWYWKNESGTWIQYGEEKDKRKNSNVDSSYLESLYQSCPRGVVPFQAGSRNYELSFQGMIQTNIASKTQKDVIRRPTFVPQWYVQQMKRGPDHQPAKTSSVSLTATFRPQEDFCFLSSKKYKLSEIHHLHPEYVRVSEHFKASMKNFKIEKIKKIENSELLDKFTWKKSQMKEEGKLLFYATSRAYVESICSNNFDSFLHETHENKYGKGIYFAKDAIYSHKNCPYDAKNVVMFVAQVLVGKFTEGNITYTSPPPQFDSCVDTRSNPSVFVIFQKDQVYPQYVIEYTEDKACVIS

SEQ ID NO: 7727 - protein, 160 aa, Homo sapiens
MLIGKTWTDFEHMETIEKGYCNPGIHLCSVGSYTINFRVMSCDSFPIRRLSTPSSVTKPANSVFTTKWIWYWKNESGTWIQYGEEKDKRKNSNVDSSYLESLYQSCPRGVVPFQAGSRNYELSFQGMIQTNIASKTQKDVIRRPTFVPQWYVQQMKRGPE

SEQ ID NO: 7728 - protein, 402 aa, Homo sapiens
MAEMNPAQGHVVFEDVAIYFSQEEWGHLDEAQRLLYRDVMLENLALLSSLGCCHGAEDEEAPLEPGVSVGVSQVMAPKPCLSTQNTQPCETCSSLLKDILRLAEHDGTHPEQGLYTCPAHLHQHQKEQIREKLSRGDGGRPTFVKNHRVHMAGKTFLCSECGKAFSHKHKLSDHQKIHTGERTYKCSKCGILFMERSTLNRHQRTHTGERPYECNECGKAFLCKSHLVRHQTIHSGERPYECSECGKLFMWSSTLITHQRVHTGKRPYGCSECGKFFKCNSNLFRHYRIHTGKRSYGCSECGKFFMERSTLSRHQRVHTGERPYECNECGKFFSLKSVLIQHQRVHTGERPYECSECGKAFLTKSHLICHQTVHTAAKQCSECGKFFRYNSTLLRHQKVHTG

SEQ ID NO: 7729 - protein, 353 aa, Homo sapiens
MAEMNPAQGHVVFEDVAIYFSQEEWGHLDEAQRLLYRDVMLENLALLSSLGCCHGAEDEEAPLEPGVSVGVSQVMAPKPCLSTQNTQPCETCSSLLKDILRLAEHDGTHPEQGLYTCPAHLHQHQKEQIREKLSRGDGGRPTFVKNHRVHMAGKTFLCSECGKAFSHKHKLSDHQKIHTGERTYKCSKCGILFMERSTLNRHQRTHTGERPYECNECGKAFLCKSHLVRHQTIHSGERPYECSECGKLFMWSSTLITHQRVHTGKRPYGCSECGKFFKCNSNLFRHYRIHTGKRSYGCSECGKFFMERSTLSRHQRVHTGERPYECNECGKFFSLKSVLIQHQRVYTEEESFQ

SEQ ID NO: 7730 - protein, 2506 aa, Homo sapiens
MEVLQCDGCDFRAPSYEDLKAHIQDVHTAFLQPTDVAEDNVNELRCGSVNASNQTEVEFSSIKDEFAIAEDLSGQNATSLGTGGYYGHSPGYYGQHIAANPKPTNKFFQCKFCVRYFRSKNLLIEHTRKVHGAQAEGSSSGPPVPGSLNYNIMMHEGFGKVFSCQFCTYKSPRRARIIKHQKMYHKNNLKETTAPPPAPAPMPDPVVPPVSLQDPCKELPAEVVERSILESMVKPLTKSRGNFCCEWCSYQTPRRERWCDHMMKKHRSMVKILSSLRQQQEGTNLPDVPNKSAPSPTSNSTYLTMNAASREIPNTTVSNFRGSMGNSIMRPNSSASKFSPMSYPQMKPKSPHNSGLVNLTERSRYGMTDMTNSSADLETNSMLNDSSSDEELNEIDSENGLSAMDHQTSGLSAEQLMGSDGNKLLETKGIPFRRFMNRFQCPFCPFLTMHRRSISRHIENIHLSGKTAVYKCDECPFTCKSSLKLGAHKQCHTGTTSDWDAVNSQSESISSSLNEGVVSYESSSINGRKSGVMLDPLQQQQPPQPPPPPPPPPPSQPQPLQQPQPPQLQPPHQVPPQPQTQPPPTQQPQPPTQAAPLHPYKCTMCNYSTTTLKGLRVHQQHKHSFCDNLPKFEGQPSSLPLENETDSHPSSSNTVKKSQTSILGLSSKNNFVAKASRKLANDFPLDLSPVKKRTRIDEIASNLQSKINQTKQQEDAVINVEDDEEEEEDNEVEIEVELDREEEPTEPIIEVPTSFSAQQIWVRDTSEPQKEPNFRNITHDYNATNGAEIELTLSEDEEDYYGSSTNLKDHQVSNTALLNTQTPIYGTEHNSENTDFGDSGRLYYCKHCDFNNKSARSVSTHYQRMHPYIKFSFRYILDPNDHSAVYRCLECYIDYTNFEDLQQHYGEHHPEAMNVLNFDHSDLIYRCRFCSYTSPNVRSLMPHYQRMHPTVKINNAMIFSSYVVEQQEGLNTESQTLREILNSAPKNMATSTPVARGGGLPATFNKNTPKTFTPECENQKDPLVNTVVVYDCDVCSFASPNMHSVLVHYQKKHPEEKASYFRIQKTMRMVSVDRGSALSQLSFEVGAPMSPKMSNMGSPPPPQPPPPDLSTELYYCKHCSYSNRSVVGVLVHYQKRHPEIKVTAKYIRQAPPTAAMMRGVEGPQGSPRPPAPIQQLNRSSSERDGPPVENEMFFCQHCDYGNRTVKGVLIHYQKKHRDFKANADVIRQHTATIRSLCDRNQKKPASCVLVSPSNLERDKTKLRALKCRQCSYTSPYFYALRKHIKKDHPALKATVTSIMRWAFLDGLIEAGYHCEWCIYSHTEPNGLLLHYQRRHPEHYVDYTYMATKLWAGPDPSPPSLTMPAEAKTYRCRDCVFEAVSIWDITNHYQAFHPWAMNGDESVLLDIIKEKDAVEKPILSSEELAGPVNCENSIPTPFPEQEAECPEDARLSPEKSLQLASANPAISSTPYQCTVCQSEYNNLHGLLTHYGKKHPGMKVKAADFAQDIDINPGAVYKCRHCPYINTRIHGVLTHYQKRHPSIKVTAEDFVHDVEQSADISQNDVEETSRIFKQGYGAYRCKLCPYTHGTLEKLKIHYEKYHNQPEFDVFSQSPPKLPVPLEPEMTTEVSPSQVSITEEEVGEEPVSTSHFSTSHLVSHTVFRCQLCKYFCSTRKGIARHYRIKHNNVRAQPEGKNNLFKCALCAYTNPIRKGLAAHYQKRHDIDAYYTHCLAASRTISDKPNKVIIPSPPKDDSPQLSEELRRAVEKKKCSLCSFQSFSKKGIVSHYMKRHPGVFPKKQHASKLGGYFTAVYADEHEKPTLMEEEERGNFEKAEVEGEAQEIEWLPFRCIKCFKLSFSTAELLCMHYTDHHSRDLKRDFIILGNGPRLQNSTYQCKHCDSKLQSTAELTSHLNIHNEEFQKRAKRQERRKQLLSKQKYADGAFADFKQERPFGHLEEVPKIKERKVVGYKCKFCVEVHPTLRAICNHLRKHVQYGNVPAVSAAVKGLRSHERSHLALAMFTREDKYSCQYCSFVSAFRHNLDRHMQTHHGHHKPFRCKLCSFKSSYNSRLKTHILKAHAGEHAYKCSWCSFSTMTISQLKEHSLKVHGKALTLPRPRIVSLLSSHSHHSSQKATPAEEVEDSNDSSYSEPPDVQQQLNHYQSAALARNNSRVSPVPLSGAAAGTEQKTEAVLHCEFCEFSSGYIQSIRRHYRDKHGGKKLFKCKDCSFYTGFKSAFTMHVEAGHSAVPEEGPKDLRCPLCLYHTKYKRNMIDHIVLHREERVVPIEVCRSKLSKYLQGVVFRCDKCTFTCSSDESLQQHIEKHNELKPYKCQLCYYETKHTEELDSHLRDEHKVSRNFELVGRVNLDQLEQMKEKMESSSSDDEDKEEEMNSKAEDRELMRFSDHGAALNTEKRFPCEFCGRAFSQGSEWERHVLRHGMALNDTKQVSREEIHPKEIMENSVKMPSIEEKEDDEAIGIDFSLKNETVAICVVTADKSLLENAEAKKE

SEQ ID NO: 7731 - protein, 1412 aa, Homo sapiens
MMRGVEGPQGSPRPPAPIQQLNRSSSERDGPPVENEMFFCQHCDYGNRTVKGVLIHYQKKHRDFKANADVIRQHTATIRSLCDRNQKKPASCVLVSPSNLERDKTKLRALKCRQCSYTSPYFYALRKHIKKDHPALKATVTSIMRWAFLDGLIEAGYHCEWCIYSHTEPNGLLLHYQRRHPEHYVDYTYMATKLWAGPDPSPPSLTMPAEAKTYRCRDCVFEAVSIWDITNHYQAFHPWAMNGDESVLLDIIKEKDAVEKPILSSEELAGPVNCENSIPTPFPEQEAECPEDARLSPEKSLQLASANPAISSTPYQCTVCQSEYNNLHGLLTHYGKKHPGMKVKAADFAQDIDINPGAVYKCRHCPYINTRIHGVLTHYQKRHPSIKVTAEDFVHDVEQSADISQNDVEETSRIFKQGYGAYRCKLCPYTHGTLEKLKIHYEKYHNQPEFDVFSQSPPKLPVPLEPEMTTEVSPSQVSITEEEVGEEPVSTSHFSTSHLVSHTVFRCQLCKYFCSTRKGIARHYRIKHNNVRAQPEGKNNLFKCALCAYTNPIRKGLAAHYQKRHDIDAYYTHCLAASRTISDKPNKVIIPSPPKDDSPQLSEELRRAVEKKKCSLCSFQSFSKKGIVSHYMKRHPGVFPKKQHASKLGGYFTAVYADEHEKPTLMEEEERGNFEKAEVEGEAQEIEWLPFRCIKCFKLSFSTAELLCMHYTDHHSRDLKRDFIILGNGPRLQNSTYQCKHCDSKLQSTAELTSHLNIHNEEFQKRAKRQERRKQLLSKQKYADGAFADFKQERPFGHLEEVPKIKERKVVGYKCKFCVEVHPTLRAICNHLRKHVQYGNVPAVSAAVKQEADDPAHLFLDGLEAAKDASGALVGRVDGEHCLLDGMLEDETRPGGYHCSQCDRVLMSMQGLRSHERSHLALAMFTREDKYSCQYCSFVSAFRHNLDRHMQTHHGHHKPFRCKLCSFKSSYNSRLKTHILKAHAGEHAYKCSWCSFSTMTISQLKEHSLKVHGKALTLPRPRIVSLLSSHSHHSSQKATPAEEVEDSNDSSYSEPPDVQQQLNHYQSAALARNNSRVSPVPLSGAAAGTEQKTEAVLHCEFCEFSSGYIQSIRRHYRDKHGGKKLFKCKDCSFYTGFKSAFTMHVEAGHSAVPEEGPKDLRCPLCLYHTKYKRNMIDHIVLHREERVVPIEVCRSKLSKYLQGVVFRCDKCTFTCSSDESLQQHIEKHNELKPYKCQLCYYETKHTEELDSHLRDEHKVSRNFELVGRVNLDQLEQMKEKMESSSSDDEDKEEEMNSKAEDRELMRFSDHGAALNTEKRFPCEFCGRAFSQGSEWERHVLRHGMALNDTKQVSREEIHPKEIMENSVKMPSIEEKEDDEAIGIDFSLKNETVAICVVTADKSLLENAEAKKE

SEQ ID NO: 7732 - protein, 2566 aa, Homo sapiens
MEVLQCDGCDFRAPSYEDLKAHIQDVHTAFLQPTDVAEDNVNELRCGSVNASNQTEVEFSSIKDEFAIAEDLSGQNATSLGTGGYYGHSPGYYGQHIAANPKPTNKFFQCKFCVRYFRSKNLLIEHTRKVHGAQAEGSSSGPPVPGSLNYNIMMHEGFGKVFSCQFCTYKSPRRARIIKHQKMYHKNNLKETTAPPPAPAPMPDPVVPPVSLQDPCKELPAEVVERSILESMVKPLTKSRGNFCCEWCSYQTPRRERWCDHMMKKHRSMVKILSSLRQQQEGTNLPDVPNKSAPSPTSNSTYLTMNAASREIPNTTVSNFRGSMGNSIMRPNSSASKFSPMSYPQMKPKSPHNSGLVNLTERSRYGMTDMTNSSADLETNSMLNDSSSDEELNEIDSENGLSAMDHQTSGLSAEQLMGSDGNKLLETKGIPFRRFMNRFQCPFCPFLTMHRRSISRHIENIHLSGKTAVYKCDECPFTCKSSLKLGAHKQCHTGTTSDWDAVNSQSESISSSLNEGVVSYESSSINGRKSGVMLDPLQQQQPPQPPPPPPPPPPSQPQPLQQPQPPQLQPPHQVPPQPQTQPPPTQQPQPPTQAAPLHPYKCTMCNYSTTTLKGLRVHQQHKHSFCDNLPKFEGQPSSLPLENETDSHPSSSNTVKKSQTSILGLSSKNNFVAKASRKLANDFPLDLSPVKKRTRIDEIASNLQSKINQTKQQEDAVINVEDDEEEEEDNEVEIEVELDREEEPTEPIIEVPTSFSAQQIWVRDTSEPQKEPNFRNITHDYNATNGAEIELTLSEDEEDYYGSSTNLKDHQVSNTALLNTQTPIYGTEHNSENTDFGDSGRLYYCKHCDFNNKSARSVSTHYQRMHPYIKFSFRYILDPNDHSAVYRCLECYIDYTNFEDLQQHYGEHHPEAMNVLNFDHSDLIYRCRFCSYTSPNVRSLMPHYQRMHPTVKINNAMIFSSYVVEQQEGLNTESQTLREILNSAPKNMATSTPVARGGGLPATFNKNTPKTFTPECENQKDPLVNTVVVYDCDVCSFASPNMHSVLVHYQKKHPEEKASYFRIQKTMRMVSVDRGSALSQLSFEVGAPMSPKMSNMGSPPPPQPPPPDLSTELYYCKHCSYSNRSVVGVLVHYQKRHPEIKVTAKYIRQAPPTAAMMRGVEGPQGSPRPPAPIQQLNRSSSERDGPPVENEMFFCQHCDYGNRTVKGVLIHYQKKHRDFKANADVIRQHTATIRSLCDRNQKKPASCVLVSPSNLERDKTKLRALKCRQCSYTSPYFYALRKHIKKDHPALKATVTSIMRWAFLDGLIEAGYHCEWCIYSHTEPNGLLLHYQRRHPEHYVDYTYMATKLWAGPDPSPPSLTMPAEAKTYRCRDCVFEAVSIWDITNHYQAFHPWAMNGDESVLLDIIKEKDAVEKPILSSEELAGPVNCENSIPTPFPEQEAECPEDARLSPEKSLQLASANPAISSTPYQCTVCQSEYNNLHGLLTHYGKKHPGMKVKAADFAQDIDINPGAVYKCRHCPYINTRIHGVLTHYQKRHPSIKVTAEDFVHDVEQSADISQNDVEETSRIFKQGYGAYRCKLCPYTHGTLEKLKIHYEKYHNQPEFDVFSQSPPKLPVPLEPEMTTEVSPSQVSITEEEVGEEPVSTSHFSTSHLVSHTVFRCQLCKYFCSTRKGIARHYRIKHNNVRAQPEGKNNLFKCALCAYTNPIRKGLAAHYQKRHDIDAYYTHCLAASRTISDKPNKVIIPSPPKDDSPQLSEELRRAVEKKKCSLCSFQSFSKKGIVSHYMKRHPGVFPKKQHASKLGGYFTAVYADEHEKPTLMEEEERGNFEKAEVEGEAQEIEWLPFRCIKCFKLSFSTAELLCMHYTDHHSRDLKRDFIILGNGPRLQNSTYQCKHCDSKLQSTAELTSHLNIHNEEFQKRAKRQERRKQLLSKQKYADGAFADFKQERPFGHLEEVPKIKERKVVGYKCKFCVEVHPTLRAICNHLRKHVQYGNVPAVSAAVKEADDPAHLFLDGLEAAKDASGALVGRVDGEHCLLDGMLEDETRPGGYHCSQCDRVLMSMQGLRSHERSHLALAMFTREDKYSCQYCSFVSAFRHNLDRHMQTHHGHHKPFRCKLCSFKSSYNSRLKTHILKAHAGEHAYKCSWCSFSTMTISQLKEHSLKVHGKALTLPRPRIVSLLSSHSHHSSQKATPAEEVEDSNDSSYSEPPDVQQQLNHYQSAALARNNSRVSPVPLSGAAAGTEQKTEAVLHCEFCEFSSGYIQSIRRHYRDKHGGKKLFKCKDCSFYTGFKSAFTMHVEAGHSAVPEEGPKDLRCPLCLYHTKYKRNMIDHIVLHREERVVPIEVCRSKLSKYLQGVVFRCDKCTFTCSSDESLQQHIEKHNELKPYKCQLCYYETKHTEELDSHLRDEHKVSRNFELVGRVNLDQLEQMKEKMESSSSDDEDKEEEMNSKAEDRELMRFSDHGAALNTEKRFPCEFCGRAFSQGSEWERHVLRHGMALNDTKQVSREEIHPKEIMENSVKMPSIEEKEDDEAIGIDFSLKNETVAICVVTADKSLLENAEAKKE

SEQ ID NO: 7733 - protein, 615 aa, Homo sapiens
MAERALEPEAEAEAEAGAGGEAAAEEGAAGRKARGRPRLTESDRARRRLESRKKYDVRRVYLGEAHGPWVDLRRRSGWSDAKLAAYLISLERGQRSGRHGKPWEQVPKKPKRKKRRRRNVNCLKNVVIWYEDHKHRCPYEPHLAELDPTFGLYTTAVWQCEAGHRYFQDLHSPLKPLSDSDPDSDKVGNGLVAGSSDSSSSGSASDSEESPEGQPVKAAAAAAAATPTSPVGSSGLITQEGVHIPFDVHHVESLAEQGTPLCSNPAGNGPEALETVVCVPVPVQVGAGPSALFENVPQEALGEVVASCPMPGMVPGSQVIIIAGPGYDALTAEGIHLNMAAGSGVPGSGLGEEVPCAMMEGVAAYTQTEPEGSQPSTMDATAVAGIETKKEKEDLCLLKKEEKEEPVAPELATTVPESAEPEAEADGEELDGSDMSAIIYEIPKEPEKRRRSKRSRVMDADGLLEMFHCPYEGCSQVYVALSSFQNHVNLVHRKGKTKVCPHPGCGKKFYLSNHLRRHMIIHSGVREFTCETCGKSFKRKNHLEVHRRTHTGETPLQCEICGYQCRQRASLNWHMKKHTAEVQYNFTCDRCGKRFEKLDSVKFHTLKSHPDHKPT

SEQ ID NO: 7734 - protein, 759 aa, Homo sapiens
MGLADASGPRDTQALLSATQAMDLRRRDYHMERPLLNQEHLEELGRWGSAPRTHQWRTWLQCSRARAYALLLQHLPVLVWLPRYPVRDWLLGDLLSGLSVAIMQLPQGLAYALLAGLPPVFGLYSSFYPVFIYFLFGTSRHISVGTFAVMSVMVGSVTESLAPQALNDSMINETARDAARVQVASTLSVLVGLFQVGLGLIHFGFVVTYLSEPLVRGYTTAAAVQVFVSQLKYVFGLHLSSHSGPLSLIYTVLEVCWKLPQSKVGTVVTAAVAGVVLVVVKLLNDKLQQQLPMPIPGELLTLIGATGISYGMGLKHRFEVDVVGNIPAGLVPPVAPNTQLFSKLVGSAFTIAVVGFAIAISLGKIFALRHGYRVDSNQELVALGLSNLIGGIFQCFPVSCSMSRSLVQESTGGNSQVAGAISSLFILLIIVKLGELFHDLPKAVLAAIIIVNLKGMLRQLSDMRSLWKANRADLLIWLVTFTATILLNLDLGLVVAVIFSLLLVVVRTQMPHYSVLGQVPDTDIYRDVAEYSEAKEVRGVKVFRSSATVYFANAEFYSDALKQRCGVDVDFLISQKKKLLKKQEQLKLKQLQKEEKLRKQAASPKGASVSINVNTSLEDMRSNNVEDCKMMQVSSGDKMEDATANGQEDSKAPDGSTLKALGLPQPDFHSLILDLGALSFVDTVCLKSLKNIFHDFREIEVEVYMAACHSPVVSQLEAGHFFDASITKKHLFASVHDAVTFALQHPRPVPDSPVSVTRL

SEQ ID NO: 7735 - protein, 740 aa, Homo sapiens
MGLADASGPRDTQALLSATQAMDLRRRDYHMERPLLNQEHLEELGRWGSAPRTHQWRTWLQCSRARAYALLLQHLPVLVWLPRYPVRDWLLGDLLSGLSVAIMQLPQGLAYALLAGLPPVFGLYSSFYPVFIYFLFGTSRHISVGTFAVMSVMVGSVTESLAPQALNDSMINETARDAARVQVASTLSVLVGLFQVGLGLIHFGFVVTYLSEPLVRGYTTAAAVQVFVSQLKYVFGLHLSSHSGPLSLIYTVLEVCWKLPQSKVGTVVTAAVAGVVLVVVKLLNDKLQQQLPMPIPGELLTLIGATGISYGMGLKHRFEVDVVGNIPAGLVPPVAPNTQLFSKLVGSAFTIAVVGFAIAISLGKIFALRHGYRVDSNQELVALGLSNLIGGIFQCFPVSCSMSRSLVQESTGGNSQVAGAISSLFILLIIVKLGELFHDLPKAVLAAIIIVNLKGMLRQLSDMRSLWKANRADLLIWLVTFTATILLNLDLGLVVAVIFSLLLVVVRTQMPHYSVLGQVPDTDIYRDVAEYSEAKEVRGVKVFRSSATVYFANAEFYSDALKQRCGVDVDFLISQKKKLLKKQEQLKLKQLQKEEKLRKQAGPLLSACLAPQQVSSGDKMEDATANGQEDSKAPDGSTLKALGLPQPDFHSLILDLGALSFVDTVCLKSLKNIFHDFREIEVEVYMAACHSPVVSQLEAGHFFDASITKKHLFASVHDAVTFALQHPRPVPDSPVSVTRL

SEQ ID NO: 7736 - protein, 758 aa, Homo sapiens
MGLADASGPRDTQALLSATQAMDLRRRDYHMERPLLNQEHLEELGRWGSAPRTHQWRTWLQCSRARAYALLLQHLPVLVWLPRYPVRDWLLGDLLSGLSVAIMQLPQGLAYALLAGLPPVFGLYSSFYPVFIYFLFGTSRHISVGTFAVMSVMVGSVTESLAPQALNDSMINETARDAARVQVASTLSVLVGLFQVGLGLIHFGFVVTYLSEPLVRGYTTAAAVQVFVSQLKYVFGLHLSSHSGPLSLIYTVLEVCWKLPQSKVGTVVTAAVAGVVLVVVKLLNDKLQQQLPMPIPGELLTLIGATGISYGMGLKHRFEVDVVGNIPAGLVPPVAPNTQLFSKLVGSAFTIAVVGFAIAISLGKIFALRHGYRVDSNQELVALGLSNLIGGIFQCFPVSCSMSRSLVQESTGGNSQVAGAISSLFILLIIVKLGELFHDLPKAVLAAIIIVNLKGMLRQLSDMRSLWKANRADLLIWLVTFTATILLNLDLGLVVAVIFSLLLVVVRTQMPHYSVLGQVPDTDIYRDVAEYSEAKEVRGVKVFRSSATVYFANAEFYSDALKQRCGVDVDFLISQKKKLLKKQEQLKLKQLQKEEKLRKQAASPKGASVSINVNTSLEDMRSNNVEDCKMMVSSGDKMEDATANGQEDSKAPDGSTLKALGLPQPDFHSLILDLGALSFVDTVCLKSLKNIFHDFREIEVEVYMAACHSPVVSQLEAGHFFDASITKKHLFASVHDAVTFALQHPRPVPDSPVSVTRL

SEQ ID NO: 7737 - protein, 737 aa, Homo sapiens
MDLRRRDYHMERPLLNQEHLEELGRWGSAPRTHQWRTWLQCSRARAYALLLQHLPVLVWLPRYPVRDWLLGDLLSGLSVAIMQLPQGLAYALLAGLPPVFGLYSSFYPVFIYFLFGTSRHISVGTFAVMSVMVGSVTESLAPQALNDSMINETARDAARVQVASTLSVLVGLFQVGLGLIHFGFVVTYLSEPLVRGYTTAAAVQVFVSQLKYVFGLHLSSHSGPLSLIYTVLEVCWKLPQSKVGTVVTAAVAGVVLVVVKLLNDKLQQQLPMPIPGELLTLIGATGISYGMGLKHRFEVDVVGNIPAGLVPPVAPNTQLFSKLVGSAFTIAVVGFAIAISLGKIFALRHGYRVDSNQELVALGLSNLIGGIFQCFPVSCSMSRSLVQESTGGNSQVAGAISSLFILLIIVKLGELFHDLPKAVLAAIIIVNLKGMLRQLSDMRSLWKANRADLLIWLVTFTATILLNLDLGLVVAVIFSLLLVVVRTQMPHYSVLGQVPDTDIYRDVAEYSEAKEVRGVKVFRSSATVYFANAEFYSDALKQRCGVDVDFLISQKKKLLKKQEQLKLKQLQKEEKLRKQAASPKGASVSINVNTSLEDMRSNNVEDCKMMVSSGDKMEDATANGQEDSKAPDGSTLKALGLPQPDFHSLILDLGALSFVDTVCLKSLKNIFHDFREIEVEVYMAACHSPVVSQLEAGHFFDASITKKHLFASVHDAVTFALQHPRPVPDSPVSVTRL

SEQ ID NO: 7738 - protein, 699 aa, Homo sapiens
MDLRRRDYHMERPLLNQEHLEELGRWGSAPRTHQWRTWLQCSRARAYALLLQHLPVLVWLPRYPVRDWLLGDLLSGLSVAIMQLPQGLAYALLAGLPPVFGLYSSFYPVFIYFLFGTSRHISVGTFAVMSVMVGSVTESLAPQALNDSMINETARDAARVQVASTLSVLVGLFQVGLGLIHFGFVVTYLSEPLVRGYTTAAAVQVFVSQLKYVFGLHLSSHSGPLSLIYTVLEVCWKLPQSKLIGATGISYGMGLKHRFEVDVVGNIPAGLVPPVAPNTQLFSKLVGSAFTIAVVGFAIAISLGKIFALRHGYRVDSNQELVALGLSNLIGGIFQCFPVSCSMSRSLVQESTGGNSQVAGAISSLFILLIIVKLGELFHDLPKAVLAAIIIVNLKGMLRQLSDMRSLWKANRADLLIWLVTFTATILLNLDLGLVVAVIFSLLLVVVRTQMPHYSVLGQVPDTDIYRDVAEYSEAKEVRGVKVFRSSATVYFANAEFYSDALKQRCGVDVDFLISQKKKLLKKQEQLKLKQLQKEEKLRKQAASPKGASVSINVNTSLEDMRSNNVEDCKMMVSSGDKMEDATANGQEDSKAPDGSTLKALGLPQPDFHSLILDLGALSFVDTVCLKSLKNIFHDFREIEVEVYMAACHSPVVSQLEAGHFFDASITKKHLFASVHDAVTFALQHPRPVPDSPVSVTRL

SEQ ID NO: 7739 - protein, 671 aa, Homo sapiens
MDLRRRDYHMERPLLNQEHLEELGRWGSAPRTHQWRTWLQCSRARAYALLLQHLPVLVWLPRYPVRDWLLGDLLSGLSVAIMQLPQGLAYALLAGLPPVFGLYSSFYPVFIYFLFGTSRHISVGTFAVMSVMVGSVTESLAPQALNDSMINETARDAARVQVASTLSVLVGLFQVGLGLIHFGFVVTYLSEPLVRGYTTAAAVQVFVSQLKYVFGLHLSSHSGPLSLIYTVLEVCWKLPQSKVGTVVTAAVAGVVLVVVKLLNDKLQQQLPMPIPGELLTLIGATGISYGMGLKHRFEVDVVGNIPAGLVPPVAPNTQLFSKLVGSAFTIAVVGFAIAISLGKIFALRHGYRVDSNQELVALGLSNLIGGIFQCFPVSCSMSRSLVQESTGGNSQVAGAISSLFILLIIVKLGELFHDLPKAVLAAIIIVNLKGMLRQLSDMRSLWKANRADLLIWLVTFTATILLNLDLGLVVAVIFSLLLVVVRTQMPHYSVLGQVPDTDIYRDVAEYSEAKEVRGVKVFRSSATVYFANAEFYSDALKQRCGVDVDFLISQKKKLLKKQEQLKLKQLQKEEKLRKQAASPKGASVSINVNTSLEDMRSNNVEDCKMMVRLEVGKEVTAVSCRDAGSTCLMRNAMDPAAVGSRVLRRWQEEWGGWVRYSSGSVVICHRI

SEQ ID NO: 7740 - protein, 723 aa, Homo sapiens
MGLADASGPRDTQALLSATQAMDLRRRDYHMERPLLNQEHLEELGRWGSAPRTHQWRTWLQCSRARAYALLLQHLPVLVWLPRYPVRDWLLGDLLSGLSVAIMQLPQGLAYALLAGLPPVFGLYSSFYPVFIYFLFGTSRHISVATPGPLPLLTAPGRPTGGAGPDPLRLRGHLPVRTSCPRLYHSCSCAGLRLTAQVCVWPPSEQPLWATVPHLLLEVCWKLPQSKVGTVVTAAVAGVVLVVVKLLNDKLQQQLPMPIPGELLTLIGATGISYGMGLKHRFEVDVVGNIPAGLVPPVAPNTQLFSKLVGSAFTIAVVGFAIAISLGKIFALRHGYRVDSNQELVALGLSNLIGGIFQCFPVSCSMSRSLVQESTGGNSQVAGAISSLFILLIIVKLGELFHDLPKAVLAAIIIVNLKGMLRQLSDMRSLWKANRADLLIWLVTFTATILLNLDLGLVVAVIFSLLLVVVRTQMPHYSVLGQVPDTDIYRDVAEYSEAKEVRGVKVFRSSATVYFANAEFYSDALKQRCGVDVDFLISQKKKLLKKQEQLKLKQLQKEEKLRKQAASPKGASVSINVNTSLEDMRSNNVEDCKMMQVSSGDKMEDATANGQEDSKAPDGSTLKALGLPQPDFHSLILDLGALSFVDTVCLKSLKNIFHDFREIEVEVYMAACHSPVVSQLEAGHFFDASITKKHLFASVHDAVTFALQHPRPVPDSPVSVTRL

SEQ ID NO: 7741 - protein, 233 aa, Homo sapiens [sequence omitted]

SEQ ID NO: 7742 - protein, 178 aa, Homo sapiens
MALPGSSQDQAWSLEPPAATAAASSSSGPQEREGAGSPAAPGTLPLEKVKRPMNAFMVWSSAQRRQMAQQNPKMHNSEISKRLGAQWKLLDEDEKRPFVEEAKRLRARHLRDYPDYKYRPRRKAKSSGAGPSRCGQGRGNLASGGPLWGPGYATTQPSRGFGYRPPSYSTAYLPGSYG

SEQ ID NO: 7743 - protein, 538 aa, Homo sapiens [sequence omitted]

SEQ ID NO: 7744 - protein, 382 aa, Homo sapiens
MAVAAAAAAAGPAGAGGGRAQRSGLLEVLVRDRWHKVLVNLSEDALVLSSEEGAAAYNGIGTATNGSFCRGAGAGHPGAGGAQPPDSPAGVRTAFTDLPEQVPESISNQKRGVKVLKQELGGLGISIKGGKENKMPILISKIFKGLAADQTQALYVGDAILSVNGADLRDATHDEAVQALKRAGKEVLLEVKYMREATPYVKKGSPVSEIGWETPPPESPRLGGSTSDPPSSQSFSFHRDRKSIPLKMCYVTRSMALADPENRQLEIHSPDAKHTVILRSKDSATAQAWFSAIHSNVNDLLTRVIAEVREQLGKTGIAGSREIRHLGWLAEKVPGESKKQWKPALVVLTEKDLLIYDSMPRRKEAWFSPVHTYPLLATSPHP

SEQ ID NO: 7745 - protein, 197 aa, Homo sapiens
MAAFRDIEEVSQGLLSLLGANRAEAQQRRLLGRHEQVVERLLETQDGAEKQLREILTMEKEVAQSLLNAKEQVHQGGVELQQLEAGLQEAGEEDTRLKASLLYLTRELEELKEIEADLERQEKEVDEDTTVTIPSAVYVAQLYHQVSKIEWDYECEPGMVKGIHHGPSVAQPIHLDSTQLSRKFISDYLWSLVDTEW

SEQ ID NO: 7746 - protein, 151 aa, Homo sapiens
MAAFRDIEEVSQGLLSLLGANRAEAQQRRLLGRHEQVVERLLETQDGAEKQLREILTMEKEVAQSLLNAKELERQEKEVDEDTTVTIPSAVYVAQLYHQVSKIEWDYECEPGMVKGIHHGPSVAQPIHLDSTQLSRKFISDYLWSLVDTEW

SEQ ID NO: 7747 - protein, 155 aa, Homo sapiens
MGRSRSRSPRRERRRSRSTSRERERRRRERSRSRERDRRRSRSRSPHRRRSRSPRRHRSTSPSPSRLKERRDEEKKETKETKSKERQITEEDLEGKTEEEIEMMKLMGFASFDSTKGKKVDGSVNAYAINVSQKRKYRQYMNRKGGFNRPLDFIA

SEQ ID NO: 7748 - protein, 310 aa, Homo sapiens
MRPLQIVPSRLISQLYCGLKPPASTRNQICLKMARPSSSMADFRKFFAKAKHIVIISGAGVSAESGVPTFRGAGGYWRKWQAQDLATPLAFAHNPSRVWEFYHYRREVMGSKEPNAGHRAIAECETRLGKQGRRVVVITQNIDELHRKAGTKNLLEIHGSLFKTRCTSCGVVAENYKSPICPALSGKGAPEPGTQDASIPVEKLPRCEEAGCGGLLRPHVVWFGENLDPAILEEVDRELAHCDLCLVVGTSSVVYPAAMFAPQVAARGVPVAEFNTETTPATNRFRFHFQGPCGTTLPEALACHENETVS

SEQ ID NO: 7749 - protein, 299 aa, Homo sapiens
MRPLQIVPSRLISQLYCGLKPPASTRNQICLKMARPSSSMADFRKFFAKAKHIVIISGAGVSAESGVPTFRGAGGYWRKWQAQDLATPLAFAHNPSRVWEFYHYRREVMGSKEPNAGHRAIAECETRLGKQGRRVVVITQNIDELHRKAGTKNLLEIHGSLFKTRCTSCGVVAENYKSPICPALSGKGAPEPGTQDASIPVEKLPRCEEAGCGGLLRPHVVWFGENLDPAILEEVDRELAHCDLCLVVGTSSVVYPAAMFAPQVAARGVPVAEFNTETTPATNRFSHLISISSLIIIKN

SEQ ID NO: 7750 - protein, 292 aa, Homo sapiens
MRPLQIVPSRLISQLYCGLKPPASTRNQICLKMARPSSSMADFRKFFAKAKHIVIISGAGVSAESGVPTFRGAGGYWRKWQAQDLATPLAFAHNPSRVWEFYHYRREVMGSKEPNAGHRAIAECETRLGKQGRRVVVITQNIDELHRKAGTKNLLEIHGSLFKTRCTSCGVVAENYKSPICPALSGKGCEEAGCGGLLRPHVVWFGENLDPAILEEVDRELAHCDLCLVVGTSSVVYPAAMFAPQVAARGVPVAEFNTETTPATNRFRFHFQGPCGTTLPEALACHENETVS

SEQ ID NO: 7751 - protein, 202 aa, Homo sapiens
MGSKEPNAGHRAIAECETRLGKQGRRVVVITQNIDELHRKAGTKNLLEIHGSLFKTRCTSCGVVAENYKSPICPALSGKGAPEPGTQDASIPVEKLPRCEEAGCGGLLRPHVVWFGENLDPAILEEVDRELAHCDLCLVVGTSSVVYPAAMFAPQVAARGVPVAEFNTETTPATNRFRFHFQGPCGTTLPEALACHENETVS

SEQ ID NO: 7752 - protein, 710 aa, Homo sapiens
MQGKKPGGSSGGGRSGELQGDEAQRNKKKKKKVSCFSNIKIFLVSECALMLAQGTVGAYLVSVLTTLERRFNLQSADVGVIASSFEIGNLALILFVSYFGARGHRPRLIGCGGIVMALGALLSALPEFLTHQYKYEAGEIRWGAEGRDVCAANGSGGDEGPDPDLICRNRTATNMMYLLLIGAQVLLGIGATPVQPLGVSYIDDHVRRKDSSLYIGILFTMLVFGPACGFILGSFCTKIYVDAVFIDTSNLDITPDDPRWIGAWWGGFLLCGALLFFSSLLMFGFPQSLPPHSEPAMESEQAMLSEREYERPKPSNGVLRHPLEPDSSASCFQQLRVIPKVTKHLLSNPVFTCIILAACMEIAVVAGFAAFLGKYLEQQFNLTTSSANQLLGMTAIPCACLGIFLGGLLVKKLSLSALGAIRMAMLVNLVSTACYVSFLFLGCDTGPVAGVTVPYGNSTAPGSALDPYSPCNNNCECQTDSFTPVCGADGITYLSACFAGCNSTNLTGCACLTTVPAENATVVPGKCPSPGCQEAFLTFLCVMCICSLIGAMAQTPSVIILIRTVSPELKSYALGVLFLLLRLLGFIPPPLIFGAGIDSTCLFWSTFCGEQGACVLYDNVVYRYLYVSIAIALKSFAFILYTTTWQCLRKNYKRYIKNHEGGLSTSEFFASTLTLDNLGRDPVPANQTHRTKFIYNLEDHEWCENMESVL

SEQ ID NO: 7753 - protein, 692 aa, Homo sapiens
MQGKKPGGSSGGGRSGELQGDEAQRNKKKKKKVSCFSNIKIFLVSECALMLAQGTVGAYLVSVLTTLERRFNLQSADVGVIASSFEIGNLALILFVSYFGARGHRPRLIGCGGIVMALGALLSALPEFLTHQYKYEAGEIRWGAEGRDVCAANGSGGDEGPDPDLICRNRTATNMMYLLLIGAQVLLGIGATPVQPLGVSYIDDHVRRKDSSLYIGILFTMLVFGPACGFILGSFCTKIYVDAVFIDTSNLDITPDDPRWIGAWWGGFLLCGALLFFSSLLMFGFPQSLPPHSEPAMESEQAMLSEREYERPKPSNGVLRHPLEPDSSASCFQQLRVIPKVTKHLLSNPVFTCIILAACMEIAVVAGFAAFLGKYLEQQFNLTTSSANQLLGMTAIPCACLGIFLGGLLVKKLSLSALGAIRMAMLVNLVSTACYVSFLFLGCDTGPVAGVTVPYGNSTAPGSALDPYSPCNNNCECQTDSFTPVCGADGITYLSACFAGCNSTNLTGCACLTTVPAENATVVPGKCPSPGCQEAFLTFLCVMCICSLIGAMAQTPSVIILIRTVSPELKSYALGVLFLLLRLLGFIPPPLIFGAGIDSTCLFWSTFCGEQGACVLYDNVVYRYLYVSIAIALKSFAFILYTTTWQCLRKNYKRYIKNHEGGLSTSTEYQDIETEKTCPESHSPSEDSFVRS

SEQ ID NO: 7754 - protein, 582 aa, Homo sapiens
MNVSVLTTLERRFNLQSADVGVIASSFEIGNLALILFVSYFGARGHRPRLIGCGGIVMALGALLSALPEFLTHQYKYEAGEIRWGAEGRDVCAANGSGGDEGPDPDLICRNRTATNMMYLLLIGAQVLLGIGATPVQPLGVSYIDDHVRRKDSSLYIGILFTMLVFGPACGFILGSFCTKIYVDAVFIDTSNLDITPDDPRWIGAWWGGFLLCGALLFFSSLLMFGFPQSLPPHSEPAMESEQAMLSEREYERPKPSNGVLRHPLEPDSSASCFQQLRVIPKVTKHLLSNPVFTCIILAACMEIAVVAGFAAFLGKYLEQQFNLTTSSANQLLGMTAIPCACLGIFLGGLLVKKLSLSALGAIRMAMLVNLVSTACYVSFLFLGCDTGPVAGVTVPYGNSTAPGSALDPYSPCNNNCECQTDSFTPVCGADGITYLSACFAGCNSTNLTGCACLTTVPAENATVVPGKCPSPGCQEAFLTFLCVMCICSLIGAMAQTPSVIILIRTVSPELKSYALGVLFLLLRLLGFIPPPLIFGAGIDSTCLFWSTFCGEQGACVLYDNVVYRYLYVSIAIALKSFAFIL

SEQ ID NO: 7755 - protein, 429 aa, Homo sapiens
MFGFPQSLPPHSEPAMESEQAMLSEREYERPKPSNGVLRHPLEPDSSASCFQQLRVIPKVTKHLLSNPVFTCIILAACMEIAVVAGFAAFLGKYLEQQFNLTTSSANQLLGMTAIPCACLGIFLGGLLVKKLSLSALGAIRMAMLVNLVSTACYVSFLFLGCDTGPVAGVTVPYGNSTAPGSALDPYSPCNNNCECQTDSFTPVCGADGITYLSACFAGCNSTNLTGCACLTTVPAENATVVPGKCPSPGCQEAFLTFLCVMCICSLIGAMAQTPSVIILIRTVSPELKSYALGVLFLLLRLLGFIPPPLIFGAGIDSTCLFWSTFCGEQGACVLYDNVVYRYLYVSIAIALKSFAFILYTTTWQCLRKNYKRYIKNHEGGLSTSEFFASTLTLDNLGRDPVPANQTHRTKFIYNLEDHEWCENMESVL

SEQ ID NO: 7756 - protein, 765 aa, Homo sapiens
MAGFKRGYDGKIAGLYDLDKTLGRGHFAVVKLARHVFTGEKVAVKVIDKTKLDTLATGHLFQEVRCMKLVQHPNIVRLYEVIDTQTKLYLILELGDGGDMFDYIMKHEEGLNEDLAKKYFAQIVHAISYCHKLHVVHRDLKPENVVFFEKQGLVKLTDFGFSNKFQPGKKLTTSCGSLAYSAPEILLGDEYDAPAVDIWSLGVILFMLVCGQPPFQEANDSETLTMIMDCKYTVPSHVSKECKDLITRMLQRDPKRRASLEEIENHPWLQGVDPSPATKYNIPLVSYKNLSEEEHNSIIQRMVLGDIADRDAIVEALETNRYNHITATYFLLAERILREKQEKEIQTRSASPSNIKAQFRQSWPTKIDVPQDLEDDLTATPLSHATVPQSPARAADSVLNGHRSKGLCDSAKKDDLPELAGPALSTVPPASLKPTASGRKCLFRVEEDEEEDEEDKKPMSLSTQVVLRRKPSVTNRLTSRKSAPVLNQIFEEGESDDEFDMDENLPPKLSRLKMNIASPGTVHKRYHRRKSQGRGSSCSSSETSDDDSESRRRLDKDSGFTYSWHRRDSSEGPPGSEGDGGGQSKPSNASGGVDKASPSENNAGGGSPSSGSGGNPTNTSGTTRRCAGPSNSMQLASRSAGELVESLKLMSLCLGSQLHGSTKYIIDPQNGLSFSSVKVQEKSTWKMCISSTGNAGQVPAVGGIKFFSDHMADTTTELERIKSKNLKNNVLQLPLCEKTISVNIQRNPKEGLLCASSPASCCHVI

SEQ ID NO: 7757 - protein, 244 aa, Homo sapiens
MAGFKRGYDGKIAGLYDLDKTLGRGHFAVVKLARHVFTGEKVAVKVIDKTKLDTLATGHLFQEVRCMKLVQHPNIVRLYEVIDTQTKLYLILELGDGGDMFDYIMKHEEGLNEDLAKKYFAQIVHAISYCHKLHVVHRDLKPENVVFFEKQGLVKLTDFGFSNKFQPGKKLTTSCGSLAYSAPEILLGDEYDAPAVDIWSLGVILFMLVCGQPPFQEANDSETLTMIMDCKYTVPSHVSKECKE

SEQ ID NO: 7758 - protein, 422 aa, Homo sapiens
MGPAWLWLLGTGILASVHCQPLLAHGDKSLQGPQPPRHQLSEPAPAYHRITPTITNFALRLYKELAADAPGNIFFSPVSISTTLALLSLGAQANTSALILEGLGFNLTETPEADIHQGFRSLLHTLALPSPKLELKVGNSLFLDKRLKPRQHYLDSIKELYGAFAFSANFTDSVTTGRQINDYLRRQTYGQVVDCLPEFSQDTFMVLANYIFFKAKWKHPFSRYQTQKQESFFVDERTSLQVPMMHQKEMHRFLYDQDLACTVLQIEYRGNALALLVLPDPGKMKQVEAALQPQTLRKWGQLLLPSLLDLHLPRFSISGTYNLEDILPQIGLTNILNLEADFSGVTGQLNKTISKVSHKAMVDMSEKGTEAGAASGLLSQPPSLNTMSDPHAHFNRPFLLLLWEVTTQSLLFLGKVVNPVAG

SEQ ID NO: 7759 - protein, 262 aa, Homo sapiens
MFLFSRKTRTPISTYSDSYRAPTSIKEVYKDPPLCAWEANKFLTPGLTHTMERHVDPEALQKMAKCAVQDYTYRGSISGHPYLPEKYWLSQEEADKCSPNYLGSDWYNTWRMEPYNSSCCNKYTTYLPRLPKEARMETAVRGMPLECPPRPERLNAYEREVMVNMLNSLSRNQQLPRITPRCGCVDPLPGRLPFHGYESACSGRHYCLRGMDYYASGAPCTDRRLRPWCREQPTMCTSLRAPARNAVCCYNSPAVILPISEP

SEQ ID NO: 7760 - protein, 157 aa, Homo sapiens
METAVRGMPLECPPRPERLNAYEREVMVNMLNSLSRNQQLPRITPRCGCVDPLPGRLPFHGYESACSGRHYCLRGMDYYASGAPCTDRRLRPWCREQPTVRFAGLRPPQPGSTPHKPRPRTPPPSSPASFRAGPQPALAPRCTLSRPCRVPPSGSKA

SEQ ID NO: 7761 - protein, 111 aa, Homo sapiens
METAVRGMPLECPPRPERLNAYEREVMVNMLNSLSRNQQLPRITPRCGCVPPYEHRPGMQCAVTTPPPSYYPYPNLRWDTSHFKKSGGPQRNNYVIHPEFVSETYPDYRCW

SEQ ID NO: 7762 - protein, 164 aa, Homo sapiens
METAVRGMPLECPPRPERLNAYEREVMVNMLNSLSRNQQLPRITPRCGCVDPLPGRLPFHGYESACSGRHYCLRGMDYYASGAPCTDRRLRPWCREQPTVRCVPPYEHRPGMQCAVTTPPPSYYPYPNLRWDTSHFKKSGGPQRNNYVIHPEFVSETYPDYRCW

SEQ ID NO: 7763 - protein, 127 aa, Homo sapiens
METAVRGMPLECPPRPERLNAYEREVMVNMLNSLSRNQQLPRITPRCGCVDPLPGRLPFHGYESACSGRHYCLRGMDYYASGAPCTDRRLRPWCREQPTMCTSLRAPARNAVCCYNSPAVILPISEP

SEQ ID NO: 7764 - protein, 402 aa, Homo sapiens
MESRGPLATSRLLLLLLLLLLRHTRQGWALRPVLPTQSAHDPPAVHLSNGPGQEPIAVMTFDLTKITKTSSSFEVRTWDPEGVIFYGDTNPKDDWFMLGLRDGRPEIQLHNHWAQLTVGAGPRLDDGRWHQVEVKMEGDSVLLEVDGEEVLRLRQVSGPLTSKRHPIMRIALGGLLFPASNLRLPLVPALDGCLRRDSWLDKQAEISASAPTSLRSCDVESNPGIFLPPGTQAEFNLRDIPQPHAEPWAFSLDLGLKQAAGSGHLLALGTPENPSWLSLHLQDQKVVLSSGSGPGLDLPLVLGLPLQLKLSMSRVVLSQGSKMKALALPPLGLAPLLNLWAKPQGRLFLGALPGEDSSTSFCLNGLWAQGQRLDVDQALNRSHEIWTHSCPQSPGNGTDASH

SEQ ID NO: 7765 - protein, 288 aa, Homo sapiens
PRFKGSPAVLFKLTYAVITCFSLRLTHPPRPWSAHDPPAVHLSNGPGQEPIAVMTFDLTKITKTSSSFEVRTWDPEGVIFYGDTNPKDDWFMLGLRDGRPEIQLHNHWAQLTVGAGPRLDDGRWHQVEVKMEGDSVLLEVDGEEVLRLRQVSGPLTSKRHPIMRIALGGLLFPASNLRLPLVPALDGCLRRDSWLDKQAEISASAPTSLRSCDVESNPGIFLPPGTQAEFNLRDIPQPHAEPWAFSLDLGLKQAAGSGHLLALGTPENPSWLSLHLQDQEKTLPPLFA

SEQ ID NO: 7766 - protein, 293 aa, Homo sapiens
MESRGPLATSRLLLLLLLLLLRHTRQGWALRPVLPTQSAHDPPAVHLSNGPGQEPIAVMTFDLTKITKTSSSFEVRTWDPEGVIFYGDTNPKDDWFMLGLRDGRPEIQLHNHWAQLTVGAGPRLDDGRWHQVEVKMEGDSVLLEVDGEEVLRLRQVSGPLTSKRHPIMRIALGGLLFPASNLRLPLVPALDGCLRRDSWLDKQAEISASAPTSLRSCDVESNPGIFLPPGTQAEFNLRDIPQPHAEPWAFSLDLGLKQAAGSGHLLALGTPENPSWLSLHLQDQEKTLPPLFA

SEQ ID NO: 7767 - protein, 287 aa, Homo sapiens
MESRGPLATSRLLLLLLLLLLRHTRQGWALRPVLPTQSAHDPPAVHLSNGPGQEPIAVMTFDLTKITKTSSSFEVRTWDPEGVIFYGDTNPKDDWFMLGLRDGRPEIQLHNHWAQLTVGAGPRLDDGRWHQVEVKMEGDSVLLEVDGEEVLRLRQVSGPLTSKRHPIMRIALGGLLFPASNLRLPLVPALDGCLRRDSWLDKQAEISASAPTSLRSCDVESNPGIFLPPGTQAEFNLRGEDSSTSFCLNGLWAQGQRLDVDQALNRSHEIWTHSCPQSPGNGTDASH

SEQ ID NO: 7768 - protein, 384 aa, Homo sapiens
MESRGPLATSRLLLLLLLLLLRHTRQGWALRPVLPTQSAHDPPAVHLSNGPGQEPIAVMTFDLTKITKTSSSFEVRTWDPEGVIFYGDTNPKDDWFMLGLRDGRPEIQLHNHWAQLTVGAGPRLDDGRWHQVEVKMEGDSVLLEVDGEEVLRLRQVSGPLTSKRHPIMRIALGGLLFPASNLRLPAEISASAPTSLRSCDVESNPGIFLPPGTQAEFNLRDIPQPHAEPWAFSLDLGLKQAAGSGHLLALGTPENPSWLSLHLQDQKVVLSSGSGPGLDLPLVLGLPLQLKLSMSRVVLSQGSKMKALALPPLGLAPLLNLWAKPQGRLFLGALPGEDSSTSFCLNGLWAQGQRLDVDQALNRSHEIWTHSCPQSPGNGTDASH

SEQ ID NO: 7769 - protein, 993 aa, Homo sapiens
MASAAVESFVTKQLDLLELERDAEVEERRSWQENISLKELQSRGVCLLKLQVSSQRTGLYGRLLVTFEPRRYGSAAALPSNSFTSGDIVGLYDAANEGSQLATGILTRVTQKSVTVAFDESHDFQLSLDRENSYRLLKLANDVTYRRLKKALIALKKYHSGPASSLIEVLFGRSAPSPASEIHPLTFFNTCLDTSQKEAVLFALSQKELAIIHGPPGTGKTTTVVEIILQAVKQGLKVLCCAPSNIAVDNLVERLALCKQRILRLGHPARLLESIQQHSLDAVLARSDSAQIVADIRKDIDQVFVKNKKTQDKREKSNFRNEIKLLRKELKEREEAAMLESLTSANVVLATNTGASADGPLKLLPESYFDVVVIDECAQALEASCWIPLLKARKCILAGDHKQLPPTTVSHKAALAGLSLSLMERLAEEYGARVVRTLTVQYRMHQAIMRWASDTMYLGQLTAHSSVARHLLRDLPGVAATEETGVPLLLVDTAGCGLFELEEEDEQSKGNPGEVRLVSLHIQALVDAGVPARDIAVVSPYNLQVDLLRQSLVHRHPELEIKSVDGFQGREKEAVILSFVRSNRKGEVGFLAEDRRINVAVTRARRHVAVICDSRTVNNHAFLKTLVEYFTQHGEVRTAFEYLDDIVPENYSHENSQGSSHAATKPQGPATSTRTGSQRQEGGQEAAAPARQGRKKPAGKSLASEAPSQPSLNGGSPEGVESQDGVDHFRAMIVEFMASKKMQLEFPPSLNSHDRLRVHQIAEEHGLRHDSSGEGKRRFITVSKRAPRPRAALGPPAGTGGPAPLQPVPPTPAQTEQPPREQRGPDQPDLRTLHLERLQRVRSAQGQPASKEQQASGQQKLPEKKKKKAKGHPATDLPTEEDFEALVSAAVKADNTCGFAKCTAGVTTLGQFCQLCSRRYCLSHHLPEIHGCGERARAHARQRISREGVLYAGSGTKNGSLDPAKRAQLQRRLDKKLSELSNQRTSRRKERGT

SEQ ID NO: 7770 - protein, 316 aa, Homo sapiens
MASPEHPGSPGCMGPITQCTARTQQEAPATGPDLPHPGPDGHLDTHSGLSSNSSMTTRELQQYWQNQKCRWKHVKLLFEIASARIEERKVSKFVVYQIIVIQTGSFDNNKAVLERRYSDFAKLQKALLKTFREEIEDVEFPRKHLTGNFAEEMICERRRALQEYLGLLYAIRCVRRSREFLDFLTRPELREAFGCLRAGQYPRALELLLRVLPLQEKLTAHCPAAAVPALCAVLLCHRDLDRPAEAFAAGERALQRLQAREGHRYYAPLLDAMVRLAYALGKDFVTLQERLEESQLRRPTPRGITLKELTVREYLH

SEQ ID NO: 7771 - protein, 152 aa, Homo sapiens
MASPEHPGSPGCMGPITQCTARTQQEAPATGPDLPHPGPDGHLDTHSGLSSNSSMTTRELQQYWQNQKCRWKHVKLLFEIASARIEERKVSKFVVYQIIVIQTGSFDNNKAVLERRYSDFVTLQERLEESQLRRPTPRGITLKELTVREYLH

SEQ ID NO: 7772 - protein, 129 aa, Homo sapiens
MASPEHPGSPGCMGPITQCTARTQQEAPATGPDLPHPGPDGHLDTHSGLSSNSSMTTRELQQYWQNQKCRWKHVKLLFEIASARIEERKVSKFVMGKSRPGEMTYPGSRGETGTAPEPDPRCPRQSDML

SEQ ID NO: 7773 - protein, 102 aa, Homo sapiens
MASPEHPGSPGCMGPITQCTARTQQEAPATGPDLPHPGPDGHLDTHSGLSSNSSMTTRELQQYWQNQKCRWKHVKLLFEIASARIEERKVSKFVAPAPDATP

SEQ ID NO: 7774 - protein, 1026 aa, Homo sapiens
MNLFNLDRFRFEKRNKIEEAPEATPQPSQPGPSSPISLSAEEENAEGEVSRANTPDSDITEKTEDSSVPETPDNERKASISYFKNQRGIQYIDLSSDSEDVVSPNCSNTVQEKTFNKDTVIIVSEPSEDEESQGLPTMARRNDDISELEDLSELEDLKDAKLQTLKELFPQRSDNDLLKLIESTSTMDGAIAAALLMFGDAGGGPRKRKLSSSSEPYEEDEFNDDQSIKKTRLDHGEESNESAESSSNWEKQESIVLKLQKEFPNFDKQELREVLKEHEWMYTEALESLKVFAEDQDMQYVSQSEVPNGKEVSSRSQNYPKNATKTKLKQKFSMKAQNGFNKKRKKNVFNPKRVVEDSEYDSGSDVGSSLDEDYSSGEEVMEDGYKGKILHFLQDASIGELTLIPQCSQKKAQKITELRPFNSWEALFTKMSKTNGLSEDLIWHCKTLIQERDVVIRLMNKCEDISNKLTKQVTMLTGNGGGWNIEQPSILNQSLSLKPYQKVGLNWLALVHKHGLNGILADEMGLGKTIQAIAFLAYLYQEGNNGPHLIVVPASTIDNWLREVNLWCPTLKVLCYYGSQEERKQIRFNIHSRYEDYNVIVTTYNCAISSSDDRSLFRRLKLNYAIFDEGHMLKNMGSIRYQHLMTINANNRLLLTGTPVQNNLLELMSLLNFVMPHMFSSSTSEIRRMFSSKTKSADEQSIYEKERIAHAKQIIKPFILRRVKEEVLKQLPPKKDRIELCAMSEKQEQLYLGLFNRLKKSINNLEKNTEMCNVMMQLRKMANHPLLHRQYYTAEKLKEMSQLMLKEPTHCEANPDLIFEDMEVMTDFELHVLCKQYRHINNFQLDMDLILDSGKFRVLGCILSELKQKGDRVVLFSQFTMMLDILEVLLKHHQHRYLRLDGKTQISERIHLIDEFNTDMDIFVFLLSTKAGGLGINLTSANVVILHDIDCNPYNDKQAEDRCHRVGQTKEVLVIKLISQGTIEESMLKINQQKLKLEQDMTTVDEGDEGSMPADIATLLKTSMGL

SEQ ID NO: 7775 - protein, 1028 aa, Homo sapiens
MNLFNLDRFRFEKRNKIEEAPEATPQPSQPGPSSPISLSAEEENAEGEVSRANTPDSDITEKTEDSSVPETPDNERKASISYFKNQRGIQYIDLSSDSEDVVSPNCSNTVQEKTFNKDTVIIVSEPSEDEESQGLPTMARRNDDISELEDLSELEDLKDAKLQTLKELFPQRSDNDLLKLIESTSTMDGAIAAALLMFGDAGGGPRKRKLSSSSEPYEEDEFNDDQSIKKTRLDHGEESNESAESSSNWEKQESIVLKLQKEFPNFDKQELREVLKEHEWMYTEALESLKVFAEDQDMQYVSQSEVPNGKEVSSRSQNYPKNATKTKLKQKFSMKAQNGFNKKRKKNVFNPKRVVEDSEYDSGSDVGSSLDEDYSSGEEVMEDGYKGKILHFLQDASIGELTLIPQCSQKKAQKITELRPFNSWEALFTKMSKTNGLSEDLIWHCKTLIQERDVVIRLMNKCEDISNKLTKQVTMLTGNGGGWNIEQPSILNQSLSLKPYQKVGLNWLALVHKHGLNGILADEMGLGKTIQAIAFLAYLYQEGNNGPHLIVVPASTIDNWLREVNLWCPTLKVLCYYGSQEERKQIRFNIHSRYEDYNVIVTTYNCAISSSDDRSLFRRLKLNYAIFDEGHMLKNMGSIRYQHLMTINANNRLLLTGTPVQNNLLELMSLLNFVMPHMFSSSTSEIRRMFSSKTKSADEQSIYEKERIAHAKQIIKPFILRRVKEEVLKQLPPKKDRIELCAMSEKQEQLYLGLFNRLKKSINNLVTEKNTEMCNVMMQLRKMANHPLLHRQYYTAEKLKEMSQLMLKEPTHCEANPDLIFEDMEVMTDFELHVLCKQYRHINNFQLDMDLILDSGKFRVLGCILSELKQKGDRVVLFSQFTMMLDILEVLLKHHQHRYLRLDGKTQISERIHLIDEFNTDMDIFVFLLSTKAGGLGINLTSANVVILHDIDCNPYNDKQAEDRCHRVGQTKEVLVIKLISQGTIEESMLKINQQKLKLEQDMTTVDEGDEGSMPADIATLLKTSMGL

SEQ ID NO: 7776 - protein, 596 aa, Homo sapiens
MSKTNGLSEDLIWHCKTLIQERDVVIRLMNKCEDISNKLTKQVTMLTGNGGGWNIEQPSILNQSLSLKPYQKVGLNWLALVHKHGLNGILADEMGLGKTIQAIAFLAYLYQEGNNGPHLIVVPASTIDNWLREVNLWCPTLKVLCYYGSQEERKQIRFNIHSRYEDYNVIVTTYNCAISSSDDRSLFRRLKLNYAIFDEGHMLKNMGSIRYQHLMTINANNRLLLTGTPVQNNLLELMSLLNFVMPHMFSSSTSEIRRMFSSKTKSADEQSIYEKERIAHAKQIIKPFILRRVKEEVLKQLPPKKDRIELCAMSEKQEQLYLGLFNRLKKSINNLEKNTEMCNVMMQLRKMANHPLLHRQYYTAEKLKEMSQLMLKEPTHCEANPDLIFEDMEVMTDFELHVLCKQYRHINNFQLDMDLILDSGKFRVLGCILSELKQKGDRVVLFSQFTMMLDILEVLLKHHQHRYLRLDGKTQISERIHLIDEFNTDMDIFVFLLSTKAGGLGINLTSANVVILHDIDCNPYNDKQAEDRCHRVGQTKEVLVIKLISQGTIEESMLKINQQKLKLEQDMTTVDEGDEGSMPADIATLLKTSMGL

SEQ ID NO: 7777 - protein, 114 aa, Homo sapiens
MVIRVYIASSSGSTAIKKKQQDVLGFLEANKIGFEEKDIAANEENRKWMRENVPENSRPATGYPLPPQIFNESQYRGDYDAFFEARENNAVYAFLGLTAPPGSKEAEVQAKQQA

SEQ ID NO: 7778 - protein, 429 aa, Homo sapiens
MTGKSVKDVDRYQAVLANLLLEEDNKFCADCQSKGPRWASWNIGVFICIRCAGIHRNLGVHISRVKSVNLDQWTQEQIQCMQEMGNGKANRLYEAYLPETFRRPQIDPAVEGFIRDKYEKKKYMDRSLDINAFRKEKDDKWKRGSEPVPEKKLEPVVFEKVKMPQKKEDPQLPRKSSPKSTAPVMDLLGLDAPVACSIANSKTSNTLEKDLDLLASVPSPSSSGSRKVVGSMPTAGSAGSVPENLNLFPEPGSKSEEIGKKQLSKDSILSLYGSQTPQMPTQAMFMAPAQMAYPTAYPSFPGVTPPNSIMGSMMPPPVGMVAQPGASGMVAPMAMPAGYMGGMQASMMGVPNGMMTTQQAGYMAGMAAMPQTVYGVQPAQQLQWNLTQMTQQMAGMNFYGANGMMNYGQSMSGGNGQAANQTLSPQMWK

SEQ ID NO: 7779 - protein, 399 aa, Homo sapiens
MIFKGPRWASWNIGVFICIRCAGIHRNLGVHISRVKSVNLDQWTQEQIQCMQEMGNGKANRLYEAYLPETFRRPQIDPAVEGFIRDKYEKKKYMDRSLDINAFRKEKDDKWKRGSEPVPEKKLEPVVFEKVKMPQKKEDPQLPRKSSPKSTAPVMDLLGLDAPVACSIANSKTSNTLEKDLDLLASVPSPSSSGSRKVVGSMPTAGSAGSVPENLNLFPEPGSKSEEIGKKQLSKDSILSLYGSQTPQMPTQAMFMAPAQMAYPTAYPSFPGVTPPNSIMGSMMPPPVGMVAQPGASGMVAPMAMPAGYMGGMQASMMGVPNGMMTTQQAGYMAGMAAMPQTVYGVQPAQQLQWNLTQMTQQMAGMNFYGANGMMNYGQSMSGGNGQAANQTLSPQMWK

SEQ ID NO: 7780 - protein, 349 aa, Homo sapiens
MQEMGNGKANRLYEAYLPETFRRPQIDPAVEGFIRDKYEKKKYMDRSLDINAFRKEKDDKWKRGSEPVPEKKLEPVVFEKVKMPQKKEDPQLPRKSSPKSTAPVMDLLGLDAPVACSIANSKTSNTLEKDLDLLASVPSPSSSGSRKVVGSMPTAGSAGSVPENLNLFPEPGSKSEEIGKKQLSKDSILSLYGSQTPQMPTQAMFMAPAQMAYPTAYPSFPGVTPPNSIMGSMMPPPVGMVAQPGASGMVAPMAMPAGYMGGMQASMMGVPNGMMTTQQAGYMAGMAAMPQTVYGVQPAQQLQWNLTQMTQQMAGMNFYGANGMMNYGQSMSGGNGQAANQTLSPQMWK

SEQ ID NO: 7781 - protein, 95 aa, Homo sapiens
MKLLMVLMLAALLLHCYADSGCKLLEDMVEKTINSDISIPEYKELLQEFIDSDAAAEAMGKFKQCFLNQSHRTLKNFGLMMHTVYDSIWCNMKSN

SEQ ID NO: 7782 - protein, 501 aa, Homo sapiens
MNRESFAAGERLVSPAYVRQGCEARRSHEHLIRLLLEKGKCPENGWDESTLELFLHELAIMDSNNFLGNCGVGEREGRVASALVARRHYRFIHGIGRSGDISAVQPKAAGSSLLNKITNSLVLDIIKLAGVHTVANCFVVPMATGMSLTLCFLTLRHKRPKAKYIIWPRIDQKSCFKSMITAGFEPVVIENVLEGDELRTDLKAVEAKVQELGPDCILCIHSTTSCFAPRVPDRLEELAVICANYDIPHIVNNAYGVQSSKCMHLIQQGARVGRIDAFVQSLDKNFMVPVGGAIIAGFNDSFIQEISKMYPGRASASPSLDVLITLLSLGSNGYKKLLKERKEMFSYLSNQIKKLSEAYNERLLHTPHNPISLAMTLKTLDEHRDKAVTQLGSMLFTRQVSGARVVPLGSMQTVSGYTFRGFMSHTNNYPCAYLNAASAIGMKMQDVDLFIKRLDRCLKAVRKERSKESDDNYDKTEDVDIEEMALKLDNVLLDTYQDASS

SEQ ID NO: 7783 - protein, 47 aa, Homo sapiens
MNRESFAAGERLVSPAYVRQGCEARRSHEHLIRLLLEKVHSWHWTIR

SEQ ID NO: 7784 - protein, 500 aa, Homo sapiens
MQCDDLGSLQPPPPGFTPFACLSLPSSWDYRRPPPHPGKCPENGWDESTLELFLHELAIMDSNNFLGNCGVGEREGRVASALVARRHYRFIHGIGRSGDISAVQPKAAGSSLLNKITNSLVLDIIKLAGVHTVANCFVVPMATGMSLTLCFLTLRHKRPKAKYIIWPRIDQKSCFKSMITAGFEPVVIENVLEGDELRTDLKAVEAKVQELGPDCILCIHSTTSCFAPRVPDRLEELAVICANYDIPHIVNNAYGVQSSKCMHLIQQGARVGRIDAFVQSLDKNFMVPVGGAIIAGFNDSFIQEISKMYPGRASASPSLDVLITLLSLGSNGYKKLLKERKEMFSYLSNQIKKLSEAYNERLLHTPHNPISLAMTLKTLDEHRDKAVTQLGSMLFTRQVSGARVVPLGSMQTVSGYTFRGFMSHTNNYPCAYLNAASAIGMKMQDVDLFIKRLDRCLKAVRKERSKESDDNYDKTEDVDIEEMALKLDNVLLDTYQDASS

SEQ ID NO: 7785 - protein, 666 aa, Homo sapiens
MEQEPQNGEPAEIKIIREAYKKAFLFVNKGLNTDELGQKEEAKNYYKQGIGHLLRGISISSKESEHTGPGWESARQMQQKMKETLQNVRTRLEILEKGLATSLQNDLQEVPKLYPEFPPKDMCEKLPEPQSFSSAPQHAEVNGNTSTPSAGAVAAPASLSLPSQSCPAEAPPAYTPQAAEGHYTVSYGTDSGEFSSVGEEFYRNHSQPPPLETLGLDADELILIPNGVQIFFVNPAGEVSAPSYPGYLRIVRFLDNSLDTVLNRPPGFLQVCDWLYPLVPDRSPVLKCTAGAYMFPDTMLQAAGCFVGVVLSSELPEDDRELFEDLLRQMSDLRLQANWNRAEEENEFQIPGRTRPSSDQLKEASGTDVKQLDQGNKDVRHKGKRGKRAKDTSSEEVNLSHIVPCEPVPEEKPKELPEWSEKVAHNILSGASWVSWGLVKGAEITGKAIQKGASKLRERIQPEEKPVEVSPAVTKGLYIAKQATGGAAKVSQFLVDGVCTVANCVGKELAPHVKKHGSKLVPESLKKDKDGKSPLDGAMVVAASSVQGFSTVWQGLECAAKCIVNNVSAETVQTVRYKYGYNAGEATHHAVDSAVNVGVTAYNINNIGIKAMVKKTATQTGHTLLEDYQIVDNSQRENQEGAANVNVRGEKDEQTKEVKEAKKKDK

SEQ ID NO: 7786 - protein, 110 aa, Homo sapiens
MSHHPHSLRNSCLIRMDLLYWQFTIYTITFCFSHLSGRLTLSAQHISHRPCLLSYSLLFWKVHHLFLEGFPCSPRLDEMSFHQFPQHPVHVSVVHLPIVYKGSMTQVSPH

SEQ ID NO: 7787 - protein, 937 aa, Homo sapiens
MISAPDVVAFTKEEEYEEEPYNEPALPEEYSVPLFPFASQGANPWSKLSGAKFSRDFILISEFSEQVGPQPLLTIPNDTKVFGTFDLNYFSLRIMSVDYQASFVGHPPGSAYPKLNFVEDSKVVLGDSKEGAFAYVHHLTLYDLEARGFVRPFCMAYISADQHKIMQQFQELSAEFSRASECLKTGNRKAFAGELEKKLKDLDYTRTVLHTETEIQKKANDKGFYSSQAIEKANELASVEKSIIEHQDLLKQIRSYPHRKLKGHDLCPGEMEHIQDQASQASTTSNPDESADTDLYTCRPAYTPKLIKAKSTKCFDKKLKTLEELCDTEYFTQTLAQLSHIEHMFRGDLCYLLTSQIDRALLKQQHITNFLFEDFVEVDDRMVEKQESIPSKPSQDRPPSSSLEECPIPKVLISVGSYKSSVESVLIKMEQELGDEEYKEVEVTELSSFDPQENLDYLDMDMKGSISSGESIEVLGTEKSTSVLSKSDSQASLTVPLSPQVVRSKAVSHRTISEDSIEVLSTCPSEALIPDDFKASYPSAINEEESYPDGNEGAIRFQASISPPELGETEEGSIENTPSQIDSSCCIGKESDGQLVLPSTPAHTHSDEDGVVSSPPQRHRQKDQGFRVDFSVENANPSSRDNSCEGFPAYELDPSHLLASRDISKTSLDNYSDTTSYVSSVASTSSDRIPSAYPAGLSSDRHKKRAGQNALKFIRQYPFAHPAIYSLLSGRTLVVLGEDEAIVRKLVTALAIFVPSYGCYAKPVKHWASSPLHIMDFQKWKLIGLQRVASPAGAGTLHALSRYSRYTSILDLDNKTLRCPLYRGTLVPRLADHRTQIKRGSTYYLHVQSMLTQLCSKAFLYTFCHHLHLPTHDKETEELVASRQMSFLKLTLGLVNEDVRVVQYLAELLKLHYMQESPGTSHPMLRFDYVPSFLYKI

SEQ ID NO: 7788 - protein, 787 aa, Homo sapiens
MISAPDVVAFTKEEEYEEEPYNEPALPEEYSVPLFPFASQGANPWSKLSGAKFSRDFILISEFSEQVGPQPLLTIPNDTKVFGTFDLNYFSLRIMSVDYQASFVGHPPGSAYPKLNFVEDSKVVLGDSKEGAFAYVHHLTLYDLEARGFVRPFCMAYISADQHKIMQQFQELSAEFSRASECLKTGNRKAFAGELEKKLKDLDYTRTVLHTETEIQKKANDKGFYSSQAIEKANELASVEKSIIEHQDLLKQIRSYPHRKLKGHDLCPGEMEHIQDQASQASTTSNPDESADTDLYTCRPAYTPKLIKAKSTKCFDKKLKTLEELCDTEYFTQTLAQLSHIEHMFRGDLCYLLTSQIDRALLKQQHITNFLFEDFVEVDDRMVEKQESIPSKPSQDRPPSSSLEECPIPKVLISVGSYKSSVESVLIKMEQELGDEEYKEVEVTELSSFDPQENLDYLDMDMKGSISSGESIEVLGTEKSTSVLSKSDSQASLTVPLSPQVVRSKAVSHRTISEDSIEVLSTCPSEALIPDDFKASYPSAINEEESYPDGNEGAIRFQASISPPELGETEEGSIENTPSQIDSSCCIGKESDGQLVLPSTPAHTHSDEDGVVSSPPQRHRQKDQGFRVDFSVENANPSSRDNSCEGFPAYELDPSHLLASRDISKTSLDNYSDTTSYVSSVASTSSDRIPSAYPAGLSSDRHKKRAGQNALKFIRQYPFAHPAIYSLLSGRTLVVLGEDEAIVRKLVTALAIFVPSYGCYAKPVKHWASSPLHIMDFQKWKLIGLQR

SEQ ID NO: 7789 - protein, 1052 aa, Homo sapiens
MSSAAEPPPPPPPESAPSKPAASIASGGSNSSNKGGPEGVAAQAVASAASAGPADAEMEEIFDDASPGKQKEIQEPDPTYEEKMQTDRANRFEYLLKQTELFAHFIQPAAQKTPTSPLKMKPGRPRIKKDEKQNLLSVGDYRHRRTEQEEDEELLTESSKATNVCTRFEDSPSYVKWGKLRDYQVRGLNWLISLYENGINGILADEMGLGKTLQTISLLGYMKHYRNIPGPHMVLVPKSTLHNWMSEFKRWVPTLRSVCLIGDKEQRAAFVRDVLLPGEWDVCVTSYEMLIKEKSVFKKFNWRYLVIDEAHRIKNEKSKLSEIVREFKTTNRLLLTGTPLQNNLHELWSLLNFLLPDVFNSADDFDSWFDTNNCLGDQKLVERLHMVLRPFLLRRIKADVEKSLPPKKEVKIYVGLSKMQREWYTRILMKDIDILNSAGKMDKMRLLNILMQLRKCCNHPYLFDGAEPGPPYTTDMHLVTNSGKMVVLDKLLPKLKEQGSRVLIFSQMTRVLDILEDYCMWRNYEYCRLDGQTPHDERQDSINAYNEPNSTKFVFMLSTRAGGLGINLATADVVILYDSDWNPQVDLQAMDRAHRIGQTKTVRVFRFITDNTVEERIVERAEMKLRLDSIVIQQGRLVDQNLNKIGKDEMLQMIRHGATHVFASKESEITDEDIDGILERGAKKTAEMNEKLSKMGESSLRNFTMDTESSVYNFEGEDYREKQKIAFTEWIEPPKRERKANYAVDAYFREALRVSEPKAPKAPRPPKQPNVQDFQFFPPRLFELLEKEILFYRKTIGYKVPRNPELPNAAQAQKEEQLKIDEAESLNDEELEEKEKLLTQGFTNWNKRDFNQFIKANEKWGRDDIENIAREVEGKTPEEVIEYSAVFWERCNELQDIEKIMAQIERGEARIQRRISIKKALDTKIGRYKAPFHQLRISYGTNKGKNYTEEEDRFLICMLHKLGFDKENVYDELRQCIRNSPQFRFDWFLKSRTAMELQRRCNTLITLIERENMELEEKEKAEKKKRGPKPSTQKRKMDGAPDGRGRKKKLKL

SEQ ID NO: 7790 - protein, 1133 aa, Homo sapiens
MLAYCVQDATVVDVEKRRNPSKHYVYIINVTWSDSTSQTIYRRYSKFFDLQMQLLDKFPIEGGQKDPKQRIIPFLPGKILFRRSHIRDVAVKRLKPIDEYCRALVRLPPHISQCDEVFRFFEARPEDVNPPKEDYGSSKRKSVWLSSWAESPKKDVTGADATAEPMILEQYVVVSNYKKQENSELSLQAGEVVDVIEKNESGWWFVSTSEEQGWVPATYLEAQNGTRDDSDINTSKTGEVSKRRKAHLRRLDRRWTLGGMVNRQHSREEKYVTVQPYTSQSKDEIGFEKGVTVEVIRKNLEGWWYIRYLGKEGWAPASYLKKAKDDLPTRKKNLAGPVEIIGNIMEISNLLNKKASGDKETPPAEGEGHEAPIAKKEISLPILCNASNGSAVGVPDRTVSRLAQGSPAVARIAPQRAQISSPNLRTRPPPRRESSLGFQLPKPPEPPSVEVEYYTIAEFQSCISDGISFRGGQKAEVIDKNSGGWWYVQIGEKEGWAPASYIDKRKKPNLSRRTSTLTRPKVPPPAPPSKPKEAEEGPTGASESQDSPRKLKYEEPEYDIPAFGFDSEPELSEEPVEDRASGERRPAQPHRPSPASSLQRARFKVGESSEDVALEEETIYENEGFRPYAEDTLSARGSSGDSDSPGSSSLSLTRKNSPKSGSPKSSSLLKLKAEKNAQAEMGKNHSSASFSSSITINTTCCSSSSSSSSSLSKTSGDLKPRSASDAGIRGTPKVRAKKDADANAGLTSCPRAKPSVRPKPFLNRAESQSQEKMDISTLRRQLRPTGQLRGGLKGSKSEDSELPPQTASEAPSEGSRRSSSDLITLPATTPPCPTKKEWEGPATSYMTCSAYQKVQDSEISFPAGVEVQVLEKQESGWWYVRFGELEGWAPSHYLVLDENEQPDPSGKELDTVPAKGRQNEGKSDSLEKIERRVQALNTVNQSKKATPPIPSKPPGGFGKTSGTPAVKMRNGVRQVAVRPQSVFVSPPPKDNNLSCALRRNESLTATDGLRGVRRNSSFSTARSAAAEAKGRLAERAASQGSDSPLLPAQRNSIPVSPVRPKPIEKSQFIHNNLKDVYVSIADYEGDEETAGFQEGVSMEVLERNPNGWWYCQILDGVKPFKGWVPSNYLEKKN

SEQ ID NO: 7791 - protein, 940 aa, Homo sapiens
MILEQYVVVSNYKKQENSELSLQAGEVVDVIEKNESGWWFVSTSEEQGWVPATYLEAQNGTRDDSDINTSKTGEEEKYVTVQPYTSQSKDEIGFEKGVTVEVIRKNLEGWWYIRYLGKEGWAPASYLKKAKDDLPTRKKNLAGPVEIIGNIMEISNLLNKKASGDKETPPAEGEGHEAPIAKKEISLPILCNASNGSAVGVPDRTVSRLAQGSPAVARIAPQRAQISSPNLRTRPPPRRESSLGFQLPKPPEPPSVEVEYYTIAEFQSCISDGISFRGGQKAEVIDKNSGGWWYVQIGEKEGWAPASYIDKRKKPNLSRRTSTLTRPKVPPPAPPSKPKEAEEGPTGASESQDSPRKLKYEEPEYDIPAFGFDSEPELSEEPVEDRASGERRPAQPHRPSPASSLQRARFKVGESSEDVALEEETIYENEGFRPYAEDTLSARGSSGDSDSPGSSSLSLTRKNSPKSGSPKSSSLLKLKAEKNAQAEMGKNHSSASFSSSITINTTCCSSSSSSSSSLSKTSGDLKPRSASDAGIRGTPKVRAKKDADANAGLTSCPRAKPSVRPKPFLNRAESQSQEKMDISTLRRQLRPTGQLRGGLKGSKSEDSELPPQTASEAPSEGSRRSSSDLITLPATTPPCPTKKEWEGPATSYMTCSAYQKVQDSEISFPAGVEVQVLEKQESGWWYVRFGELEGWAPSHYLVLDENEQPDPSGKELDTVPAKGRQNEGKSDSLEKIERRVQALNTVNQSKKATPPIPSKPPGGFGKTSGTPAVKMRNGVRQVAVRPQSVFVSPPPKDNNLSCALRRNESLTATDGLRGVRRNSSFSTARSAAAEAKGRLAERAASQGSDSPLLPAQRNSIPVSPVRPKPIEKSQFIHNNLKDVYVSIADYEGDEETAGFQEGVSMEVLERNPNGWWYCQILDGVKPFKGWVPSNYLEKKN

SEQ ID NO: 7792 - protein, 1105 aa, Homo sapiens
MLAYCVQDATVVDVEKRRNPSKHYVYIINVTWSDSTSQTIYRRYSKFFDLQMQLLDKFPIEGGQKDPKQRIIPFLPGKILFRRSHIRDVAVKRLKPIDEYCRALVRLPPHISQCDEVFRFFEARPEDVNPPKEDYGSSKRKSVWLSSWAESPKKDVTGADATAEPMILEQYVVVSNYKKQENSELSLQAGEVVDVIEKNESGWWFVSTSEEQGWVPATYLEAQNGTRDDSDINTSKTGEEEKYVTVQPYTSQSKDEIGFEKGVTVEVIRKNLEGWWYIRYLGKEGWAPASYLKKAKDDLPTRKKNLAGPVEIIGNIMEISNLLNKKASGDKETPPAEGEGHEAPIAKKEISLPILCNASNGSAVGVPDRTVSRLAQGSPAVARIAPQRAQISSPNLRTRPPPRRESSLGFQLPKPPEPPSVEVEYYTIAEFQSCISDGISFRGGQKAEVIDKNSGGWWYVQIGEKEGWAPASYIDKRKKPNLSRRTSTLTRPKVPPPAPPSKPKEAEEGPTGASESQDSPRKLKYEEPEYDIPAFGFDSEPELSEEPVEDRASGERRPAQPHRPSPASSLQRARFKVGESSEDVALEEETIYENEGFRPYAEDTLSARGSSGDSDSPGSSSLSLTRKNSPKSGSPKSSSLLKLKAEKNAQAEMGKNHSSASFSSSITINTTCCSSSSSSSSSLSKTSGDLKPRSASDAGIRGTPKVRAKKDADANAGLTSCPRAKPSVRPKPFLNRAESQSQEKMDISTLRRQLRPTGQLRGGLKGSKSEDSELPPQTASEAPSEGSRRSSSDLITLPATTPPCPTKKEWEGPATSYMTCSAYQKVQDSEISFPAGVEVQVLEKQESGWWYVRFGELEGWAPSHYLVLDENEQPDPSGKELDTVPAKGRQNEGKSDSLEKIERRVQALNTVNQSKKATPPIPSKPPGGFGKTSGTPAVKMRNGVRQVAVRPQSVFVSPPPKDNNLSCALRRNESLTATDGLRGVRRNSSFSTARSAAAEAKGRLAERAASQGSDSPLLPAQRNSIPVSPVRPKPIEKSQFIHNNLKDVYVSIADYEGDEETAGFQEGVSMEVLERNPNGWWYCQILDGVKPFKGWVPSNYLEKKN

SEQ ID NO: 7793 - protein, 293 aa, Homo sapiens
MALVSADSRIAELLTELHQLIKQTQEERSRSEHNLVNIQKTHERMQTENKISPYYRTKLRGLYTTAKADAEAECNILRKALDKIAEIKSLLEERRIAAKIAGLYNDSEPPRKTMRRGVLMTLLQQSAMTLPLWIGKPGDKPPPLCGAIPASGDYVARPGDKVAARVKAVDGDEQWILAEVVSYSHATNKYEVDDIDEEGKERHTLSRRRVIPLPQWKANPETDPEALFQKEQLVLALYPQTTCFYRALIHAPPQRPQDDYSVLFEDTSYADGYSPPLNVAQRYVVACKEPKKK

SEQ ID NO: 7794 - protein, 1197 aa, Homo sapiens
MHIKSIILEGFKSYAQRTEVNGFDPLFNAITGLNGSGKSNILDSICFLLGISNLSQVRASNLQDLVYKNGQAGITKASVSITFDNSDKKQSPLGFEVHDEITVTRQVVIGGRNKYLINGVNANNTRVQDLFCSVGLNVNNPHFLIMQGRITKVLNMKPPEILSMIEEAAGTRMYEYKKIAAQKTIEKKEAKLKEIKTILEEEITPTIQKLKEERSSYLEYQKVMREIEHLSRLYIAYQFLLAEDTKVRSAEELKEMQDKVIKLQEELSENDKKIKALNHEIEELEKRKDKETGGILRSLEDALAEAQRVNTKSQSAFDLKKKNLACEESKRKELEKNMVEDSKTLAAKEKEVKKITDGLHALQEASNKDAEALAAAQQHFNAVSAGLSSNEDGAEATLAGQMMACKNDISKAQTEAKQAQMKLKHAQQELKNKQAEVKKMDSGYRKDQEALEAVKRLKEKLEAEMKKLNYEENKEESLLEKRRQLSRDIGRLKETYEALLARFPNLRFAYKDPEKNWNRNCVKGLVASLISVKDTSATTALELVAGERLYNVVVDTEVTGKKLLERGELKRRYTIIPLNKISARCIAPETLRVAQNLVGPDNVHVALSLVEYKPELQKAMEFVFGTTFVCDNMDNAKKVAFDKRIMTRTVTLGGDVFDPHGTLSGGARSQAASILTKFQELKDVQDELRIKENELRALEEELAGLKNTAEKYRQLKQQWEMKTEEADLLQTKLQQSSYHKQQEELDALKKTIEESEETLKNTKEIQRKAEEKYEVLENKMKNAEAERERELKDAQKKLDCAKTKADASSKKMKEKQQEVEAITLELEELKREHTSYKQQLEAVNEAIKSYESQIEVMAAEVAKNKESVNKAQEEVTKQKEVITAQDTVIKAKYAEVAKHKEQNNDSQLKIKELDHNISKHKREAEDGAAKVSKMLKDYDWINAERHLFGQPNSAYDFKTNNPKEAGQRLQKLQEMKEKLGRNVNMRAMNVLTEAEERYNDLMKKKRIVENDKSKILTTIEDLDQKKNQALNIAWQKVNKDFGSIFSTLLPGANAMLAPPEGQTVLDGLEFKVALGNTWKENLTELSGGQRSLVALSLILSMLLFKPAPIYILDEVDAALDLSHTQNIGQMLRTHFTHSQFIVVSLKEGMFNNANVLFKTKFVDGVSTVARFTQCQNGKISKEAKSKAKPPKGAHVEV

SEQ ID NO: 7795 - protein, 1099 aa, Homo sapiens
MHIKSIILEGFKSYAQRTEVNGFDPLFNAITGLNGSGKSNILDSICFLLGISNLSQVRASNLQDLVYKNGQAGITKASVSITFDNSDKKQSPLGFEVHDEITVTRQVVIGGRNKYLINGVNANNTRVQDLFCSVGLNVNNPHFLIMQGRITKVLNMKPPEILSMIEEAAGTRMYEYKKIAAQKTIEKKEAKLKEIKTILEEEITPTIQKLKEERSSYLEYQKVMREIEHLSRLYIAYQFLLAEDTKVRSAEELKEMQDKVIKLQEELSENDKKIKALNHEIEELEKRKDKETGGILRSLEDALAEAQRVNTKSQSAFDLKKKNLACEESKRKELEKNMVEDSKTLAAKEKEVKKITDGLHALQEASNKDAEALAAAQQHFNAVSAGLSSNEDGAEATLAGQMMACKNDISKAQTEAKQAQMKLKHAQQELKNKQAEVKKMDSGYRKDQEALEAVKRLKEKLEAEMKKLNYEENKEESLLEKRRQLSRDIGRLKETYEALLARFPNLRFAYKDPEKNWNRNCVKGLVASLISVKDTSATTALELVAGERLYNVVVDTEVTGKKLLERGELKRRYTIIPLNKISARCIAPETLRVAQNLVGPDNVHVALSLVEYKPELQKAMEFVFGTTFVCDNMDNAKKVAFDKRIMTRTVTLGGDVFDPHGTLSGGARSQAASILTKFQELKDVQDELRIKENELRALEEELAGLKNTAEKYRQLKQQWEMKTEEADLLQTKLQQSSYHKQQEELDALKKTIEESEETLKNTKEIQRKAEEKYEVLENKMKNAEAERERELKDAQKKLDCAKTKADASSKKMKEKQQEVEAITLELEELKREHTSYKQQLEAVNEAIKSYESQIEVMAAEVAKNKESVNKAQEEVTKQKEVITAQDTVIKAKYAEVAKHKEQNNDSQLKIKELDHNISKHKREAEDGAAKVSKMLKDYDWINAERHLFGQPNSAYDFKTNNPKEAGQRLQKLQEMKEKLGRNVNMRAMNVLTEAEERYNDLMKKKRIVENDKSKILTTIEDLDQKKNQALNIAWQKVNKDFGSIFSTLLPGANAMLAPPEGQTVLDGLEFKVALGNTWKENLTELSGGQRQKQQNHTTG

SEQ ID NO: 7796 - protein, 1534 aa, Homo sapiens
MALTPGWGSSAGPVRPELWLLLWAAAWRLGASACPALCTCTGTTVDCHGTGLQAIPKNIPRNTERLELNGNNITRIHKNDFAGLKQLRVLQLMENQIGAVERGAFDDMKELERLRLNRNQLHMLPELLFQNNQALSRLDLSENAIQAIPRKAFRGATDLKNLQLDKNQISCIEEGAFRALRGLEVLTLNNNNITTIPVSSFNHMPKLRTFRLHSNHLFCDCHLAWLSQWLRQRPTIGLFTQCSGPASLRGLNVAEVQKSEFSCSGQGEAGRVPTCTLSSGSCPAMCTCSNGIVDCRGKGLTAIPANLPETMTEIRLELNGIKSIPPGAFSPYRKLRRIDLSNNQIAEIAPDAFQGLRSLNSLVLYGNKITDLPRGVFGGLYTLQLLLLNANKINCIRPDAFQDLQNLSLLSLYDNKIQSLAKGTFTSLRAIQTLHLAQNPFICDCNLKWLADFLRTNPIETSGARCASPRRLANKRIGQIKSKKFRCSAKEQYFIPGTEDYQLNSECNSDVVCPHKCRCEANVVECSSLKLTKIPERIPQSTAELRLNNNEISILEATGMFKKLTHLKKINLSNNKVSEIEDGAFEGAASVSELHLTANQLESIRSGMFRGLDGLRTLMLRNNRISCIHNDSFTGLRNVRLLSLYDNQITTVSPGAFDTLQSLSTLNLLANPFNCNCQLAWLGGWLRKRKIVTGNPRCQNPDFLRQIPLQDVAFPDFRCEEGQEEGGCLPRPQCPQECACLDTVVRCSNKHLRALPKGIPKNVTELYLDGNQFTLVPGQLSTFKYLQLVDLSNNKISSLSNSSFTNMSQLTTLILSYNALQCIPPLAFQGLRSLRLLSLHGNDISTLQEGIFADVTSLSHLAIGANPLYCDCHLRWLSSWVKTGYKEPGIARCAGPQDMEGKLLLTTPAKKFECQGPPTLAVQAKCDLCLSSPCQNQGTCHNDPLEVYRCACPSGYKGRDCEVSLDSCSSGPCENGGTCHAQEGEDAPFTCSCPTGFEGPTCGVNTDDCVDHACANGGVCVDGVGNYTCQCPLQYEGKACEQLVDLCSPDLNPCQHEAQCVGTPDGPRCECMPGYAGDNCSENQDDCRDHRCQNGAQCMDEVNSYSCLCAEGYSGQLCEIPPHLPAPKSPCEGTECQNGANCVDQGNRPVCQCLPGFGGPECEKLLSVNFVDRDTYLQFTDLQNWPRANITLQVSTAEDNGILLYNGDNDHIAVELYQGHVRVSYDPGSYPSSAIYSAETINDGQFHTVELVAFDQMVNLSIDGGSPMTMDNFGKHYTLNSEAPLYVGGMPVDVNSAAFRLWQILNGTGFHGCIRNLYINNELQDFTKTQMKPGVVPGCEPCRKLYCLHGICQPNATPGPMCHCEAGWVGLHCDQPADGPCHGHKCVHGQCVPLDALSYSCQCQDGYSGALCNQAGALAEPCRGLQCLHGHCQASGTKGAHCVCDPGFSGELCEQESECRGDPVRDFHQVQRGYAICQTTRPLSWVECRGSCPGQGCCQGLRLKRRKFTFECSDGTSFAEEVEKPTKCGCALCA

SEQ ID NO: 7797 - protein, 815 aa, Homo sapiens
MALTPGWGSSAGPVRPELWLLLWAAAWRLGASACPALCTCTGTTVDCHGTGLQAIPKNIPRNTERLELNGNNITRIHKNDFAGLKQLRVLQLMENQIGAVERGAFDDMKELERLRLNRNQLHMLPELLFQNNQALSRLDLSENAIQAIPRKAFRGATDLKNLQLDKNQISCIEEGAFRALRGLEVLTLNNNNITTIPVSSFNHMPKLRTFRLHSNHLFCDCHLAWLSQWLRQRPTIGLFTQCSGPASLRGLNVAEVQKSEFSCSGQGEAGRVPTCTLSSGSCPAMCTCSNGIVDCRGKGLTAIPANLPETMTEIRLELNGIKSIPPGAFSPYRKLRRIRPLSFCSPCRDLSNNQIAEIAPDAFQGLRSLNSLVLYGNKITDLPRGVFGGLYTLQLLLLNANKINCIRPDAFQDLQNLSLLSLYDNKIQSLAKGTFTSLRAIQTLHLAQNPFICDCNLKWLADFLRTNPIETSGARCASPRRLANKRIGQIKSKKFRCSAKEQYFIPGTEDYQLNSECNSDVVCPHKCRCEANVVECSSLKLTKIPERIPQSTAELRLNNNEISILEATGMFKKLTHLKKINLSNNKVSEIEDGAFEGAASVSELHLTANQLESIRSGMFRGLDGLRTLMLRNNRISCIHNDSFTGLRNVRLLSLYDNQITTVSPGAFDTLQSLSTLNLLANPFNCNCQLAWLGGWLRKRKIVTGNPRCQNPDFLRQIPLQDVAFPDFRCEEGQEEGGCLPRPQCPQECACLDTVVRCSNKHLRALPKGIPKNVTELYLDGNQFTLVPGQLSTFKYLQLVILSYNALQCIPPLAFQ

SEQ ID NO: 7798 - protein, 305 aa, Homo sapiens
MAAAGQEKGYLTQTAAALDKSPSLSPQLAAPIRGRPKKCLVYPHAPKSSRLSRSVLRWLQGLDLSFFPRNINRDFSNGFLIAEIFCIYYPWELELSSFENGTSLKVKLDNWAQLEKFLARKKFKLPKELIHGTIHCKAGVPEILIEEVYTLLTHREIKSIQDDFVNFTDYSYQMRLPLVSRSTVSKSIKDNIRLSELLSNPNMLTNELKAEFLILLHMLQRKLGRKLNPEWFDVKPTVGEVTLNHLPAQASGRRYNLKVKRGRVVPVLPNIGSGGSSHREIHVKQAGQHSYYSAMKPIRNMDKKP

SEQ ID NO: 7799 - protein, 119 aa, Homo sapiens
MKLVRFLMKLSHETVTIELKNGTQVHGTITGVDVSMNTHLKAVKMTLKNREPVQLETLSIRGNNIRYFILPDSLPLDTLLVDVEPKVKSKKREAVAGRGRGRGRGRGRGRGRGRGGPRR

SEQ ID NO: 7800 - protein, 605 aa, Homo sapiens
MEADIITNLRCRLKEAEEERLKAAQYGLQLVESQNELQNQLDKCRNEMMTMTESYEQEKYTLQREVELKSRMLESLSCECEAIKQQQKMHLEKLEEQLSRSHGQEVNELKTKIEKLKVELDEARLSEKQLKHQVDHQKELLSCKSEELRVMSERVQESMSSEMLALQIELTEMESMKTTLKEEVNELQYRQEQLELLITNLMRQVDRLKEEKEEREKEAVSYYNALEKARVANQDLQVQLDQALQQALDPNSKGNSLFAEVEDRRAAMERQLISMKVKYQSLKKQNVFNREQMQRMKLQIATLLQMKGSQTEFEQQERLLAMLEQKNGEIKHLLGEIRNLEKFKNLYDSMESKPSVDSGTLEDNTYYTDLLQMKLDNLNKEIESTKGELSIQRMKALFESQRALDIERKLFANERCLQLSESENMKLRAKLDELKLKYEPEETVEVPVLKKRREVLPVDITTAKDACVNNSALGGEVYRLPPQKEETQSCPNSLEDNNLQLEKSVSIYTPVVSLSPHKNLPVDMQLKKEKKCVKLIGVPADAEALSERSGNTPNSPRLAAESKLQTEVKEGKETSSKLEKETCKKLHPILYVSSKSTPETQCPQQ

SEQ ID NO: 7801 - protein, 506 aa, Homo sapiens
MEADIITNLRCRLKEAEEERLKAAQYGLQLVESQNELQNQLDKCRNEMMTMTESYEQEKYTLQREVELKSRMLESLSCECEAIKQQQKMHLEKLEEQLSRSHGQEVNELKTKIEKLKVELDEARLSEKQLKHQVDHQKELLSCKSEELRVMSERVQESMSSEMLALQIELTEMESMKVKYQSLKKQNVFNREQMQRMKLQIATLLQMKGSQTEFEQQERLLAMLEQKNGEIKHLLGEIRNLEKFKNLYDSMESKPSVDSGTLEDNTYYTDLLQMKLDNLNKEIESTKGELSIQRMKALFESQRALDIERKLFANERCLQLSESENMKLRAKLDELKLKYEPEETVEVPVLKKRREVLPVDITTAKDACVNNSALGGEVYRLPPQKEETQSCPNSLEDNNLQLEKSVSIYTPVVSLSPHKNLPVDMQLKKEKKCVKLIGVPADAEALSERSGNTPNSPRLAAESKLQTEVKEGKETSSKLEKETCKKLHPILYVSSKSTPETQCPQQ

SEQ ID NO: 7802 - protein, 527 aa, Homo sapiens
MEADIITNLRCRLKEAEEERLKAAQYGLQLVESQNELQNQLDKCRNEMMTMTESYEQEKYTLQREVELKSRMLESLSCECEAIKQQQKMHLEKLEEQLSRSHGQEVNELQYRQEQLELLITNLMRQVDRLKEEKEEREKEAVSYYNALEKARVANQDLQVQLDQALQQALDPNSKGNSLFAEVEDRRAAMERQLISMKVKYQSLKKQNVFNREQMQRMKLQIATLLQMKGSQTEFEQQERLLAMLEQKNGEIKHLLGEIRNLEKFKNLYDSMESKPSVDSGTLEDNTYYTDLLQMKLDNLNKEIESTKGELSIQRMKALFESQRALDIERKLFANERCLQLSESENMKLRAKLDELKLKYEPEETVEVPVLKKRREVLPVDITTAKDACVNNSALGGEVYRLPPQKEETQSCPNSLEDNNLQLEKSVSIYTPVVSLSPHKNLPVDMQLKKEKKCVKLIGVPADAEALSERSGNTPNSPRLAAESKLQTEVKEGKETSSKLEKETCKKLHPILYVSSKSTPETQCPQQ

SEQ ID NO: 7803 - protein, 239 aa, Homo sapiens
MPRKRKCDLRAVRVGLLLGGGGVYGSRFRFTFPGCRALSPWRVRVQRRRCEMSTMFADTLLIVFISVCTALLAEGITWVLVYRTDKYKRLKAEVEKQSKKLEKKKETITESAGRQQKKKIERQEEKLKNNNRDLSMVRMKSMFAIGFCFTALMGMFNSIFDGRVVAKLPFTPLSYIQGLSHRNLLGDDTTDCSFIFLYILCTMSIRQNIQKILGLAPSRAATKQAGGFLGPPPPSGKFS

SEQ ID NO: 7804 - protein, 220 aa, Homo sapiens
MPRKRKCDLRAVRVGLLLGGGGVYGSRFRFTFPGCRALSPWRVRVQRRRCEMSTMFADTLLIVFISVCTALLAEGITWVLVYRTDKYKRLKAEVEKQSKKLEKKKETITESAGRLSMVRMKSMFAIGFCFTALMGMFNSIFDGRVVAKLPFTPLSYIQGLSHRNLLGDDTTDCSFIFLYILCTMSIRQNIQKILGLAPSRAATKQAGGFLGPPPPSGKFS

SEQ ID NO: 7805 - protein, 188 aa, Homo sapiens
MSTMFADTLLIVFISVCTALLAEGITWVLVYRTDKYKRLKAEVEKQSKKLEKKKETITESAGRQQKKKIERQEEKLKNNNRDLSMVRMKSMFAIGFCFTALMGMFNSIFDGRVVAKLPFTPLSYIQGLSHRNLLGDDTTDCSFIFLYILCTMSIRQNIQKILGLAPSRAATKQAGGFLGPPPPSGKFS

SEQ ID NO: 7806 - protein, 262 aa, Homo sapiens
MSRYLRPPNTSLFVRNVADDTRSEDLRREFGRYGPIVDVYVPLDFYTRRPRGFAYVQFEDVRDAEDALHNLDRKWICGRQIEIQFAQGDRKTPNQMKAKEGRNVYSSSRYDDYDRYRRSRSRSYERRRSRSRSFDYNYRRSYSPRNSRPTGRPRRSRSHSDNDRFKHRNRSFSRSKSNSRSRSKSQPKKEMKAKSRSRSASHTKTRGTSKTDSKTHYKSGSRYEKESRKKEPPRSKSQSRSQSRSRSKSRSRSWTSPKSSGH

SEQ ID NO: 7807 - protein, 261 aa, Homo sapiens
MSRYLRPPNTSLFVRNVADDTRSEDLRREFGRYGPIVDVYVPLDFYTRRPRGFAYVQFEDVRDAEDALHNLDRKWICGRQIEIQFAQGDRKTPNQMKAKEGRNVYSSSRYDDYDRYRRSRSRSYERRRSRSRSFDYNYRRSYSPRNRPTGRPRRSRSHSDNDRFKHRNRSFSRSKSNSRSRSKSQPKKEMKAKSRSRSASHTKTRGTSKTDSKTHYKSGSRYEKESRKKEPPRSKSQSRSQSRSRSKSRSRSWTSPKSSGH

SEQ ID NO: 7808 - protein, 183 aa, Homo sapiens
MSRYLRPPNTSLFVRNVADDTRSEDLRREFGRYGPIVDVYVPLDFYTRRPRGFAYVQFEDVRDAEDALHNLDRKWICGRQIEIQFAQGDRKTPNQMKAKEGRNVYSSSRYDDYDRYRRSRSRSYERRRSRSRSFDYNYRRSYSPRNSRPTGRPRRSRSHSDNDRPNCSWNTQYSSAYYTSRKI

SEQ ID NO: 7809 - protein, 173 aa, Homo sapiens
MSRYLRPPNTSLFVRNVADDTRSEDLRREFGRYGPIVDVYVPLDFYTRRPRGFAYVQFEDVRDAEDALHNLDRKWICGRQIEIQFAQGDRKTPNQMKAKEGRNVYSSSRYDDYDRYRRSRSRSYERRRSRSRSFDYNYRRSYSPRNSRPTGRPRRSRSHSDNDSQVSKKKNER

SEQ ID NO: 7810 - protein, 165 aa, Homo sapiens
MSRYLRPPNTSLFVRNVADDTRSEDLRREFGRYGPIVDVYVPLDFYTRRPRGFAYVQFEDVRDAEDALHNLDRKWICGRQIEIQFAQGDRKTPNQMKAKEGRNVYSSSRYDDYDRYRRSRSRSYERRRSRSRSFDYNYRRSYSPRKPNCSWNTQYSSAYYTSRKI

SEQ ID NO: 7811 - protein, 182 aa, Homo sapiens
MSRYLRPPNTSLFVRNVADDTRSEDLRREFGRYGPIVDVYVPLDFYTRRPRGFAYVQFEDVRDAEDALHNLDRKWICGRQIEIQFAQGDRKTPNQMKAKEGRNVYSSSRYDDYDRYRRSRSRSYERRRSRSRSFDYNYRRSYSPRNRPTGRPRRSRSHSDNDRPNCSWNTQYSSAYYTSRKI

SEQ ID NO: 7812 - protein, 540 aa, Homo sapiens
MPLFATNPFDQDVEKATSEMNTAEDWGLILDICDKVGQSRTGPKDCLRSIMRRVNHKDPHVAMQALTLLGACVSNCGKIFHLEVCSRDFASEVSNVLNKGHPKVCEKLKALMVEWTDEFKNDPQLSLISAMIKNLKEQGVTFPAIGSQAAEQAKASPALVAKDPGTVANKKEEEDLAKAIELSLKEQRQQSTTLSTLYPSTSSLLTNHQHEGRKVRAIYDFEAAEDNELTFKAGEIITVLDDSDPNWWKGETHQGIGLFPSNFVTADLTAEPEMIKTEKKTVQFSDDVQVETIEPEPEPAFIDEDKMDQLLQMLQSTDPSDDQPDLPELLHLEAMCHQMGPLIDEKLEDIDRKHSELSELNVKVMEALSLYTKLMNEDPMYSMYAKLQNQPYYMQSSGVSGSQVYAGPPPSGAYLVAGNAQMSHLQSYSLPPEQLSSLSQAVVPPSANPALPSQQTQAAYPNTMVSSVQGNTYPSQAPVYSPPPAATAAAATADVTLYQNAGPNMPQVPNYNLTSSTLPQPGGSQQPPQPQQPYSQKALL

SEQ ID NO: 7813 - protein, 403 aa, Homo sapiens
MPLFATNPFDQDVEKATSEMNTAEDWGLILDICDKVGQSRTGPKDCLRSIMRRVNHKDPHVAMQALTLLGACVSNCGKIFHLEVCSRDFASEVSNVLNKGHPKVCEKLKALMVEWTDEFKNDPQLSLISAMIKNLKEQGVTFPAIGSQAAEQAKASPALVAKDPGTVANKKEEEDLAKAIELSLKEQRQQSTTLSTLYPSTSSLLTNHQHEGRKVRAIYDFEAAEDNELTFKAGEIITVLDDSDPNWWKGETHQGIGLFPSNFVTADLTAEPEMIKTEKKTVQFSDDVQVETIEPEPEPAFIDEDKMDQLLQMLQSTDPSDDQPDLPELLHLEAMCHQMGPLIDEKLEDIDRKHSELSELNVKVMEALSLYTKLMNEDPMYSMYAKLQNQPGSGPTIRKPSPS

SEQ ID NO: 7814 - protein, 188 aa, Homo sapiens
MNGDDTFAKRPRDDAKASEKRSKAFDDIATYFSKKEWKKMKYSEKISYVYMKRNYKAMTKLGFKVTLPPFMCNKQATDFQGNDFDNDHNRRIQVEHPQMTFGRLHRIIPKIMPKKPAEDENDSKGVSEASGPQNDGKQLHPPGKANISEKINKRSGPKRGKHAWTHRLRERKQLVIYEEISDPEEDDE

SEQ ID NO: 7815 - protein, 325 aa, Homo sapiens
MATRRLTDAFLLLRNNSIQNRQLLAEQVSSHITSSPLHSRSIAAELDELADDRMALVSGISLDPEAAIGVTKRPPPKWVDGVDEIQYDVGRIKQKMKELASLHDKHLNRPTLDDSSEEEHAIEITTQEITQLFHRCQRAVQALPSRARACSEQEGRLLGNVVASLAQALQELSTSFRHAQSGYLKRMKNREERSQHFFDTSVPLMDDGDDNTLYHRGFTEDQLVLVEQNTLMVEEREREIRQIVQSISDLNEIFRDLGAMIVEQGTVLDRIDYNVEQSCIKTEDGLKQLHKAEQYQKKNRKMLVILILFVIIIVLIVVLVGVKSR

SEQ ID NO: 7816 - protein, 304 aa, Homo sapiens
MATRRLTDAFLLLRNNSIQNRQLLAEQLADDRMALVSGISLDPEAAIGVTKRPPPKWVDGVDEIQYDVGRIKQKMKELASLHDKHLNRPTLDDSSEEEHAIEITTQEITQLFHRCQRAVQALPSRARACSEQEGRLLGNVVASLAQALQELSTSFRHAQSGYLKRMKNREERSQHFFDTSVPLMDDGDDNTLYHRGFTEDQLVLVEQNTLMVEEREREIRQIVQSISDLNEIFRDLGAMIVEQGTVLDRIDYNVEQSCIKTEDGLKQLHKAEQYQKKNRKMLVILILFVIIIVLIVVLVGVKSR

SEQ ID NO: 7817 - protein, 115 aa, Homo sapiens
MATRRLTDAFLLLRNNSIQNRQLLAEQELDELADDRMALVSGISLDPEAAIGVTKRPPPKWVDGVDEIQYDVGRIKQKMKELASLHDKHLNRPTLDDSSEEEHAIEITTQEITQA

SEQ ID NO: 7818 - protein, 308 aa, Homo sapiens
MATRRLTDAFLLLRNNSIQNRQLLAEQELDELADDRMALVSGISLDPEAAIGVTKRPPPKWVDGVDEIQYDVGRIKQKMKELASLHDKHLNRPTLDDSSEEEHAIEITTQEITQLFHRCQRAVQALPSRARACSEQEGRLLGNVVASLAQALQELSTSFRHAQSGYLKRMKNREERSQHFFDTSVPLMDDGDDNTLYHRGFTEDQLVLVEQNTLMVEEREREIRQIVQSISDLNEIFRDLGAMIVEQGTVLDRIDYNVEQSCIKTEDGLKQLHKAEQYQKKNRKMLVILILFVIIIVLIVVLVGVKSR

SEQ ID NO: 7819 - protein, 321 aa, Homo sapiens
MATRRLTDAFLLLRNNSIQNRQLLAEQVSSHITSSPLHSRSIAALADDRMALVSGISLDPEAAIGVTKRPPPKWVDGVDEIQYDVGRIKQKMKELASLHDKHLNRPTLDDSSEEEHAIEITTQEITQLFHRCQRAVQALPSRARACSEQEGRLLGNVVASLAQALQELSTSFRHAQSGYLKRMKNREERSQHFFDTSVPLMDDGDDNTLYHRGFTEDQLVLVEQNTLMVEEREREIRQIVQSISDLNEIFRDLGAMIVEQGTVLDRIDYNVEQSCIKTEDGLKQLHKAEQYQKKNRKMLVILILFVIIIVLIVVLVGVKSR

SEQ ID NO: 7820 - protein, 272 aa, Homo sapiens
MALVSGISLDPEAAIGVTKRPPPKWVDGVDEIQYDVGRIKQKMKELASLHDKHLNRPTLDDSSEEEHAIEITTQEITQLFHRCQRAVQALPSRARACSEQEGRLLGNVVASLAQALQELSTSFRHAQSGYLKRMKNREERSQHFFDTSVPLMDDGDDNTLYHRGFTEDQLVLVEQNTLMVEEREREIRQIVQSISDLNEIFRDLGAMIVEQGTVLDRIDYNVEQSCIKTEDGLKQLHKAEQYQKKNRKMLVILILFVIIIVLIVVLVGVKSR

SEQ ID NO: 7821 - protein, 187 aa, Homo sapiens
MNGDDAFAKRPRDDDKASEKRSKAFNDIATYFSKKEWEKMKYSEKISYVYMKRNYEAMTKLGFNVTLPPFMCNKQATDFQGNYFDNDRNRRIQVERPQMTFGRLQRIIPKIMPKKPAEEGNDSKGVSEASGPQNDGKQLAPGKANTSEKINKRSGPKRGRHAWTHRLRERNQLVIYEEIRDPEEDDE

SEQ ID NO: 7822 - protein, 188 aa, Homo sapiens
MNGDDTFARRPTVGAQIPEKIQKAFDDIAKYFSKEEWEKMKVSEKIVYVYMKRKYEAMTKLGFKAILPSFMRNKRVTDFQGNDFDNDPNRGNQVQRPQMTFGRLQGIFPKIMPKKPAEEGNVSKEVPEASGPQNDGKQLCPPGKPTTSEKINMISGPKRGEHAWTHRLRERKQLVIYEEISDPEEDDE

SEQ ID NO: 7823 - protein, 170 aa, Homo sapiens
MNGDDTFARRPTVGAQIPEKIQKAFDDIAKYFSKEEWEKMKVSEKIVYVYMKRKYEAMTKLGFKAILPSFMRNKRVTDFQGNDFDNDPNRGNQVQRPQMTFGRLQGIFPKIMPKKPAEEGNVSKEVPEASGPQNDGKQLCPPGKPTTSEKINMISGVLQRYCRFGSRPLQ

SEQ ID NO: 7824 - protein, 372 aa, Homo sapiens
MSRRRFDCRSISGLLTTTPQIPIKMENFNNFYILTSKELGRGKFAVVRQCISKSTGQEYAAKFLKKRRRGQDCRAEILHEIAVLELAKSCPRVINLHEVYENTSEIILILEYAAGGEIFSLCLPELAEMVSENDVIRLIKQILEGVYYLHQNNIVHLDLKPQNILLSSIYPLGDIKIVDFGMSRKIGHACELREIMGTPEYLAPEILNYDPITTATDMWNIGIIAYMLLTHTSPFVGEDNQETYLNISQVNVDYSEETFSSVSQLATDFIQSLLVKNPEKRPTAEICLSHSWLQQWDFENLFHPEETSSSSQTQDHSVRSSEDKTSKSSCNGTCGDREDKENIPEDSSMVSKRFRFDDSLPNPHELVSDLLC

SEQ ID NO: 7825 - protein, 295 aa, Homo sapiens
MELIQDISRPPLEYVKGVPLIKYFAEALGPLQSFQARPDDLLISTYPKSGTTWVSQILDMIYQGGDLEKCHRAPIFMRVPFLEFKVPGIPSGMETLKNTPAPRLLKTHLPLALLPQTLLDQKVKVVYVARNAKDVAVSYYHFYHMAKVYPHPGTWESFLEKFMAGEVSYGSWYQHVQEWWELSRTHPVLYLFYEDMKENPKREIQKILEFVGRSLPEETVDLMVEHTSFKEMKKNPMTNYTTVRREFMDHSISPFMRKGMAGDWKTTFTVAQNERFDADYAKKMAGCSLSFRSEL

SEQ ID NO: 7826 - protein, 314 aa, Homo sapiens
MLGKGGKRKFDEHEDGLEGKIVSPCDGPSKVSYTLQRQTIFNISLMKLYNHRPLTEPSLQKTVLINNMLRRIQEELKQEGSLRPMFTPSSQPTTEPSDSYREAPPAFSHLASPSSHPCDLGSTTPLEACLTPASLLEDDDDTFCTSQAMQPTAPTKLSPPALLPEKDSFSSALDEIEELCPTSTSTEAATAATDSVKGTSSEAGTQKLDGPQESRADDSKLMDSLPGNFEITTSTGFLTDLTLDDILFADIDTSMYDFDPCTSSSGTASKMAPVSADDLLKTLAPYSSQPVTPSQPFKMDLTELDHIMEVLVGS

SEQ ID NO: 7827 - protein, 304 aa, Homo sapiens
MAKIEKNAPTMEKKPELFNIMEVDGVPTLILSKEWWEKVCNFQAKPDDLILATYPKSGTTWMHEILDMILNDGDVEKCKRAQTLDRHAFLELKFPHKEKPDLEFVLEMSSPQLIKTHLPSHLIPPSIWKENCKIVYVARNPKDCLVSYYHFHRMASFMPDPQNLEEFYEKFMSGKVVGGSWFDHVKGWWAAKDMHRILYLFYEDIKKDPKREIEKILKFLEKDISEEILNKIIYHTSFDVMKQNPMTNYTTLPTSIMDHSISPFMRKGMPGDWKNYFTVAQNEEFDKDYQKKMAGSTLTFRTEI

SEQ ID NO: 7828 - protein, 304 aa, Homo sapiens
MAKIEKNAPTMEKKPELFNIMEVDGVPTLILSKEWWEKVCNFQAKPDDLILATYPKSGTTWMHEILDMILNDGDVEKCKRAQTLDRHAFLELKFPHKEKPDLEFVLEMSSPQLIKTHLPSHLIPPSIWKENCKIVYVARNPKDCLVSYYHFHRMASFMPDPQNLEEFYEKFMSGKVVGGSWFDHVKGWWAAKDMHRILYLFYEDIKKNPKHEIHKVLEFLEKTWSGDVINKIVHHTSFDVMKDNPMANHTAVPAHIFNHSISKFMRKGMPGDWKNHFTVALNENFDKHYEKKMAGSTLNFCLEI

SEQ ID NO: 7829 - protein, 296 aa, Homo sapiens
MALTSDLGKQIKLKEVEGTLLQPATVDNWSQIQSFEAKPDDLLICTYPKAGTTWIQEIVDMIEQNGDVEKCQRAIIQHRHPFIEWARPPQPSGVEKAKAMPSPRILKTHLSTQLLPPSFWENNCKFLYVARNAKDCMVSYYHFQRMNHMLPDPGTWEEYFETFINGKVVWGSWFDHVKGWWEMKDRHQILFLFYEDIKRDPKHEIRKVMQFMGKKVDETVLDKIVQETSFEKMKENPMTNRSTVSKSILDQSISSFMRKGTVGDWKNHFTVAQNERFDEIYRRKMEGTSINFCMEL

SEQ ID NO: 7830 - protein, 307 aa, Homo sapiens
MALTSDLGKQIKLKEVEGTLLQPATVDNWSQIQSFEAKPDDLLICTYPKAGTTWIQEIVDMIEQNGDVEKCQRAIIQHRHPFIEWARPPQPSETGFHHVAQAGLKLLSSSNPPASTSQSAKITDLLPPSFWENNCKFLYVARNAKDCMVSYYHFQRMNHMLPDPGTWEEYFETFINGKVVWGSWFDHVKGWWEMKDRHQILFLFYEDIKRDPKHEIRKVMQFMGKKVDETVLDKIVQETSFEKMKENPMTNRSTVSKSILDQSISSFMRKGTVGDWKNHFTVAQNERFDEIYRRKMEGTSINFCMEL

SEQ ID NO: 7831 - protein, 261 aa, Homo sapiens
MSYTPGVGGDPAQLAQRISSNIQKITQCSVEIQRTLNQLGTPQDSPELRQQLQQKQQYTNQLAKETDKYIKEFGSLPTTPSEQRQRKIQKDRLVAEFTTSLTNFQKVQRQAAEREKEFVARVRASSRVSGSFPEDSSKERNLVSWESQTQPQVQVQDEEITEDDLRLIHERESSIRQLEADIMDINEIFKDLGMMIHEQGDVIDSIEANVENAEVHVQQANQQLSRAADYQRKSRKTLCIIILILVIGVAIISLIIWGLNH

SEQ ID NO: 7832 - protein, 239 aa, Homo sapiens
MSYTPGVGGDPAQLAQRISSNIQKITQCSVEIQRTLNQLGTPQDSPELRQQLQQKQQYTNQLAKETDKYIKEFGSLPTTPSEQRQRKIQKDRLVAEFTTSLTNFQKVQRQAAEREKEFVARVRASSRVSGSFPEDSSKERNLVSWESQTQPQVQVQDEEITEDDLRLIHERESSIRQLEADIMDINEIFKDLGMMIHEQGDVIDSIEANVENAEVHVQQANQQLSRAADYQKKDSCMLM

SEQ ID NO: 7833 - protein, 264 aa, Homo sapiens
MAPTGLLVAGASFLAFRGLHWGLRRLPTPESAARDRWQWWNLCVSLAHSLLSGTGALLGLSLYPQMAADPIHGHPRWALVLVAVSVGYFLADGADLLWNQTLGKTWDLLCHHLVVVSCLSTAVLSGHYVGFSMVSLLLELNSACLHLRKLLLLSRQAPSLAFSVTSWASLATLALFRLVPLGWMSLWLFRQHHQVPLALVTLGGIGLVTVGIMSIILGIRILVNDVLQSRPHPPSPGHEKTRGTRTRRDNGPVTSNSSTLSLKD

SEQ ID NO: 7834 - protein, 492 aa, Homo sapiens
MGGRRGPNRTSYCRNPLCEPGSSGGSSGSHTSSASVTSVRSRTRSSSGTGLSSPPLATQTVVPLQHCKIPELPVQASILFELQLFFCQLIALFVHYINIYKTVWWYPPSHPPSHTSLNFHLIDFNLLMVTTIVLGRRFIGSIVKEASQRGKVSLFRSILLFLTRFTVLTATGWSLCRSLIHLFRTYSFLNLLFLCYPFGMYIPFLQLNCDLRKTSLFNHMASMGPREAVSGLAKSRDYLLTLRETWKQHTRQLYGPDAMPTHACCLSPSLIRSEVEFLKMDFNWRMKEVLVSSMLSAYYVAFVPVWFVKNTHYYDKRWSCELFLLVSISTSVILMQHLLPASYCDLLHKAAAHLGCWQKVDPALCSNVLQHPWTEECMWPQGVLVKHSKNVYKAVGHYNVAIPSDVSHFRFHFFFSKPLRILNILLLLEGAVIVYQLYSLMSSEKWHQTISLALILFSNYYAFFKLLRDRLVLGKAYSYSASPQRDLDHRFS

SEQ ID NO: 7835 - protein, 221 aa, Homo sapiens
MGGRRGPNRTSYCRNPLCEPGSSGGSSGSHTSSASVTSVRSRTRSSSGTGLSSPPLATQTVVPLQHCKIPELPVQASILFELQLFFCQLIALFVHYINIYKTVWWYPPSHPPSHTSLNFHLIDFNLLMVTTIVLGRRFIGSIVKEVWDVHSVPAAELRPPQDKPLQPHGLHGAPGGGQWPGKEPGLPPDTAGDVEAAHKTAVWPGRHAHPCLLPVTQPHPQ

SEQ ID NO: 7836 - protein, 342 aa, Homo sapiens
MKNFHLIDFNLLMVTTIVLGRRFIGSIVKEASQRGKVSLFRSILLFLTRFTVLTATGWSLCRSLIHLFRTYSFLNLLFLCYPFGMYIPFLQLNCDLRKTSLFNHMASMGPREAVSGLAKSRDYLLTLRETWKQHTRQLYGPDAMPTHACCLSPSLIRSEVEFLKMDFNWRMKEVLVSSMLSAYYVAFVPVWFVKNTHYYDKRWSCELFLLVSISTSVILMQHLLPASYCDLLHKAAAHLGCWQKVDPALCSNVLQHPWTEECMWPQGVLVKHSKNVYKAVGHYNVAIPSDVSHFRFHVSLLPGEGGLGPERVGGSAGQECDVIARESYFQYFPNPKEDSAHM

SEQ ID NO: 7837 - protein, 293 aa, Homo sapiens
MYIPFLQLNCDLRKTSLFNHMASMGPREAVSGLAKSRDYLLTLRETWKQHTRQLYGPDAMPTHACCLSPSLIRSEVEFLKMDFNWRMKEVLVSSMLSAYYVAFVPVWFVKNTHYYDKRWSCELFLLVSISTSVILMQHLLPASYCDLLHKAAAHLGCWQKVDPALCSNVLQHPWTEECMWPQGVLVKHSKNVYKAVGHYNVAIPSDVSHFRFHFFFSKPLRILNILLLLEGAVIVYQLYSLMSSEKWHQTISLALILFSNYYAFFKLLRDRLVLGKAYSYSASPQRDLDHRFS

SEQ ID NO: 7838 - protein, 297 aa, Homo sapiens
MRDRTHELRQGDDSSDEEDKERVALVVHPGTARLGSPDEEFFHKVRTIRQTIVKLGNKVQELEKQQVTILATPLPEESMKQELQNLRDEIKQLGREIRLQLKAIEPQKEEADENYNSVNTRMRKTQHGVLSQQFVELINKCNSMQSEYREKNVERIRRQLKITNAGMVSDEELEQMLDSGQSEVFVSNILKDTQVTRQALNEISARHSEIQQLERSIRELHDIFTFLATEVEMQGEMINRIEKNILSSADYVERGQEHVKTALENQKKARKKKVLIAICVSITVVLLAVIIGVTVVG

SEQ ID NO: 7839 - protein, 295 aa, Homo sapiens
MGMTARTKRTRSGSRWWCTRARHGWGARTRSSSTSPLGHPPQVRTIRQTIVKLGNKVQELEKQQVTILATPLPEESMKQELQNLRDEIKQLGREIRLQLKAIEPQKEEADENYNSVNTRMRKTQHGVLSQQFVELINKCNSMQSEYREKNVERIRRQLKITNAGMVSDEELEQMLDSGQSEVFVSNILKDTQVTRQALNEISARHSEIQQLERSIRELHDIFTFLATEVEMQGEMINRIEKNILSSADYVERGQEHVKTALENQKKARKKKVLIAICVSITVVLLAVIIGVTVVG

SEQ ID NO: 7840 - protein, 238 aa, Homo sapiens
MSRYGRYGGETKVYVGNLGTGAGKGELERAFSYYGPLRTVWIARNPPGFAFVEFEDPRDAEDAVRGLDGKVICGSRVRVELSTGMPRRSRFDRPPARRPFDPNDRCYECGEKGHYAYDCHRYSRRRRSRSRSRSHSRSRGRRYSRSRSRSRGRRSRSASPRRSRSISLRRSRSASLRRSRSGSIKGSRYFQSPSRSRSRSRSISRPRSSRSKSRSPSPKRSRSPSGSPRRSASPERMD

SEQ ID NO: 7841 - protein, 135 aa, Homo sapiens
MSRYGRYGGETKVYVGNLGTGAGKGELERAFSYYGPLRTVWIARNPPGFAFVEFEDPRDAEDAVRGLDGKVICGSRVRVELSTGMPRRSRFDRPPARRPFDPNDRCYECGEKGHYAYDCHRYSRRRRSRAENLRR

SEQ ID NO: 7842 - protein, 132 aa, Homo sapiens
MSRYGRYGGETKVYVGNLGTGAGKGELERAFSYYGPLRTVWIARNPPGFAFVEFEDPRDAEDAVRGLDGKVICGSRVRVELSTGMPRRSRFDRPPARRPFDPNDRCYECGEKGHYAYDCHRYSRRRRSRYLF

SEQ ID NO: 7843 - protein, 226 aa, Homo sapiens
MSRYGRYGGETKVYVGNLGTGAGKGELERAFSYYGPLRTVWIARNPPGFAFVEFEDPRDAEDAVRGLDGKVICGSRVRVELSTGMPRRSRFDRPPARRPFDPNDRCYECGEKGHYAYDCHRYSRRRRSRSRSRSHSRSRGRRYSRSRSRSRGRRSRSASPRRSRSISLRRSRSASLRRSRSGSIKGSRYFQSPSRSRSRSRSISRPRSSRSPSGSPRRSASPERMD

SEQ ID NO: 7844 - protein, 263 aa, Homo sapiens
MEINTKLLISVTCISFFTFQLLFYFVSYWFSAKVSPGFNSLSFKKKIEWNSRVVSTCHSLVVGIFGLYIFLFDEATKADPLWGGPSLANVNIAIASGYLISDLSIIILYWKVIGDKFFIMHHCASLYAYYLVLKNGVLAYIGNFRLLAELSSPFVNQRWFFEALKYPKFSKAIVINGILMTVVFFIVRIASMLPHYGFMYSVYGTEPYIRLGVLIQLSWVISCVVLDVMNVMWMIKISKGCIKVISHIRQEKAKNSLQNGKLD

SEQ ID NO: 7845 - protein, 303 aa, Homo sapiens
MADKSKFIEYIDEALEKSKETALSHLFFTYQGIPYPITMCTSETFQALDTFEARHDDIVLASYPKCGSNWILHIVSELIYAVSKKKYKYPEFPVLECGDSEKYQRMKGFPSPRILATHLHYDKLPGSIFENKAKILVIFRNPKDTAVSFLHFHNDVPDIPSYGSWDEFFRQFMKGQVSWGRYFDFAINWNKHLDGDNVKFILYEDLKENLAAGIKQIAEFLGFFLTGEQIQTISVQSTFQAMRAKSQDTHGAVGPFLFRKGEVGDWKNLFSEIQNQEMDEKFKECLAGTSLGAKLKYESYCQG

SEQ ID NO: 7846 - protein, 199 aa, Homo sapiens
MADKSKFIEYIDEALEKSKETALSHLFFTYQGIPYPITMCTSETFQALDTFEARHDDIVLASYPKCGSNWILHIVSELIYAVSKKKYKYPEFPVLECGDSEKYQNLAAGIKQIAEFLGFFLTGEQIQTISVQSTFQAMRAKSQDTHGAVGPFLFRKGEVGDWKNLFSEIQNQEMDEKFKECLAGTSLGAKLKYESYCQG

SEQ ID NO: 7847 - protein, 365 aa, Homo sapiens
MDGPAEPQIPGLWDTYEDDISEISQKLPGEYFRYKGVPFPVGLYSLESISLAENTQDVRDDDIFIITYPKSGTTWMIEIICLILKEGDPSWIRSVPIWERAPWCETIVGAFSLPDQYSPRLMSSHLPIQIFTKAFFSSKAKVIYMGRNPRDVVVSLYHYSKIAGQLKDPGTPDQFLRDFLKGEVQFGSWFDHIKGWLRMKGKDNFLFITYEELQQDLQGSVERICGFLGRPLGKEALGSVVAHSTFSAMKANTMSNYTLLPPSLLDHRRGAFLRKGVCGDWKNHFTVAQSEAFDRAYRKQMRGMPTFPWDEDPEEDGSPDPEPSPEPEPKPSLEPNTSLEREPRPNSSPSPSPGQASETPHPRPS

SEQ ID NO: 7848 - protein, 350 aa, Homo sapiens
MASPPPFHSQKLPGEYFRYKGVPFPVGLYSLESISLAENTQDVRDDDIFIITYPKSGTTWMIEIICLILKEGDPSWIRSVPIWERAPWCETIVGAFSLPDQYSPRLMSSHLPIQIFTKAFFSSKAKVIYMGRNPRDVVVSLYHYSKIAGQLKDPGTPDQFLRDFLKGEVQFGSWFDHIKGWLRMKGKDNFLFITYEELQQDLQGSVERICGFLGRPLGKEALGSVVAHSTFSAMKANTMSNYTLLPPSLLDHRRGAFLRKGVCGDWKNHFTVAQSEAFDRAYRKQMRGMPTFPWDEDPEEDGSPDPEPSPEPEPKPSLEPNTSLEREPRPNSSPSPSPGQASETPHPRPS

SEQ ID NO: 7849 - protein, 205 aa, Homo sapiens
MIFSMLRKLPKVTCRDVLPEIRAICIEEIGCWMQSYSTSFLTDSYLKYIGWTLHDKHREVRVKCVKALKGLYGNRDLTARLELFTGRFKDWMVSMIVDREYSVAVEAVRLLILILKLFYPECEIRTMGGREQRQSPGAQRTFFQLLLSFFVESKLHDHAAYLVDNLWDCAGTQLKDWEGLTSLLLEKDQSTCHMEPGPGTFHLLG

SEQ ID NO: 7850 - protein, 55 aa, Homo sapiens
MSTSRKLKSHGMRRSKSRSPHKGVKRGGSKRKYRKGNLKSRKRGDDANRNYRSHL

SEQ ID NO: 7851 - protein, 95 aa, Homo sapiens
MADEKPKEGVKTENNDHINLKVAGQDGSVVQFKIKRHTPLSKLMKAYCERQGLSMRQIRFRFDGQPINETDTPAQLEMEDEDTIDVFQQQTGGVY

SEQ ID NO: 7852 - protein, 71 aa, Homo sapiens
MADEKPKEGVKTENNDHINLKVAGQDGSVVQFKIKRHTPLSKLMKAYCERQLEMEDEDTIDVFQQQTGGVY

SEQ ID NO: 7853 - protein, 305 aa, Homo sapiens
MGHALCVCSRGTVIIDNKRYLFIQKLGEGGFSYVDLVEGLHDGHFYALKRILCHEQQDREEAQREADMHRLFNHPNILRLVAYCLRERGAKHEAWLLLPFFKRGTLWNEIERLKDKGNFLTEDQILWLLLGICRGLEAIHAKGYAHRDLKPTNILLGDEGQPVLMDLGSMNQACIHVEGSRQALTLQDWAAQRCTISYRAPELFSVQSHCVIDERTDVWSLGCVLYAMMFGEGPYDMVFQKGDSVALAVQNQLSIPQSPRHSSALRQLLNSMMTVDPHQRPHIPLLLSQLEALQPPAPGQHTTQI

SEQ ID NO: 7854 - protein, 433 aa, Homo sapiens
MEVVDPQQLGMFTEGELMSVGMDTFIHRIDSTEVIYQPRRKRAKLIGKYLMGDLLGEGSYGKVKEVLDSETLCRRAVKILKKKKLRRIPNGEANVKKEIQLLRRLRHKNVIQLVDVLYNEEKQKMYMVMEYCVCGMQEMLDSVPEKRFPVCQAHGYFCQLIDGLEYLHSQGIVHKDIKPGNLLLTTGGTLKISDLGVAEALHPFAADDTCRTSQGSPAFQPPEIANGLDTFSGFKVDIWSAGVTLYNITTGLYPFEGDNIYKLFENIGKGSYAIPGDCGPPLSDLLKGMLEYEPAKRFSIRQIRQHSWFRKKHPPAEAPVPIPPSPDTKDRWRSMTVVPYLEDLHGADEDEDLFDIEDDIIYTQDFTVPGQVPEEEASHNGQRRGLPKAVCMNGTEAAQLSTKSRAEGRAPNPARKACSASSKIRRLSACKQQ

SEQ ID NO: 7855 - protein, 404 aa, Homo sapiens
MEVVDPQQLGMFTEGELMSVGMDTFIHRIDSTEVIYQPRRKRAKLIGKYLMGDLLGEGSYGKVKEVLDSETLCRRAVKILKKKKLRRIPNGEANVKKEIQLLRRLRHKNVIQLVDVLYNEEKQKMYMVMEYCVCGMQEMLDSVPEKRFPVCQAHGYFCQLIDGLEYLHSQGIVHKDIKPGNLLLTTGGTLKISDLGVAEALHPFAADDTCRTSQGSPAFQPPEIANGLDTFSGFKVDIWSAGVTLYNITTGLYPFEGDNIYKLFENIGKGSYAIPGDCGPPLSDLLKGMLEYEPAKRFSIRQIRQHSWFRKKHPPAEAPVPIPPSPDTKDRWRSMTVVPYLEDLHGADEDEDLFDIEDDIIYTQDFTVPGGEEASEAGLRAERGLQKSEGSDLSGEEASRPAPQ

SEQ ID NO: 7856 - protein, 103 aa, Homo sapiens
MSEEKPKEGVKTENDHINLKVAGQDGSVVQFKIKRHTPLSKLMKAYCERQGLSMRQIRFRFDGQPINETDTPAQLEMEDEDTIDVFQQQTGGVPESSLAGHSF

SEQ ID NO: 7857 - protein, 141 aa, Homo sapiens
MSEEKPKEGVKTENDHINLKVAGQDGSVVQFKIKRHTPLSKLMKAYCERQVRHLAPPQSLPVCALVLCVPGIPRARASRGWTQMQLPEGLSMRQIRFRFDGQPINETDTPAQLEMEDEDTIDVFQQQTGGVPESSLAGHSF

SEQ ID NO: 7858 - protein, 361 aa, Homo sapiens
MASLLAKDAYLQSLAKKICSHSAPEQQARTRAGKTQGSETAGPPKKKRKKTQKKFRKREEKAAEHKAKSLGEKSPAASGARRPEAAKEEAAWASSSAGNPADGLATEPESVFALDVLRQRLHEKIQEARGQGSAKELSPAALEKRRRRKQERDRKKRKRKELRAKEKARKAEEATEAQEVVEATPEGACTEPREPPGLIFNKVEVSEDEPASKAQRRKEKRQRVKGNLTPLTGRNYRQLLERLQARQSRLDELRGQDEGKAQELEAKMKWTNLLYKAEGVKIRDDERLLQEALKRKEKRRAQRQRRWEKRTAGVVEKMQQRQDRRRQNLRRKKAARAERRLLRARKKGRILPQDLERAGLV

SEQ ID NO: 7859 - protein, 743 aa, Homo sapiens
MYPQGRHPTPLQSGQPFKFSILEICDRIKEEFQFLQAQYHSLKLECEKLASEKTEMQRHYVMYYEMSYGLNIEMHKQAEIVKRLSGICAQIIPFLTQEHQQQVLQAVERAKQVTVGELNSLIGQQLQPLSHHAPPVPLTPRPAGLVGGSATGLLALSGALAAQAQLAAAVKEDRAGVEAEGSRVERAPSRSASPSPPESLVEEERPSGPGGGGKQRADEKEPSGPYESDEDKSDYNLVVDEDQPSEPPSPATTPCGKVPICIPARRDLVDSPASLASSLGSPLPRAKELILNDLPASTPASKSCDSSPPQDASTPGPSSASHLCQLAAKPAPSTDSVALRSPLTLSSPFTTSFSLGSHSTLNGDLSVPSSYVSLHLSPQVSSSVVYGRSPVMAFESHPHLRGSSVSSSLPSIPGGKPAYSFHVSADGQMQPVPFPSDALVGAGIPRHARQLHTLAHGEVVCAVTISGSTQHVYTGGKGCVKVWDVGQPGAKTPVAQLDCLNRDNYIRSCKLLPDGRSLIVGGEASTLSIWDLAAPTPRIKAELTSSAPACYALAVSPDAKVCFSCCSDGNIVVWDLQNQTMVRQFQGHTDGASCIDISDYGTRLWTGGLDNTVRCWDLREGRQLQQHDFSSQIFSLGHCPNQDWLAVGMESSNVEILHVRKPEKYQLHLHESCVLSLKFASCGRWFVSTGKDNLLNAWRTPYGASIFQSKESSSVLSCDISRNNKYIVTGSGDKKATVYEVVY

SEQ ID NO: 7860 - protein, 621 aa, Homo sapiens
MQRHYVMYYEMSYGLNIEMHKQAEIVKRLSGICAQIIPFLTQEHQQQVLQAVERAKQVTVGELNSLIGSASPSPPESLVEEERPSGPGGGGKQRADEKEPSGPYESDEDKSDYNLVVDEDQPSEPPSPATTPCGKVPICIPARRDLVDSPASLASSLGSPLPRAKELILNDLPASTPASKSCDSSPPQDASTPGPSSASHLCQLAAKPAPSTDSVALRSPLTLSSPFTTSFSLGSHSTLNGDLSVPSSYVSLHLSPQVSSSVVYGRSPVMAFESHPHLRGSSVSSSLPSIPGGKPAYSFHVSADGQMQPVPFPSDALVGAGIPRHARQLHTLAHGEVVCAVTISGSTQHVYTGGKGCVKVWDVGQPGAKTPVAQLDCLNRDNYIRSCKLLPDGRSLIVGGEASTLSIWDLAAPTPRIKAELTSSAPACYALAVSPDAKVCFSCCSDGNIVVWDLQNQTMVRQFQGHTDGASCIDISDYGTRLWTGGLDNTVRCWDLREGRQLQQHDFSSQIFSLGHCPNQDWLAVGMESSNVEILHVRKPEKYQLHLHESCVLSLKFASCGRWFVSTGKDNLLNAWRTPYGASIFQSKESSSVLSCDISRNNKYIVTGSGDKKATVYEVVY

SEQ ID NO: 7861 - protein, 706 aa, Homo sapiens
MVQSRLTATSASQDSPASGLQTPLQSGQPFKFSILEICDRIKEEFQFLQAQYHSLKLECEKLASEKTEMQRHYVMYYEMSYGLNIEMHKQAEIVKRLSGICAQIIPFLTQEHQQQVLQAVERAKQVTVGELNSLIGQQQLQPLSHHAPPVPLTPRPAGLVGGSATGLLALSGALAAQAQLAAAVKEDRAGVEAEGSRVERAPSRSASPSPPESLVEEERPSGPGGGGKQRADEKEPSGPYESDEDKSDYNLVVDEDQPSEPPSPATTPCGKVPICIPARRDLVDSPASLASSLGSPLPRAKELILNDLPASTPASKSCDSSPPQDASTPGPSSASHLCQLAAKPAPSTDSVALRSPLTLSSPFTTSFSLGSHSTLNGDLSVPSSYVSLHLSPQVSSSVVYGRSPVMAFESHPHLRGSSVSSSLPSIPGGKPAYSFHVSADGQMQPVPFPSDALVGAGIPRHARQLHTLAHGEVVCAVTISGSTQHVYTGGKGCVKVWDVGQPGAKTPVAQLDCLNRDNYIRSCKLLPDGRSLIVGGEASTLSIWDLAAPTPRIKAELTSSAPACYALAVSPDAKVCFSCCSDGNIVVWDLQNQTMVRQFQGHTDGASCIDISDYGTRLWTGGLDNTVRCWDLREGRQLQQHDFSSQIFSLGHCPNQDWLAVGMESSNVEILHVRKPEKYQLHLHESCVLSLKFASCVQGVVLSPEL

SEQ ID NO: 7862 - protein, 629 aa, Homo sapiens
MTAEGPSPPARWHRRLPGLWAAALLLLGLPRLSVRADGKFFVLESQNGSQGLQLEAARLSCKSRGAHLASADELRRVVQDCSFAVCTTGWLADGTLGTTVCSKGSGEQQIMRAVDVRIESNPVPGGTYSALCIKDEEKPCGDPPSFPHTILQGRTGLEMGDELLYVCAPGHIMGHRETAFTLLCNSCGEWYGLVQACGKDEAEAHIDYEDNFPDDRSVSFRELMEDSRTEADEDRGQGDSSEEAPKQDRLVSISVGRENIARDKVFVPTTGLPGAGSSVPADSPGSRLLQKHLFWFPAEAFHKPGLEKEVDDDTKKQFSAGDNHSGVKLVPGEPETKVIYGNTDGPSGPFVGKNDSKAGDPVVSSSDESWLDGYPVTEGAWRKTEAEEEEDGDRGDGSVGLDENVLVTPDQPILVEVKKPKSSTLTPSEGMTHSSVLPSQMLDVEALALRPVNASETEGIGDGDLTKYQSTLPWRFITEESPMATLSYELTSSTLEILTVNTVKQTPNHIPSTIMATTQPPVETTVPEIQDSFPYLLSEDFFGQEGPGPGASEELHPTLESCVGDGCPGLSRGPVIATIVTVLCLLLLLAGVGMVWGYRKCQHKSSVYKLNVGQRQARHYHQQIEMEKV

SEQ ID NO: 7863 - protein, 529 aa, Homo sapiens
MAPARTMARARLAPAGIPAVALWLLCTLGLQGTQAGPPPAPPGLPAGADCLNSFTAGVPGFVLDTNASVSNGATFLESPTVRRGWDCVRACCTTQNCNLALVELQPDRGEDAIAACFLINCLYEQNFVCKFAPREGFINYLTREVYRSYRQLRTQGFGGSGIPKAWAGIDLKVQPQEPLVLKDVENTDWRLLRGDTDVRVERKDPNQVELWGLKEGTYLFQLTVTSSDHPEDTANVTVTVLSTKQTEDYCLASNKVGRCRGSFPRWYYDPTEQICKSFVYGGCLGNKNNYLREEECILACRGVQGGPLRGSSGAQATFPQGPSMERRHPVCSGTCQPTQFRCSNGCCIDSFLECDDTPNCPDASDEAACEKYTSGFDELQRIHFPSDKGHCVDLPDTGLCKESIPRWYYNPFSEHCARFTYGGCYGNKNNFEEEQQCLESCRGISKKDVFGLRREIPIPSTGSVEMAVAVFLVICIVVVVAILGYCFFKNQRKDFHGHHHHPPPTPASSTVSTTEDTEHLVYNHTTRPL

SEQ ID NO: 7864 - protein, 513 aa, Homo sapiens
MAPARTMARARLAPAGIPAVALWLLCTLGLQGTQAGPPPAPPGLPAGADCLNSFTAGVPGFVLDTNASVSNGATFLESPTVRRGWDCVRACCTTQNCNLALVELQPDRGEDAIAACFLINCLYEQNFVCKFAPREGFINYLTREVYRSYRQLRTQGFGGSGIPKAWAGIDLKVQPQEPLVLKDVENTDWRLLRGDTDVRVERKDPNQVELWGLKEGTYLFQLTVTSSDHPEDTANVTVTVLSTKQTEDYCLASNKVGRCRGSFPRWYYDPTEQICKSFVYGGCLGNKNNYLREEECILACRGVQGPSMERRHPVCSGTCQPTQFRCSNGCCIDSFLECDDTPNCPDASDEAACEKYTSGFDELQRIHFPSDKGHCVDLPDTGLCKESIPRWYYNPFSEHCARFTYGGCYGNKNNFEEEQQCLESCRGISKKDVFGLRREIPIPSTGSVEMAVAVFLVICIVVVVAILGYCFFKNQRKDFHGHHHHPPPTPASSTVSTTEDTEHLVYNHTTRPL

SEQ ID NO: 7865 - protein, 255 aa, Homo sapiens
MRWAAATLRGKARPRGRAGVTTPAPGNRTGTCAKLRLPPQATFQVLRGNGASVGTVLMFRCPSNHQMVGSGLLTCTWKGSIAEWSSGSPVCKLVPPHETFGFKVAVIASIVSCAIILLMSMAFLTCCLLKCVKKSKRRRSNRSAQLWSQLKDEDLETVQAAYLGLKHFNKPVSGPSQAHDNHSFTTDHGESTSKLASVTRSVDKDPGIPRALSLSGSSSSPQAQVMVHMANPRQPLPASGLATGMPQQPAAYALG

SEQ ID NO: 7866 - protein, 242 aa, Homo sapiens
MKNIGLVMEWEIPEIICTCAKLRLPPQATFQVLRGNGASVGTVLMFRCPSNHQMVGSGLLTCTWKGSIAEWSSGSPVCKLVPPHETFGFKVAVIASIVSCAIILLMSMAFLTCCLLKCVKKSKRRRSNRSAQLWSQLKDEDLETVQAAYLGLKHFNKPVSGPSQAHDNHSFTTDHGESTSKLASVTRSVDKDPGIPRALSLSGSSSSPQAQVMVHMANPRQPLPASGLATGMPQQPAAYALG

SEQ ID NO: 7867 - protein, 137 aa, Homo sapiens
MSMAFLTCCLLKCVKKSKRRRSNRSAQLWSQLKDEDLETVQAAYLGLKHFNKPVSGPSQAHDNHSFTTDHGESTSKLASVTRSVDKDPGIPRALSLSGSSSSPQAQVMVHMANPRQPLPASGLATGMPQQPAAYALG

SEQ ID NO: 7868 - protein, 261 aa, Homo sapiens
MENFSLLSISGPPISSSALSAFPDIMFSRATSLPDIAKTAVPTEASSPAQALPPQYQSIIVRQGIQNTALSPDCSLGDTQHGEKLRRNCTIYRPWFSPYSYFVCADKESQLEAYDFPEVQQDEGKWDNCLSEDMAENICSSSSSPENTCPREATKKSRHGLDSITSQDILMASRWHPAQQNGYKCVACCRMYPTLDFLKSHIKRGFREGFSCKVYYRKLKALWSKEQKARLGDRLSSGSCQAFNSPAEHLRQIGGEAYLCL

SEQ ID NO: 7869 - protein, 1186 aa, Homo sapiens
MKKFNFRKVLDGLTASSPGSGSSSGSNSGGGAGSGSVHPAGTAGVLREEIQETLTSEYFQICKTVRHGFPHQPTALAFDPVQKILAIGTRTGAIRILGRPGVDCYCQHESGAAVLQLQFLINEGALVSASSDDTLHLWNLRQKRPAILHSLKFNRERITYCHLPFQSKWLYVGTERGNTHIVNIESFILSGYVIMWNKAIELSTKTHPGPVVHLSDSPRDEGKLLIGYENGTVVFWDLKSKRAELRVYYDEAIHSIDWHHEGKQFMCSHSDGSLTLWNLKSPSRPFQTTIPHGKSQREGRKSESCKPILKVEYKTCKNSEPFIIFSGGLSYDKACRRPSLTIMHGKAITVLEMDHPIVEFLTLCETPYPNEFQEPYAVVVLLEKDLIVVDLTQSNFPIFENPYPMDIHESPVTCTAYFADCPPDLILVLYSIGVKHKKQGYSNKEWPISGGAWNLGAQTYPEIIITGHADGSIKFWDASAITLQMLYKLKTSKVFEKQKVGEGKQTCEIVEEDPFAIQMIYWCPESRIFCVSGVSAYVIIYKFSRHEITTEIVSLEVRLQYDVEDIITPEPETSPPFPDLSAQLPSSRSLSGSTNTVASEGVTKDSIPCLNVKTRPVRMPPGYQAELVIQLVWVDGEPPQQITSLAVSSAYGIVAFGNCNGLAVVDFIQKTVLLSMGTIDLYRSSDLYQRQPRSPRKNKQFIADNFCMRGLSNFYPDLTKRIRTSYQSLTELNDSPVPLELERCKSPTSDHVNGHCTSPTSQSCSSGKRLSSADVSKVNRWGPGRPPFRKAQSAACMEISLPVTTEENRENSYNRSRSSSISSIDKDSKEAITALYFMDSFARKNDSTISPCLFVGTSLGMVLIISLNLPLADEQRFTEPVMVLPSGTFLSLKGAVLTFSCMDRMGGLMQPPYEVWRDPNNIDENEKSWRRKVVMNSSSASQEIGDHQYTIICSEKQAKVFSLPSQTCLYVHNITETSFILQANVVVMCSSACLACFCANGHIMIMSLPSLRPMLDVNYLPLTDMRIARTFCFTNEGQALYLVSPTEIQRLTYSQEMCDNLQDMLGDLFTPIETPEAQNRGFLKGLFGGSGQTFDREELFGEASAGKASRSLAQHIPGPGSIEGMKGAAGGVMGELTRARIALDERGQRLGELEEKTAGMMTSAEAFSKHAHELMLKYKDKKWYQF

SEQ ID NO: 7870 - protein, 74 aa, Homo sapiens
MKKFNFRKVLDGLTASSPGSGSSSGSNSGGGAGSGSVHPAGTAGVLREEIQETLTSEYFQICKFGMVFLISPQH

SEQ ID NO: 7871 - protein, 552 aa, Homo sapiens
MANPGGGAVCNGKLHNHKKQSNGSQSRNCTKNGIVKEAQQNGKPHFYDKLIVESFEEAPLHVMVFTYMGYGIGTLFGYLRDFLRNWGIEKCNAAVERKEQKDFVPLYQDFENFYTRNLYMRIRDNWNRPICSAPGPLFDLMERVSDDYNWTFRFTGRVIKDVINMGSYNFLGLAAKYDESMRTIKDVLEVYGTGVASTRHEMGTLDKHKELEDLVAKFLNVEAAMVFGMGFATNSMNIPALVGKGCLILSDELNHTSLVLGARLSGATIRIFKHNNTQSLEKLLRDAVIYGQPRTRRAWKKILILVEGVYSMEGSIVHLPQIIALKKKYKAYLYIDEAHSIGAVGPTGRGVTEFFGLDPHEVDVLMGTFTKSFGASGGYIAGRKDLVDYLRVHSHSAVYASSMSPPIAEQIIRSLKLIMGLDGTTQGLQRVQQLAKNTRYFRQRLQEMGFIIYGNENASVVPLLLYMPGKVAAFARHMLEKKIGVVVVGFPATPLAEARARFCVSAAHTREMLDTVLEALDEMGDLLQLKYSRHKKSARPELYDETSFELED

SEQ ID NO: 7872 - protein, 175 aa, Homo sapiens
MANPGGGAVCNGKLHNHKKQSNGSQSRNCTKNGIVKEAQQNGKPHFYDKLIVESFEEAPLHVMVFTYMGYGIGTLFGYLRDFLRNWGIEKCNAAVERKEQKVRMRTSLDLCQCLLLSKVFSEVVMQVQILESMRCSGTIQGKFHSSPPPKPHYPWAYGPVFTNISWATTICHIPN

SEQ ID NO: 7873 - protein, 236 aa, Homo sapiens
MTRCPAGQAEVEMAELYVKPGNKERGWNDPPQFSYGLQTQAGGPRRSLLTKRVAAPQDGSPRVPASETSPGPPPMGPPPPSSKAPRSPPVGSGPASGVEPTSFPVESEAVMEDVLRPLEQALEDCRGHTRKQVCDDISRRLALLQEQWAGGKLSIPVKKRMALLVQELSSHRWDAADDIHRSLMVDHVTEVSQWMVGVKRLIAEKRSLFSEEAANEEKSAATAEKNHTIPGFQQAS

SEQ ID NO: 7874 - protein, 727 aa, Homo sapiens
MEDSYKDRTSLMKGAKDIAREVKKQTVKKVNQAVDRAQDEYTQRSYSRFQDEEDDDDYYPAGETYNGEANDDEGSSEATEGHDEDDEIYEGEYQGIPSMNQAKDSIVSVGQPKGDEYKDRRELESERRADEEELAQQYELIIQECGHGRFQWALFFVLGMALMADGVEVFVVGFVLPSAETDLCIPNSGSGWLGSIVYLGMMVGAFFWGGLADKVGRKQSLLICMSVNGFFAFLSSFVQGYGFFLFCRLLSGFGIGGAIPTVFSYFAEVLAREKRGEHLSWLCMFWMIGGIYASAMAWAIIPHYGWSFSMGSAYQFHSWRVFVIVCALPCVSSVVALTFMPESPRFLLEVGKHDEAWMILKLIHDTNMRARGQPEKVFTVNKIKTPKQIDELIEIESDTGTWYRRCFVRIRTELYGIWLTFMRCFNYPVRDNTIKLTIVWFTLSFGYYGLSVWFPDVIKPLQSDEYALLTRNVERDKYANFTINFTMENQIHTGMEYDNGRFIGVKFKSVTFKDSVFKSCTFEDVTSVNTYFKNCTFIDTVFDNTDFEPYKFIDSEFKNCSFFHNKTGCQITFDDDYSAYWIYFVNFLGTLAVLPGNIVSALLMDRIGRLTMLGGSMVLSGISCFFLWFGTSESMMIGMLCLYNGLTISAWNSLDVVTVELYPTDRRATGFGFLNALCKAAAVLGNLIFGSLVSITKSIPILLASTVLVCGGLVGLCLPDTRTQVLM

SEQ ID NO: 7875 - protein, 97 aa, Homo sapiens
MDKQSSAGGVKRSVPCDSNEANEMMPETSSGYSDPQPAPKKLKTSESSTILVVRYRRNFKRTSPEELVNDHARKNRINPLQMEEEEFMEIMVEIPAK

SEQ ID NO: 7876 - protein, 429 aa, Homo sapiens
MAQPGTLNLNNEVVKMRKEVKRIRVLVIRKLVRSVGRLKSKKGTEDALLKNQRRAQRLLEEIHAMKELKPDIVTKSALGDDINFEKIFKKPDSTATERAIARLAVHPLLKKKIDVLKAAVQAFKEARQNVAEVESSKNASEDNHSENTLYSNDNGSNLQREATVISEQKVKETKILAKKPIHNSKEKIAKMEHGPKAVTIANSPSKPSEKDSVVSLESQKTPADPKLKTLSQTKKNKGSDSSLSGNSDGGEEFCEEEKEYFDDSTEERFYKQSSMSEDSDSGDDFFIGKVRRTRKKESSCHSSVKEQKPLEKVFLKEDTGETHGDTRNDKIKPSTETRKLESVFFHSLSGSKSSRRNFKEQAPKTRSLDFPQNEPQIKNQFNKKLSGRLENTKQQLQLPLHPSWEASRRRKEQQSNIAVFQGKKITFDD

SEQ ID NO: 7877 - protein, 1141 aa, Homo sapiens
MDDSGELGGLETMETLTELGDELTLGDIDEMLQFVSNQVGEFPDLFSEQLCSSFPGSGGSGSSSGSSGSSSSSSNGRGSSSGAVDPSVQRSFTQVTLPSFSPSAASPQAPTLQVKVSPTSVPTTPRATPILQPRPQPQPQPQTQLQQQTVMITPTFSTTPQTRIIQQPLIYQNAATSFQVLQPQVQSLVTSSQVQPVTIQQQVQTVQAQRVLTQTANGTLQTLAPATVQTVAAPQVQQVPVLVQPQIIKTDSLVLTTLKTDGSPVMAAVQNPALTALTTPIQTAALQVPTLVGSSGTILTTMPVMMGQEKVPIKQVPGGVKQLEPPKEGERRTTHNIIEKRYRSSINDKIIELKDLVMGTDAKMHKSGVLRKAIDYIKYLQQVNHKLRQENMVLKLANQKNKLLKGIDLGSLVDNEVDLKIEDFNQNVLLMSPPASDSGSQAGFSPYSIDSEPGSPLLDDAKVKDEPDSPPVALGMVDRSRILLCVLTFLCLSFNPLTSLLQWGGAHDSDQHPHSGSGRSVLSFESGSGGWFDWMMPTLLLWLVNGVIVLSVFVKLLVHGEPVIRPHSRSSVTFWRHRKQADLDLARGDFAAAAGNLQTCLAVLGRALPTSRLDLACSLSWNVIRYSLQKLRLVRWLLKKVFQCRRATPATEAGFEDEAKTSARDAALAYHRLHQLHITGKLPAGSACSDVHMALCAVNLAECAEEKIPPSTLVEIHLTAAMGLKTRCGGKLGFLASYFLSRAQSLCGPEHSAVPDSLRWLCHPLGQKFFMERSWSVKSAAKESLYCAQRNPADPIAQVHQAFCKNLLERAIESLVKPQAKKKAGDQEEESCEFSSALEYLKLLHSFVDSVGVMSPPLSRSSVLKSALGPDIICRWWTSAITVAISWLQGDDAAVRSHFTKVERIPKALEVTESPLVKAIFHACRAMHASLPGKADGQQSSFCHCERASGHLWSSLNVSGATSDPALNHVVQLLTCDLLLSLRTALWQKQASASQAVGETYHASGAELAGFQRDLGSLRRLAHSFRPAYRKVFLHEATVRLMAGASPTRTHQLLEHSLRRRTTQSTKHGEVDAWPGQRERATAILLACRHLPLSFLSSPGQRAVLLAEAARTLEKVGDRRSCNDCQQMIVKLGGGTAIAAS

SEQ ID NO: 7878 - protein, 681 aa, Homo sapiens
MDDSGELGGLETMETLTELGDELTLGDIDEMLQFVSNQVGEFPDLFSEQLCSSFPGSGGSGSSSGSSGSSSSSSNGRGSSSGAVDPSVQRSFTQVTLPSFSPSAASPQAPTLQVKVSPTSVPTTPRATPILQPRPQPQPQPQTQLQQQTVMITPTFSTTPQTRIIQQPLIYQNAATSFQVLQPQVQSLVTSSQVQPVTIQQQVQTVQAQRVLTQTANGTLQTLAPATVQTVAAPQVQQVPVLVQPQIIKTDSLVLTTLKTDGSPVMAAVQNPALTTPIQTAALQVPTLVGSSGTILTTMPVMMGQEKVPIKQVPGGVKQLEPPKEGERRTTHNIIEKRYRSSINDKIIELKDLVMGTDAKMHKSGVLRKAIDYIKYLQQVNHKLRQENMVLKLANQKNKLLKGIDLGSLVDNEVDLKIEDFNQNVLLMSPPASDSGSQAGFSPYSIDSEPGSPLLDDAKVKDEPDSPPVALGMVDRSRILLCVLTFLCLSFNPLTSLLQWGGAHDSDQHPHSGSGRSVLSFESGSGGWFDWMMPTLLLWLVNGVIVLSVFVKLLVHGEPVIRPHSRSSVTFWRHRKQADLDLARGVYGKKSGATHSIEEELNIHISRGTRTRTLLSSRRFCSCCRQPTNLPGSFGPGTAHLPPGPGLQPLLERDPLQPAEATPGALAAQESLPVPAGHASH

SEQ ID NO: 7879 - protein, 611 aa, Homo sapiens
MASVQQGEKQLFEKFWRGTFKAVATPRPESIIVASITARKPLPRTEPQNNPVVPAQDGPSEKLGQHLATEPLGTNSWERDKTCRELGATRGHSASHDKDLTPPPSSRGKKKKKKSTRKKRRRSSSYSPSPVKKKKKKSSKKHKRRRSFSKKRRHSSSSPKSKRRDEKRHKKQSRSRPRKSHRHRHHRCPSRSQSSESRPSSCESRHRGRSPEEGQKSRRRHSRRCSKTLCKDSPEAQSSRPPSQPLQMLGYLSARGVITGSGSAADLFTKTASPLTTSRGRSQEYDSGNDTSSPPSTQTSSARSRGQEKGSPSGGLSKSRELNSGNTSDSGNSFTTSSPQNKGAMLENLSPTSRGRESRGFQSPCLECAEVKKSSLVPSTARSSPMKGCSRSSSYASTRSSSHSSRSPNPRASPRYTQSRSTSSEKRSYSRSPSYSSKSGKRSPPSRSSRSRRSPSYSRYSPSRERDPKYSEKDSQQRERERARRRRRSYSPMRKRRRDSPSHLEARRITSARKRPIPYYRPSPSSSGSLSSTSSWYSSSSSRSASRSYSRSRSRSRSRRRSRTRTSSSSSSRSPSPGSRSRSRSRSRSRSRSRSQSRSYSSADSYSSTRR

SEQ ID NO: 7880 - protein, 183 aa, Homo sapiens
MRLLSFVVLALFAVTQAEEGARLLASKSLLNRYAVEGRDLTLQYNIYNVGSSAALDVELSDDSFPPEDFGIVSGMLNVKWDRIAPASNVSHTVVLRPLKAGYFNFTSATITYLAQEDGPVVIGSTSAPGQGGILAQREFDRRFSPHFLDWAAFGVMTLPSIGIPLLLWYSSKRKYDTPKTKKN

SEQ ID NO: 7881 - protein, 709 aa, Homo sapiens
MAETLEFNDVYQEVKGSMNDGRLRLSRQGIIFKNSKTGKVDNIQAGELTEGIWRRVALGHGLKLLTKNGHVYKYDGFRESEFEKLSDFFKTHYRLELMEKDLCVKGWNWGTVKFGGQLLSFDIGDQPVFEIPLSNVSQCTTGKNEVTLEFHQNDDAEVSLMEVRFYVPPTQEDGVDPVEAFAQNVLSKADVIQATGDAICIFRELQCLTPRGRYDIRIYPTFLHLHGKTFDYKIPYTTVLRLFLLPHKDQRQMFFVISLDPPIKQGQTRYHFLILLFSKDEDISLTLNMNEEEVEKRFEGRLTKNMSGSLYEMVSRVMKALVNRKITVPGNFQGHSGAQCITCSYKASSGLLYPLERGFIYVHKPPVHIRFDEISFVNFARGTTTTRSFDFEIETKQGTQYTFSSIEREEYGKLFDFVNAKKLNIKNRGLKEGMNPSYDEYADSDEDQHDAYLERMKEEGKIREENANDSSDDSGEETDESFNPGEEEEDVAEEFDSNASASSSSNEGDSDRDEKKRKQLKKAKMAKDRKSRKKPVEVKKGKDPNAPKRPMSAYMLWLNASREKIKSDHPGISITDLSKKAGEIWKGMSKEKKEEWDRKAEDARRDYEKAMKEYEGGRGESSKRDKSKKKKKVKVKMEKKSTPSRGSSSKSSSRQLSESFKSKEFVSSDESSSGENKSKKKRRRSEDSEEEELASTPPSSEDSASGSDE

SEQ ID NO: 7882 - protein, 506 aa, Homo sapiens
MPLLGLLPRRAWASLLSQLLRPPCASCTGAVRCQSQVAEAVLTSQLKAHQEKPNFIIKTPKGTRDLSPQHMVVREKILDLVISCFKRHGAKGMDTPAFELKETLTEKYGEDSGLMYDLKDQGGELLSLRYDLTVPFARYLAMNKVKKMKRYHVGKVWRRESPTIVQGRYREFCQCDFDIAGQFDPMIPDAECLKIMCEILSGLQLGDFLIKVNDRRIVDGMFAVCGVPESKFRAICSSIDKLDKMAWKDVRHEMVVKKGLAPEVADRIGDYVQCHGGVSLVEQMFQDPRLSQNKQALEGLGDLKLLFEYLTLFGIADKISFDLSLARGLDYYTGVIYEAVLLQTPTQAGEEPLNVGSVAAGGRYDGLVGMFDPKGHKVPCVGLSIGVERIFYIVEQRMKTKGEKVRTTETQVFVATPQKNFLQERLKLIAELWDSGIKAEMLYKNNPKLLTQLHYCESTGIPLVVIIGEQELKEGVIKIRSVASREEVAIKRENFVAEIQKRLSES

SEQ ID NO: 7883 - protein, 481 aa, Homo sapiens
MPLLGLLPRRAWASLLSQLLRPPCASCTGAVRCQSQGTRDLSPQHMVVREKILDLVISCFKRHGAKGMDTPAFELKETLTEKYGEDSGLMYDLKDQGGELLSLRYDLTVPFARYLAMNKVKKMKRYHVGKVWRRESPTIVQGRYREFCQCDFDIAGQFDPMIPDAECLKIMCEILSGLQLGDFLIKVNDRRIVDGMFAVCGVPESKFRAICSSIDKLDKMAWKDVRHEMVVKKGLAPEVADRIGDYVQCHGGVSLVEQMFQDPRLSQNKQALEGLGDLKLLFEYLTLFGIADKISFDLSLARGLDYYTGVIYEAVLLQTPTQAGEEPLNVGSVAAGGRYDGLVGMFDPKGHKVPCVGLSIGVERIFYIVEQRMKTKGEKVRTTETQVFVATPQKNFLQERLKLIAELWDSGIKAEMLYKNNPKLLTQLHYCESTGIPLVVIIGEQELKEGVIKIRSVASREEVAIKRENFVAEIQKRLSES

SEQ ID NO: 7884 - protein, 250 aa, Homo sapiens
MEMDGDPYNLPAQGQGNIIITKYEQGHRAGAAVDLGHEQVDVRKYTNNLGIVHEMELPHVSALEVKQRRKESKRTNKWQKMLADWTKYRSTKKLSQRVYKVIPLAVRGRAWSLLLDIDRIKSQNPGKYKVMKEKGKRSSRIIHCIQLDVSHTLQKHMMFIQRFGVKQQELCDILVAYSAYNPEVGYHRDLSRITAILLLCLPEEDAFWALTQLLAGERHSLWYSTAQILPGSRGSYRTRSRCCTSPSQRS

SEQ ID NO: 7885 - protein, 210 aa, Homo sapiens
MEMDGDPYNLPAQGQGNIIITKYEQGHRAGAAVDLGHEQVDVRKYTNNLGIVHEMELPHVSALEVKQRRKESKRTNKWQKMLADWTKYRSTKKLSQRVYKVIPLAVRGRAWSLLLDIDRIKSQNPGKYKVMKEKGKRSSRIIHCIQLDVSHTLQKHMMFIQRFGVKQQELCDILVAYSAYNPVSIPGQRYSWDMCPYSQAWVSLGGVATS

SEQ ID NO: 7886 - protein, 86 aa, Homo sapiens
MEMDGDPYNLPAQGQGNIIITKYEQGHRAGAAVDLGHEQVDVRKYTNNLGIVHEMELPHVSALEVKVRACACCVGGCFRDWESGGR

SEQ ID NO: 7887 - protein, 697 aa, Homo sapiens
MGFQPPAALLLRLFLLQGILRLLWGDLAFIPPFIRMSGPAVSASLVGDTEGVTVSLAVLQDEAGILPIPTCGVLNNETEDWSVTVIPGAKVLEVTVRWKRGLDWCSSNETDSFSESPCILQTLLVSASHNSSCSAHLLIQVEIYANSSLTHNASENVTVIPNQVYQPLGPCPCNLTAGACDVRCCCDQECSSNLTTLFRRSCFTGVFGGDVNPPFDQLCSAGTTTRGVPDWFPFLCVQSPLANTPFLGYFYHGAVSPKQDSSFEVYVDTDAKDFADFGYKQGDPIMTVKKAYFTIPQVSLAGQCMQNAPVAFLHNFDVKCVTNLELYQERDGIINAKIKNVALGGIVTPKVIYEEATDLDKFITNTETPLNNGSTPRIVNVEEHYIFKWNNNTISEINVKIFRAEINAHQKGIMTQRFVVKFLSYNSGNEEELSGNPGYQLGKPVRALNINRMNNVTTLHLWQSAGRGLCTSATFKPILFGENVLSGCLLEVGINENCTQLRENAVERLDSLIQATHVAMRGNSDYADLSDGWLEIIRVDAPDPGADPLASSVNGMCLDIPAHLSIRILISDAGAVEGITQQEILGVETRFSSVNWQYQCGLTCEHKADLLPISASVQFIKIPAQLPHPLTRFQINYTEYDCNRNEVCWPQLLYPWTQYYQGELHSQCVAKGLLLLLFLTLALFLSNPWTRICKAYS

SEQ ID NO: 7888 - protein, 696 aa, Homo sapiens
MGFQPPAALLLRLFLLQGILRLLWGDLAFIPPFIRMSGPAVSASLVGDTEGVTVSLAVLQDEAGILPIPTCGVLNNETEDWSVTVIPGAVLEVTVRWKRGLDWCSSNETDSFSESPCILQTLLVSASHNSSCSAHLLIQVEIYANSSLTHNASENVTVIPNQVYQPLGPCPCNLTAGACDVRCCCDQECSSNLTTLFRRSCFTGVFGGDVNPPFDQLCSAGTTTRGVPDWFPFLCVQSPLANTPFLGYFYHGAVSPKQDSSFEVYVDTDAKDFADFGYKQGDPIMTVKKAYFTIPQVSLAGQCMQNAPVAFLHNFDVKCVTNLELYQERDGIINAKIKNVALGGIVTPKVIYEEATDLDKFITNTETPLNNGSTPRIVNVEEHYIFKWNNNTISEINVKIFRAEINAHQKGIMTQRFVVKFLSYNSGNEEELSGNPGYQLGKPVRALNINRMNNVTTLHLWQSAGRGLCTSATFKPILFGENVLSGCLLEVGINENCTQLRENAVERLDSLIQATHVAMRGNSDYADLSDGWLEIIRVDAPDPGADPLASSVNGMCLDIPAHLSIRILISDAGAVEGITQQEILGVETRFSSVNWQYQCGLTCEHKADLLPISASVQFIKIPAQLPHPLTRFQINYTEYDCNRNEVCWPQLLYPWTQYYQGELHSQCVAKGLLLLLFLTLALFLSNPWTRICKAYS

SEQ ID NO: 7889 - protein, 577 aa, Homo sapiens
MTELAGASSSCCHRPAGRGAMQSVLHHFQRLRGREGGSHFINTSSPRGEAKMSITSDEVNFLVYRYLQESGFSHSAFTFGIESHISQSNINGTLVPPAALISILQKGLQYVEAEISINEDGTVFDGRPIESLSLIDAVMPDVVQTRQQAFREKLAQQQASAAAAAAAATAAATAATTTSAGVSHQNPSKNREATVNGEENRAHSVNNHAKPMEIDGEVEIPSSKATVLRGHESEVFICAWNPVSDLLASGSGDSTARIWNLNENSNGGSTQLVLRHCIREGGHDVPSNKDVTSLDWNTNGTLLATGSYDGFARIWTEDGNLASTLGQHKGPIFALKWNRKGNYILSAGVDKTTIIWDAHTGEAKQQFPFHSAPALDVDWQNNTTFASCSTDMCIHVCRLGCDRPVKTFQGHTNEVNAIKWDPSGMLLASCSDDMTLKIWSMKQEVCIHDLQAHNKEIYTIKWSPTGPATSNPNSNIMLASASFDSTVRLWDIERGVCTHTLTKHQEPVYSVAFSPDGKYLASGSFDKCVHIWNTQSGNLVHSYRGTGGIFEVCWNARGDKVGASASDGSVCVLDLRK

SEQ ID NO: 7890 - protein, 526 aa, Homo sapiens
MSITSDEVNFLVYRYLQESGFSHSAFTFGIESHISQSNINGTLVPPAALISILQKGLQYVEAEISINEDGTVFDGRPIESLSLIDAVMPDVVQTRQQAFREKLAQQQASAAAAAAAATAAATAATTTSAGVSHQNPSKNREATVNGEENRAHSVNNHAKPMEIDGEVEIPSSKATVLRGHESEVFICAWNPVSDLLASGSGDSTARIWNLNENSNGGSTQLVLRHCIREGGHDVPSNKDVTSLDWNTNGTLLATGSYDGFARIWTEDGNLASTLGQHKGPIFALKWNRKGNYILSAGVDKTTIIWDAHTGEAKQQFPFHSAPALDVDWQNNTTFASCSTDMCIHVCRLGCDRPVKTFQGHTNEVNAIKWDPSGMLLASCSDDMTLKIWSMKQEVCIHDLQAHNKEIYTIKWSPTGPATSNPNSNIMLASASFDSTVRLWDIERGVCTHTLTKHQEPVYSVAFSPDGKYLASGSFDKCVHIWNTQSGNLVHSYRGTGGIFEVCWNARGDKVGASASDGSVCVLDLRK

SEQ ID NO: 7891 - protein, 291 aa, Homo sapiens
MEAPASAQTPHPHEPISFGIDQILNSPDQDSAPAPRGPDGASYLGGPPGGRPGATYPSLPASFAGLGAPFEDAGSYSVNLSLAPAGVIRVPAHRPLPGAVPPPLPSALPAMPSVPTVSSLGGLNFPWMESSRRFVKDRFTAAAALTPFTVTRRIGHPYQNRTPPKRKKPRTSFSRVQICELEKRFHRQKYLASAERAALAKSLKMTDAQVKTWFQNRRTKWRRQTAEEREAERQQASRLMLQLQHDAFQKSLNDSIQPDPLCLHNSSLFALQNLQPWEEDSSKVPAVTSLV

SEQ ID NO: 7892 - protein, 243 aa, Homo sapiens
MEQGSGRLEDFPVNVFSVTPYTPSTADIQVSDDDKAGATLLFSGIFLGLVGITFTVMGWIKYQGVSHFEWTQLLGPVLLSVGVTFILIAVCKFKMLSCQLCKESEERVPDSEQTPGGPSFVFTGINQPITFHGATVVQYIPPPYGSPEPMGINTSYLQSVVSPCGLITSGGAAAAMSSPPQYYTIYPQDNSAFVVDEGCLSFTDGGNHRPNPDVDQLEETQLEEEACACFSPPPYEEIYSLPR

SEQ ID NO: 7893 - protein, 218 aa, Homo sapiens
MEQGSGRLEDFPVNVFSVTPYTPSTADIQVSDDDKAGATLLFSGIFLGLVGITFTVMGWIKYQGVSHFEWTQLLGPVLLSVGVTFILIAVCKFKMLSCQLCKESEERVPDSEQTPGGPSFVFTGINQPITFHGATVVQYIPPPYGSPEPMGINTSYLQSVVSPCGLITSGGAAAAMSSPPQYYTIYPQDNSAFVVDEGCLSFTDGGNHRYGPILMLTS

SEQ ID NO: 7894 - protein, 300 aa, Homo sapiens
MRALEGPGLSLLCLVLALPALLPVPAVRGVAETPTYPWRDAETGERLVCAQCPPGTFVQRPCRRDSPTTCGPCPPRHYTQFWNYLERCRYCNVLCGEREEEARACHATHNRACRCRTGFFAHAGFCLEHASCPPGAGVIAPGTPSQNTQCQPCPPGTFSASSSSSEQCQPHRNCTALGLALNVPGSSSHDTLCTSCTGFPLSTRVPGAEECERAVIDFVAFQDISIKRLQRLLQALEAPEGWGPTPRAGRAALQLKLRRRLTELLGAQDGALLVRLLQALRVARMPGLERSVRERFLPVH

SEQ ID NO: 7895 - protein, 548 aa, Homo sapiens
MSASLNYKSFSKEQQTMDNLEKQLICPICLEMFTKPVVILPCQHNLCRKCASDIFQASNPYLPTRGGTTMASGGRFRCPSCRHEVVLDRHGVYGLQRNLLVENIIDIYKQESTRPEKKSDQPMCEEHEEERINIYCLNCEVPTCSLCKVFGAHKDCQVAPLTHVFQRQKSELSDGIAILVGSNDRVQGVISQLEDTCKTIEECCRKQKQELCEKFDYLYGILEERKNEMTQVITRTQEEKLEHVRALIKKYSDHLENVSKLVESGIQFMDEPEMAVFLQNAKTLLKKISEASKAFQMEKIEHGYENMNHFTVNLNREEKIIREIDFYREDEDEEEEEGGEGEKEGEGEVGGEAVEVEEVENVQTEFPGEDENPEKASELSQVELQAAPGALPVSSPEPPPALPPAADAPVTQGEVVPTGSEQTTESETPVPAAAETADPLFYPSWYKGQTRKATTNPPCTPGSEGLGQIGPPGSEDSNVRKAEVAAAAASERAAVSGKETSAPAATSQIGFEAPPLQGQAAAPASGSGADSEPARHIFSFSWLNSLNE

SEQ ID NO: 7896 - protein, 452 aa, Homo sapiens
MSASLNYKSFSKEQQTMDNLEKQLICPICLEMFTKPVVILPCQHNLCRKCASDIFQASNPYLPTRGGTTMASGGRFRCPSCRHEVVLDRHGVYGLQRNLLVENIIDIYKQESTRPEKKSDQPMCEEHEEERINIYCLNCEVPTCSLCKVFGAHKDCQVAPLTHVFQRQKSELSDGIAILVGSNDRVQGVISQLEDTCKTIEECCRKQKQELCEKFDYLYGILEERKNEMTQVITRTQEEKLEHVRALIKKYSDHLENVSKLVESGIQFMDEPEMAVFLQNAKTLLKKISEASKAFQMEKIEHGYENMNHFTVNLNREEKIIREIDFYREDEDEEEEEGGEGEKEGEGEVGGEAVEVEEVENVQTEFPGEDENPEKASELSQVELQAAPGALPVSSPEPPPALPPAADAPVTQIGFEAPPLQGQAAAPASGSGADSEPARHIFSFSWLNSLNE

SEQ ID NO: 7897 - protein, 540 aa, Homo sapiens
MSASLNYKSFSKEQQTMDNLEKQLICPICLEMFTKPVVILPCQHNLCRKCASDIFQASNPYLPTRGGTTMASGGRFRCPSCRHEVVLDRHGVYGLQRNLLVENIIDIYKQESTRPEKKSDQPMCEEHEEERINIYCLNCEVPTCSLCKVFGAHKDCQVAPLTHVFQRQKSELSDGIAILVGSNDRVQGVISQLEDTCKTIEECCRKQKQELCEKFDYLYGILEERKNEMTQVITRTQEEKLEHVRALIKKYSDHLENVSKLVESGIQFMDEPEMAVFLQNAKTLLKKISEASKAFQMEKIEHGYENMNHFTVNLNREEKIIREIDFYREDEDEEEEEGGEGEKEGEGEVGGEAVEVEEVENVQTEFPGEDENPEKASELSQVELQAAPGALPVSSPEPPPALPPAADAPVTQGEVVPTGSEQTTESETPVPAAAETADPLFYPSWYKGQTRKATTNPPCTPGSEGLGQIGPPGSEDSNVRKAEVAAAAASERAAVSGKETSAPAATSQELVICLALLAFLILHYIWSQIQCLIFTLMDWI

SEQ ID NO: 7898 - protein, 241 aa, Homo sapiens
MSASLNYKSFSKEQQTMDNLEKQLICPICLEMFTKPVVILPCQHNLCRKCASDIFQASNPYLPTRGGTTMASGGRFRCPSCRHEVVLDRHGVYGLQRNLLVENIIDIYKQESTRPEKKSDQPMCEEHEEERINIYCLNCEVPTCSLCKVFGAHKDCQVAPLTHVFQRQKSELSDGIAILVGSNDRVQGVISQLEDTCKTIEIGFEAPPLQGQAAAPASGSGADSEPARHIFSFSWLNSLNE

SEQ ID NO: 7899 - protein, 729 aa, Homo sapiens
MTEITAEGNASTTTTVIDSKNGSVPKSPGKVLKRTVTEDIVTTFSSPAAWLLVIALIITWSAVAIVMFDLVDYKNFSASSIAKIGSDPLKLVRDAMEETTDWIYGFFSLLSDIISSEDEEDDDGDEDTDKGEIDEPPLRKKEIHKDKTEKQEKPERKIQTKVTHKEKEKGKEKVREKEKPEKKATHKEKIEKKEKPETKTLAKEQKKAKTAEKSEEKTKKEVKGGKQEKVKQTAAKVKEVQKTPSKPKEKEDKEKAAVSKHEQKDQYAFCRYMIDIFVHGDLKPGQSPAIPPPLPTEQASRPTPASPALEEKEGEKKKAEKKVTSETKKKEKEDIKKKSEKETAIDVEKKEPGKASETKQGTVKIAAQAAAKKDEKKEDSKKTKKPAEVEQPKGKKQEKKEKHVEPAKSPKKEHSVPSDKQVKAKTERAKEEIGAVSIKKAVPGKKEEKTTKTVEQEIRKEKSGKTSSILKDKEPIKGKEEKVPASLKEKEPETKKDEKMSKAGKEVKPKPPQLQGKKEEKPEPQIKKEAKPAISEKVQIHKQDIVKPEKTVSHGKPEEKVLKQVKAVTIEKTAKPKPTKKAEHREREPPSIKTDKPKPTPKGTSEVTESGKKKTEISEKESKEKADMKHLREEKVSTRKESLQLHNVTKAEKPARVSKDVEDVPASKKAKEGTEDVSPTKQKSPISFFQCVYLDGYNGYGFQFPFTPADRPGESSGQANSPGQKQQGQ

SEQ ID NO: 7900 - protein, 297 aa, Homo sapiens
MTEITAEGNASTTTTVIDSKNGSVPKSPGKVLKRTVTEDIVTTFSSPAAWLLVIALIITWSAVAIVMFDLVDYKNFSASSIAKIGSDPLKLVRDAMEETTDWIYGFFSLLSDIISSEDEEDDDGDEDTDKGEIDEPPLRKKEIHKDKTEKQEKPERKIQTKVTHKEKEKGKEKVREKEKPEKKATHKEKIEKKEKPETKTLAKEQKKAKTAEKSEEKTKKEVKGGKQEKVKQTAAKVKEVQKTPSKPKEKEDKEKAAVSKHEQKGQSPAIPPPLPTEQASRPTPASPALEGKYFFFS

SEQ ID NO: 7901 - protein, 167 aa, Homo sapiens
MTEITAEGNASTTTTVIDSKNGSVPKSPGKVLKRTVTEDIVTTFSSPAAWLLVIALIITWSAVAIVMFDLVDYKNFSASSIAKIGSDPLKLVRDAMEETTDWIYGFFSLLSDIISSEDEEDDDGDEDTDKGEIDEPPLRKKEIHKDKTEKQEKPERKIQTKEVGHSS

SEQ ID NO: 7902 - protein, 723 aa, Homo sapiens
METAMCVCCPCCTWQRCCPQLCSCLCCKFIFTSERNCTCFPCPYKDERNCQFCHCTCSESPNCHWCCCSWANDPNCKCCCTASSNLNCYYYESRCCRNTIITFHKGRLRSIHTSSKTALRTGSSDTQVDEVKSIPANSHLVNHLNCPMCSRLRLHSFMLPCNHSLCEKCLRQLQKHAEVTENFFILICPVCDRSHCMPYSNKMQLPENYLHGRLTKRYMQEHGYLKWRFDRSSGPILCQVCRNKRIAYKRCITCRLNLCNDCLKAFHSDVAMQDHVFVDTSAEEQDEKICIHHPSSRIIEYCRNDNKLLCTFCKFSFHNGHDTISLIDACSERAASLFSAIAKFKAVRYEIDNDLMEFNILKNSFKADKEAKRKEIRNGFLKLRSILQEKEKIIMEQIENLEVSRQKEIEKYVYVTTMKVNEMDGLIAYSKEALKETGQVAFLQSAKILVDQIEDGIQTTYRPDPQLRLHSINYVPLDFVELSSAIHELFPTGPKKVRSSGDSLPSPYPVHSETMIARKVTFSTHSLGNQHIYQRSSSMLSFSNTDKKAKVGLEACGRAQSATPAKPTDGLYTYWSAGADSQSVQNSSSFHNWYSFNDGSVKTPGPIVIYQTLVYPRAAKVYWTCPAEDVDSFEMEFYEVITSPPNNVQMELCGQIRDIMQQNLELHNLTPNTEYVFKVRAINDNGPGQWSDICKVVTPDGHGKNRAKWGLLKNIQSALQKHF

SEQ ID NO: 7903 - protein, 369 aa, Homo sapiens
METAMCVCCPCCTWQRCCPQLCSCLCCKFIFTSERNCTCFPCPYKDERNCQFCHCTCSESPNCHWCCCSWANDPNCKCCCTASSNLNCYYYESRCCRNTIITFHKGRLRSIHTSSKTALRTGSSDTQVDEVKSIPANSHLVNHLNCPMCSRLRLHSFMLPCNHSLCEKCLRQLQKHAEVTENFFILICPVCDRSHCMPYSNKMQLPENYLHGRLTKRYMQEHGYLKWRFDRSSGPILCQVCRNKRIAYKRCITCRLNLCNDCLKAFHSDVAMQDHVFVDTSAEEQDEKICIHHPSSRIIEYCRNDNKLLCTFCKFSFHNGHDTISLIDACSERAASLFSAIAKFKAGPPLFHSFSLTSSSGTHGEDGVG

SEQ ID NO: 7904 - protein, 418 aa, Homo sapiens
MYRPARVTSTSRFLNPYVVCFIVVAGVVILAVTIALLVYFLAFDQKSYFYRSSFQLLNVEYNSQLNSPATQEYRTLSGRIESLITKTFKESNLRNQFIRAHVAKLRQDGSGVRADVVMKFQFTRNNNGASMKSRIESVLRQMLNNSGNLEINPSTEITSLTDQAAANWLINECGAGPDLITLSEQRILGGTEAEEGSWPWQVSLRLNNAHHCGGSLINNMWILTAAHCFRSNSNPRDWIATSGISTTFPKLRMRVRNILIHNNYKSATHENDIALVRLENSVTFTKDIHSVCLPAATQNIPPGSTAYVTGWGAQEYAGHTVPELRQGQVRIISNDVCNAPHSYNGAILSGMLCAGVPQGGVDACQGDSGGPLVQEDSRRLWFIVGIVSWGDQCGLPDKPGVYTRVTAYLDWIRQQTGI

SEQ ID NO: 7905 - protein, 125 aa, Homo sapiens
MERHTSHPNRKVPAKEEANAVPLCRAKPSPSYINLQASSPPATFLNIQTTKLPSVDHKPKECLGLLECMYANLQLQTQLAQQQMAVLEHLQASVTQLAPGRGSNNSSLPALSPNPLLNHLPQFSK

SEQ ID NO: 7906 - protein, 326 aa, Homo sapiens
MDLTAIYESLLSLSPDVPVPSDHGGTESSPGWGSSGPWSLSPSDSSPSGVTSRLPGRSTSLVEGRSCGWVPPPPGFAPLAPRLGPELSPSPTSPTATSTTPSRYKTELCRTFSESGRCRYGAKCQFAHGLGELRQANRHPKYKTELCHKFYLQGRCPYGSRCHFIHNPSEDLAAPGHPPVLRQSISFSGLPSGRRTSPPPPGLAGPSLSSSSFSPSSSPPPPGDLPLSPSAFSAAPGTPLARRDPTPVCCPSCRRATPISVWGPLGGLVRTPSVQSLGSDPDEYASSGSSLGGSDSPVFEAGVFAPPQPVAAPRRLPIFNRISVSE

SEQ ID NO: 7907 - protein, 541 aa, Homo sapiens
MSSEMEPLLLAWSYFRRRKFQLCADLCTQMLEKSPYDQEPDPELPVHQAAWILKARALTEMVYIDEIDVDQEGIAEMMLDENAIAQVPRPGTSLKLPGTNQTGGPSQAVRPITQAGRPITGFLRPSTQSGRPGTMEQAIRTPRTAYTARPITSSSGRFVRLGTASMLTSPDGPFINLSRLNLTKYSQKPKLAKALFEYIFHHENDVKTIHLEDVVLHLGIYPFLLRNKNHIEKNALDLAALSTEHSQYKDWWWKVQIGKCYYRLGMYREAEKQFKSALKQQEMVDTFLYLAKVYVSLDQPVTALNLFKQGLDKFPGEVTLLCGIARIYEEMNNMSSAAEYYKEVLKQDNTHVEAIACIGSNHFYSDQPEIALRFYRRLLQMGIYNGQLFNNLGLCCFYAQQYDMTLTSFERALSLAENEEEAADVWYNLGHVAVGIGDTNLAHQCFRLALVNNNNHAEAYNNLAVLEMRKGHVEQARALLQTASSLAPHMYEPHFNFATISDKIGDLQRSYVAAQKSEAAFPDHVDTQHLIKQLRQHFAML

SEQ ID NO: 7908 - protein, 250 aa, Homo sapiens
MSSEMEPLLLAWSYFRRRKFQLCADLCTQMLEKSPYDQEMNNMSSAAEYYKEVLKQDNTHVEAIACIGSNHFYSDQPEIALRFYRRLLQMGIYNGQLFNNLGLCCFYAQQYDMTLTSFERALSLAENEEEAADVWYNLGHVAVGIGDTNLAHQCFRLALVNNNNHAEAYNNLAVLEMRKGHVEQARALLQTASSLAPHMYEPHFNFATISDKIGDLQRSYVAAQKSEAAFPDHVDTQHLIKQLRQHFAML

SEQ ID NO: 7909 - protein, 485 aa, Homo sapiens
MSSEMEPLLLAWSYFRRRKFQLCADLCTQMLEKSPYDQEPDPELPVHQAAWILKARALTEMVYIDEIDVDQEGIAEMMLDENAIAQVPRPGTSLKLPGTNQTGGPSQAVRPITQAGRPITGFLRPSTQSGRPGTMEQAIRTPRTAYTARPITSSSGRFVRLGTALFEYIFHHENDVKTALDLAALSTEHSQYKDWWWKVQIGKCYYRLGMYREAEKQFKSALKQQEMVDTFLYLAKVYVSLDQPVTALNLFKQGLDKFPGEVTLLCGIARIYEEMNNMSSAAEYYKEVLKQDNTHVEAIACIGSNHFYSDQPEIALRFYRRLLQMGIYNGQLFNNLGLCCFYAQQYDMTLTSFERALSLAENEEEAADVWYNLGHVAVGIGDTNLAHQCFRLALVNNNNHAEAYNNLAVLEMRKGHVEQARALLQTASSLAPHMYEPHFNFATISDKIGDLQRSYVAAQKSEAAFPDHVDTQHLIKQLRQHFAML

SEQ ID NO: 7910 - protein, 515 aa, Homo sapiens
MSSEMEPLLLAWSYFRRRKFQLCADLCTQMLEKSPYDQEPDPELPVHQAAWILKARALTEMVYIDEIDVDQEGIAEMMLDENAIAQVPRPGTSLKLPGTNQTGGPSQAVRPITQAGRPITGFLRPSTQSGRPGTMEQAIRTPRTAYTARPITSSSGRFVRLGTASMLTSPDGPFINLSRLNLTKYSQKPKLAKALFEYIFHHENDVKTALDLAALSTEHSQYKDWWWKVQIGKCYYRLGMYREAEKQFKSALKQQEMVDTFLYLAKVYVSLDQPVTALNLFKQGLDKFPGEVTLLCGIARIYEEMNNMSSAAEYYKEVLKQDNTHVEAIACIGSNHFYSDQPEIALRFYRRLLQMGIYNGQLFNNLGLCCFYAQQYDMTLTSFERALSLAENEEEAADVWYNLGHVAVGIGDTNLAHQCFRLALVNNNNHAEAYNNLAVLEMRKGHVEQARALLQTASSLAPHMYEPHFNFATISDKIGDLQRSYVAAQKSEAAFPDHVDTQHLIKQLRQHFAML

SEQ ID NO: 7911 - protein, 196 aa, Homo sapiens
MSSEMEPLLLAWSYFRRRKFQLCADLCTQMLEKSPYDQEPDPELPVHQAAWILKARALTEMVYIDEIDVDQEGIAEMMLDENAIAQVPRPGTSLKLPGTNQTGGPSQAVRPITQAGRPITGFLRPSTQSGRPGTMEQAIRTPRTAYTARPITSSSGRFVRLGTASMLTSPDGPFINLSRLNLTKYSQKPKLAKVCT

SEQ ID NO: 7912 - protein, 361 aa, Homo sapiens
MQASPIRIPTVSNDIDWDFCFHMSQQTEIPAHQQTDELYPTGGCGESEEETKAKEKEKAIDCMSHPKEKLAQSQKKVAQLIKEKMNTQANKELIRCVILSRIIFGDHHWKCARALANLAYGYLTLRGLPVQAKKHATSAKNTLLTWKANTTSNKEKEEILEALVKLYYTLGVAWLLQNRGREAYFNLQKAERNMKELKELYKGGVCELQVSENDLTLALGRASLAIHRLNLALAYFEKAIGDVIAAKGDRTSDLISLYEEAAQIEQLRRNHNQAIQYLQQAHSVCVSLFTEVSPKTAEMSALLAKAYAMSGEAQHRDAVEIYFIRSINAYRATLGSEDFETLSTTEEFCKWLVQNGEKQDK

SEQ ID NO: 7913 - protein, 287 aa, Homo sapiens
MQASPIRIPTVSNDIDWDFCFHMSQQTEIPAHQQTDELYPTGGCGESEEETKAKEKEKAIDCMSHPKEKLAQSQKKVAQLIKEKMNTQANKELIRCVILSRIIFGDHHWKCARALANLAYGYLTLRGLPVQAKKHATSAKNTLLTWKANTTSNKEKEEILEALVKLYYTLGVAWLLQNRGREAYFNLQKAERNMKELKELYKGGVCELQVSENDLTLALGRASLAIHRLNLALAYFEKAIGDVIAAKGDRTSDLISLYEEAAQIEQLRRNHNQAIQYLQQMLLRYIS

SEQ ID NO: 7914 - protein, 397 aa, Homo sapiens
MQASPIRIPTVSNDIDWDFCFHMSQQTEIPAHQQTDELYPTGGCGESEEETKAKEKEKAIDCMSHPKEKLAQSQKKVAQLIKEKMNTQANKELIRCVILSRIIFGDHHWKCARALANLAYGYLTLRGLPVQAKKHATSAKNTLLTWKANTTSNKEKEEILEALVKLYYTLGVAWLLQNRGREAYFNLQKAERNMKELKELYKGGVCELQVSENDLTLALGRASLAIHRLNLALAYFEKAIGDVIAAKGDRTSDLISLYEEAAQIEQLRRNHNQAIQYLQQAHSVCVSLFTEVSPKTAEMSALLAKAYAMSGEAQHRDAVEIYFIRSINAYRATLGSEDFETLSTTEEFCKWLVQNGEKQIFQKRRYKHDHKRHEKMFNPISHRGNANENHHTDTRVV

SEQ ID NO: 7915 - protein, 471 aa, Homo sapiens
MEFDCEGLRRLLGKYKFRDLTVEELRNVNVFFPHFKYSMDTYVFKDSSQKDLLNFTGTIPVMYQGNTYNIPIRFWILDSHPFAPPICFLKPTANMGILVGKHVDAQGRIYLPYLQNWSHPKSVIVGLIKEMIAKFQEELPMYSLSSSDEARQVDLLAYIAKITEGVSDTNSKSWANHENKTVNKITVVGGGELGIACTLAISAKGIADRLVLLDLSEGTKGATMDLEIFNLPNVEISKDLSASAHSKVVIFTVNSLGSSQSYLDVVQSNVDMFRALVPALGHYSQHSVLLVASQPVEIMTYVTWKLSTFPANRVIGIGCNLDSQRLQYIITNVLKAQTSGKEVWVIGEQGEDKVLTWSGQEEVVSHTSQVQLSNRAMELLRVKGQRSWSVGLSVADMVDSIVNNKKKVHSVSALAKGYYDINSEVFLSLPCILGTNGVSEVIKTTLKEDTVTEKLQSSASSIHSLQQQLKL

SEQ ID NO: 7916 - protein, 379 aa, Homo sapiens
MEFDCEGLRRLLGKYKFRDLTVEELRNVNVFFPHFKYSMDTYVFKDSSQKDLLNFTGTIPVMYQGNTYNIPIRFWILDSHPFAPPICFLKPTANMGILVGKHVDAQGRIYLPYLQNWSHPKSVIVGLIKEMIAKFQEELPMYSLSSSDEARQVDLLAYIAKITEGVSDTNSKSWANHENKTVNKITVVGGGELGIACTLAISAKGIADRLVLLDLSEGTKGATMDLEIFNLPNVEISKDLSASAHSKVVIFTVNSLGSSQSYLDVVQSNVDMFRALVPALGHYSQHSVLLVASQPVEIMTYVTWKLSTFPANRVIGIGCNLDSQRLQYIITNVLKAQTSGKEVWVIGEQGEDKVLTWSGQEEVVSHTSQVQLSNRDIMI

SEQ ID NO: 7917 - protein, 357 aa, Homo sapiens
MEFDCEGLRRLLGKYKFRDLTVEELRNVNVFFPHFKYSMDTYGNTYNIPIRFWILDSHPFAPPICFLKPTANMGILVGKHVDAQGRIYLPYLQNWSHPKSVIVGLIKEMIAKFQEELPMYSLSSSDEARQVDLLAYIAKITEGVSDTNSKSWANHENKTVNKITVVGGGELGIACTLAISAKGIADRLVLLDLSEGTKGATMDLEIFNLPNVEISKDLSASAHSKVVIFTVNSLGSSQSYLDVVQSNVDMFRALVPALGHYSQHSVLLVASQPVEIMTYVTWKLSTFPANRVIGIGCNLDSQRLQYIITNVLKAQTSGKEVWVIGEQGEDKVLTWSGQEEVVSHTSQVQLSNRDIMI

SEQ ID NO: 7918 - protein, 341 aa, Homo sapiens
MDTYVFKDSSQKDLLNFTGTIPVMYQGNTYNIPIRFWILDSHPFAPPICFLKPTANMGILVGKHVDAQGRIYLPYLQNWSHPKSVIVGLIKEMIAKFQEELPMYSLSSSDEARQVDLLAYIAKITEGVSDTNSKSWANHENKTVNKITVVGGGELGIACTLAISAKGIADRLVLLDLSEGTKGATMDLEIFNLPNVEISKDLSASAHSKVVIFTVNSLGSSQSYLDVVQSNVDMFRALVPALGHYSQHSVLLVASQPVEIMTYVTWKLSTFPANRVIGIGCNLDSQRLQYIITNVLKAQTSGKEVWVIGEQGEDKVLTWSGQEEVVSHTSQVQLSNRDIMI

SEQ ID NO: 7919 - protein, 215 aa, Homo sapiens
MEFDCEGLRRLLGKYKFRDLTVEELRNVNVFFPHFKYSMDTYVFKDSSQKDLLNFTGTIPVMYQGNTYNIPIRFWILDSHPFAPPICFLKPTANMGILVGKHVDAQGRIYLPYLQNWSHPKSVIVGLIKEMIAKFQEELPMYSLSSSDEARQVDLLAYIAKITEGVSDTNSKSWANHENKTVNKITVVGGGELGIACTLAISAKVESRSVTQAGV

SEQ ID NO: 7920 - protein, 449 aa, Homo sapiens
MEFDCEGLRRLLGKYKFRDLTVEELRNVNVFFPHFKYSMDTYGNTYNIPIRFWILDSHPFAPPICFLKPTANMGILVGKHVDAQGRIYLPYLQNWSHPKSVIVGLIKEMIAKFQEELPMYSLSSSDEARQVDLLAYIAKITEGVSDTNSKSWANHENKTVNKITVVGGGELGIACTLAISAKGIADRLVLLDLSEGTKGATMDLEIFNLPNVEISKDLSASAHSKVVIFTVNSLGSSQSYLDVVQSNVDMFRALVPALGHYSQHSVLLVASQPVEIMTYVTWKLSTFPANRVIGIGCNLDSQRLQYIITNVLKAQTSGKEVWVIGEQGEDKVLTWSGQEEVVSHTSQVQLSNRAMELLRVKGQRSWSVGLSVADMVDSIVNNKKKVHSVSALAKGYYDINSEVFLSLPCILGTNGVSEVIKTTLKEDTVTEKLQSSASSIHSLQQQLKL

SEQ ID NO: 7921 - protein, 199 aa, Homo sapiens
MEFDCEGLRRLLGKYKFRDLTVEELRNVNVFFPHFKYSMDTYVFKDSSQKDLLNFTGTIPVMYQGVSDTNSKSWANHENKTVNKITVVGGGELGIACTLAISAKGIADRLVLLDLSEGTKGATMDLEIFNLPNVEISKVEIMTYVTWKLSTFPANRVIGIGCNLDSQRLQYIITNVLKAQTSGKEVWVIGEQGEDKGIL

SEQ ID NO: 7922 - protein, 2635 aa, Homo sapiens
MSTKAEQFASKIRYLQEYHNRVLHNIYPVPSGTDIANTLKYFSQTLLSILSRTGKKENQDASNLTVPMTMCLFPVPFPLTPSLRPQVSSINPTVTRSLLYSVLRDAPSERGPQSRDAQLSDYPSLDYQGLYVTLVTLLDLVPLLQHGQHDLGQSIFYTTTCLLPFLNDDILSTLPYTMISTLATFPPFLHKDIIEYLSTSFLPMAILGSSRREGVPAHVNLSASSMLMIAMQYTSNPVYHCQLLECLMKYKQEVWKDLLYVIAYGPSQVKPPAVQMLFHYWPNLKPPGAISEYRGLQYTAWNPIHCQHIECHNAINKPAVKMCIDPSLSVALGDKPPPLYLCEECSERIAGDHSEWLIDVLLPQAEISAICQKKNCSSHVRRAVVTCFSAGCCGRHGNRPVRYCKRCHSNHHSNEVGAAAETHLYQTSPPPINTRECGAEELVCAVEAVISLLKEAEFHAEQREHELNRRRQLGLSSSHHSLDNADFDNKDDDKHDQRLLSQFGIWFLVSLCTPSENTPTESLARLVAMVFQWFHSTAYMMDDEVGSLVEKLKPQFVTKWLKTVCDVRFDVMVMCLLPKPMEFARVGGYWDKSCSTVTQLKEGLNRILCLIPYNVINQSVWECIMPEWLEAIRTEVPDNQLKEFREVLSKMFDIELCPLPFSMEEMFGFISCRFTGYPSSVQEQALLWLHVLSELDIMVPLQLLISMFSDGVNSVKELANQRKSRVSELAGNLASRRVSVASDPGRRVQHNMLSPFHSPFQSPFRSPLRSPFRSPFKNFGHPGGRTIDFDCEDDEMNLNCFILMFDLLLKQMELQDDGITMGLEHSLSKDIISIINNVFQAPWGGSHTCQKDEKAIECNLCQSSILCYQLACELLERLAPKEESRLVEPTDSLEDSLLSSRPEFIIGPEGEEEENPASKHGENPGNCTEPVEHAAVKNDTERKFCYQQLPVTLRLIYTIFQEMAKFEEPDILFNMLNCLKILCLHGECLYIARKDHPQFLAYIQDHMLIASLWRVVKSEFSQLSSLAVPLLLHALSLPHGADIFWTIINGNFNSKDWKMRFEAVEKVAVICRFLDIHSVTKNHLLKYSLAHAFCCFLTAVEDVNPAVATRAGLLLDTIKRPALQGLCLCLDFQFDTVVKDRPTILSKLLLLHFLKQDIPALSWEFFVNRFETLSLEAQLHLDCNKEFPFPTTITAVRTNVANLSDAALWKIKRARFARNRQKSVRSLRDSVKGPVESKRALSLPETLTSKIRQQSPENDNTIKDLLPEDAGIDHQTVHQLITVLMKFMAKDESSAESDISSAKAFNTVKRHLYVLLGYDQQEGCFMIAPQKMRLSTCFNAFIAGIAQVMDYNINLGKHLLPLVVQVLKYCSCPQLRHYFQQPPRCSLWSLKPHIRQMWLKALLVILYKYPYRDCDISKILLHLIHITVNTLNAQYHSCKPHATAGPLYSDNSNISRYSEKEKGEIELAEYRETGALQDSLLHCVREESIPKKKLRSFKQKSLDIGNADSLLFTLDEHRRKSCIDRCDIEKPPTQAAYIAQRPNDPGRSRQNSATRPDNSEIPENPAMEGFPDARRPVIPEVRLNCMETFEVKVDSPVKPAPKEDLDLIDLSSDSTSGPEKHSILSTSDSDSLVFEPLPPLRIVESDEEEETMNQGDDGPSGKNAASSPSVPSHPSVLSLSTAPLVQVSVEDCSKDFSSKDSGNNQSAGNTDSALITLEDPMDAEGSSKPEELPEFSCGSPLTLKQKRDLLQKSFALPEMSLDDHPDPGTEGEKPGELMPSSGAKTVLLKVPEDAENPTESEKPDTSAESDTEQNPERKVEEDGAEESEFKIQIVPRQRKQRKIAVSAIQREYLDISFNILDKLGEQKDPDPSTKGLSTLEMPRESSSAPTLDAGVPETSSHSSISTQYRQMKRGSLGVLTMSQLMKRQLEHQSSAPHNISNWDTEQIQPGKRQCNVPTCLNPDLEGQPLRMRGATKSSLLSAPSIVSMFVPAPEEFTDEQPTVMTDKCHDCGAILEEYDEETLGLAIVVLSTFIHLSPDLAAPLLLDIMQSVGRLASSTTFSNQAESMMVPGNAAGVAKQFLRCIFHQLAPNGIFPQLFQSTIKDGTFLRTLASSLMDFNELSSIAALSQLLEGLNNKKNLPAGGAMIRCLENIATFMEALPMDSPSSLWTTISNQFQTFFAKLPCVLPLKCSLDSSLRIMICLLKIPSTNATRSLLEPFSKLLSFVIQNAVFTLAYLVELCGLCYRAFTKERDKFYLSRSVVLELLQALKLKSPLPDTNLLLLVQFICADAGTKLAESTILSKQMIASVPGCGTAAMECVRQYINEVLDFMADMHTLTKLKSHMKTCSQPLHEDTFGGHLKVGLAQIAAMDISRGNHRDNKAVIRYLPWLYHPPSAMQQGPKEFIECVSHIRLLSWLLLGSLTHNAVCPNASSPCLPIPLDAGSHVADHLIVILIGFPEQSKTSVLHMCSLFHAFIFAQLWTVYCEQSAVATNLQNQNEFSFTAILTALEFWSRVTPSILQLMAHNKVMVEMVCLHVISLMEALQECNSTIFVKLIPMWLPMIQSNIKHLSAGLQLRLQAIQNHVNHHSLRTLPGSGQSSAGLAALRKWLQCTQFKMAQVEIQSSEAASQFYPL

SEQ ID NO: 7923 - protein, 2458 aa, Homo sapiens
MISTLATFPPFLHKDIIEYLSTSFLPMAILGSSRREGVPAHVNLSASSMLMIAMQYTSNPVYHCQLLECLMKYKQEVWKDLLYVIAYGPSQVKPPAVQMLFHYWPNLKPPGAISEYRGLQYTAWNPIHCQHIECHNAINKPAVKMCIDPSLSVALGDKPPPLYLCEECSERIAGDHSEWLIDVLLPQAEISAICQKKNCSSHVRRAVVTCFSAGCCGRHGNRPVRYCKRCHSNHHSNEVGAAAETHLYQTSPPPINTRECGAEELVCAVEAVISLLKEAEFHAEQREHELNRRRQLGLSSSHHSLDNADFDNKDDDKHDQRLLSQFGIWFLVSLCTPSENTPTESLARLVAMVFQWFHSTAYMMDDEVGSLVEKLKPQFVTKWLKTVCDVRFDVMVMCLLPKPMEFARVGGYWDKSCSTVTQLKEGLNRILCLIPYNVINQSVWECIMPEWLEAIRTEVPDNQLKEFREVLSKMFDIELCPLPFSMEEMFGFISCRFTGYPSSVQEQALLWLHVLSELDIMVPLQLLISMFSDGVNSVKELANQRKSRVSELAGNLASRRVSVASDPGRRVQHNMLSPFHSPFQSPFRSPLRSPFRSPFKNFGHPGGRTIDFDCEDDEMNLNCFILMFDLLLKQMELQDDGITMGLEHSLSKDIISIINNVFQAPWGGSHTCQKDEKAIECNLCQSSILCYQLACELLERLAPKEESRLVEPTDSLEDSLLSSRPEFIIGPEGEEEENPASKHGENPGNCTEPVEHAAVKNDTERKFCYQQLPVTLRLIYTIFQEMAKFEEPDILFNMLNCLKILCLHGECLYIARKDHPQFLAYIQDHMLIASLWRVVKSEFSQLSSLAVPLLLHALSLPHGADIFWTIINGNFNSKDWKMRFEAVEKVAVICRFLDIHSVTKNHLLKYSLAHAFCCFLTAVEDVNPAVATRAGLLLDTIKRPALQGLCLCLDFQFDTVVKDRPTILSKLLLLHFLKQDIPALSWEFFVNRFETLSLEAQLHLDCNKEFPFPTTITAVRTNVANLSDAALWKIKRARFARNRQKSVRSLRDSVKGPVESKRALSLPETLTSKIRQQSPENDNTIKDLLPEDAGIDHQTVHQLITVLMKFMAKDESSAESDISSAKAFNTVKRHLYVLLGYDQQEGCFMIAPQKMRLSTCFNAFIAGIAQVMDYNINLGKHLLPLVVQVLKYCSCPQLRHYFQQPPRCSLWSLKPHIRQMWLKALLVILYKYPYRDCDISKILLHLIHITVNTLNAQYHSCKPHATAGPLYSDNSNISRYSEKEKGEIELAEYRETGALQDSLLHCVREESIPKKKLRSFKQKSLDIGNADSLLFTLDEHRRKSCIDRCDIEKPPTQAAYIAQRPNDPGRSRQNSATRPDNSEIPENPAMEGFPDARRPVIPEVRLNCMETFEVKVDSPVKPAPKEDLDLIDLSSDSTSGPEKHSILSTSDSDSLVFEPLPPLRIVESDEEEETMNQGDDGPSGKNAASSPSVPSHPSVLSLSTAPLVQVSVEDCSKDFSSKDSGNNQSAGNTDSALITLEDPMDAEGSSKPEELPEFSCGSPLTLKQKRDLLQKSFALPEMSLDDHPDPGTEGEKPGELMPSSGAKTVLLKVPEDAENPTESEKPDTSAESDTEQNPERKVEEDGAEESEFKIQIVPRQRKQRKIAVSAIQREYLDISFNILDKLGEQKDPDPSTKGLSTLEMPRESSSAPTLDAGVPETSSHSSISTQYRQMKRGSLGVLTMSQLMKRQLEHQSSAPHNISNWDTEQIQPGKRQCNVPTCLNPDLEGQPLRMRGATKSSLLSAPSIVSMFVPAPEEFTDEQPTVMTDKCHDCGAILEEYDEETLGLAIVVLSTFIHLSPDLAAPLLLDIMQSVGRLASSTTFSNQAESMMVPGNAAGVAKQFLRCIFHQLAPNGIFPQLFQSTIKDGTFLRTLASSLMDFNELSSIAALSQLLEGLNNKKNLPAGGAMIRCLENIATFMEALPMDSPSSLWTTISNQFQTFFAKLPCVLPLKCSLDSSLRIMICLLKIPSTNATRSLLEPFSKLLSFVIQNAVFTLAYLVELCGLCYRAFTKERDKFYLSRSVVLELLQALKLKSPLPDTNLLLLVQFICADAGTKLAESTILSKQMIASVPGCGTAAMECVRQYINEVLDFMADMHTLTKLKSHMKTCSQPLHEDTFGGHLKVGLAQIAAMDISRGNHRDNKAVIRYLPWLYHPPSAMQQGPKEFIECVSHIRLLSWLLLGSLTHNAVCPNASSPCLPIPLDAGSHVADHLIVILIGFPEQSKTSVLHMCSLFHAFIFAQLWTVYCEQSAVATNLQNQNEFSFTAILTALEFWSRVTPSILQLMAHNKVMVEMVCLHVISLMEALQECNSTIFVKLIPMWLPMIQSNIKHLSAGLQLRLQAIQNHVNHHSLRTLPGSGQSSAGLAALRKWLQCTQFKMAQVEIQSSEAASQFYPL

SEQ ID NO: 7924 - protein, 2657 aa, Homo sapiens
MSTKAEQFASKIRYLQEYHNRVLHNIYPVPSGTDIANTLKYFSQTLLSILSRTGKKENQDASNLTVPMTMCLFPVPFPLTPSLRPQVSSINPTVTRSLLYSVLRDAPSERGPQSRDAQLSDYPSLDYQGLYVTLVTLLDLVPLLQHGQHDLGQSIFYTTTCLLPFLNDDILSTLPYTMISTLATFPPFLHKDIIEYLSTSFLPMAILGSSRREGVPAHVNLSASSMLMIAMQYTSNPVYHCQLLECLMKYKQEVWKDLLYVIAYGPSQVKPPAVQMLFHYWPNLKPPGAISEYRGLQYTAWNPIHCQHIECHNAINKPAVKMCIDPSLSVALGDKPPPLYLCEECSERIAGDHSEWLIDVLLPQAEISAICQKKNCSSHVRRAVVTCFSAGCCGRHGNRPVRYCKRCHSNHHSNEVGAAAETHLYQTSPPPINTRECGAEELVCAVEAVISLLKEAEFHAEQREHELNRRRQLGLSSSHHSLDNADFDNKDDDKHDQRLLSQFGIWFLVSLCTPSENTPTESLARLVAMVFQWFHSTAYMMDDEVGSLVEKLKPQFVTKWLKTVCDVRFDVMVMCLLPKPMEFARVGGYWDKSCSTVTQLKEGLNRILCLIPYNVINQSVWECIMPEWLEAIRTEVPDNQLKEFREVLSKMFDIELCPLPFSMEEMFGFISCRFTGYPSSVQEQALLWLHVLSELDIMVPLQLLISMFSDGVNSVKELANQRKSRVSELAGNLASRRVSVASDPGRRVQHNMLSPFHSPFQSPFRSPLRSPFRSPFKNFGHPGGRTIDFDCEDDEMNLNCFILMFDLLLKQMELQDDGITMGLEHSLSKDIISIINNVFQAPWGGSHTCQKDEKAIECNLCQSSILCYQLACELLERLAPKEESRLVEPTDSLEDSLLSSRPEFIIGPEGEEEENPASKHGENPGNCTEPVEHAAVKNDTERKFCYQQLPVTLRLIYTIFQEMAKFEEPDILFNMLNCLKILCLHGECLYIARKDHPQFLAYIQDHMLIASLWRVVKSEFSQLSSLAVPLLLHALSLPHGADIFWTIINGNFNSKDWKMRFEAVEKVAVICRFLDIHSVTKNHLLKYSLAHAFCCFLTAVEDVNPAVATRAGLLLDTIKRPALQGLCLCLDFQFDTVVKDRPTILSKLLLLHFLKQDIPALSWEFFVNRFETLSLEAQLHLDCNKEFPFPTTITAVRTNVANLSDAALWKIKRARFARNRQKSVRSLRDSVKGPVESKRALSLPETLTSKIPMRLTRHEQSAPALGGTPEQTPGQQSPENDNTIKDLLPEDAGIDHQTVHQLITVLMKFMAKDESSAESDISSAKAFNTVKRHLYVLLGYDQQEGCFMIAPQKMRLSTCFNAFIAGIAQVMDYNINLGKHLLPLVVQVLKYCSCPQLRHYFQQPPRCSLWSLKPHIRQMWLKALLVILYKYPYRDCDISKILLHLIHITVNTLNAQYHSCKPHATAGPLYSDNSNISRYSEKEKGEIELAEYRETGALQDSLLHCVREESIPKKKLRSFKQKSLDIGNADSLLFTLDEHRRKSCIDRCDIEKPPTQAAYIAQRPNDPGRSRQNSATRPDNSEIPENPAMEGFPDARRPVIPEVRLNCMETFEVKVDSPVKPAPKEDLDLIDLSSDSTSGPEKHSILSTSDSDSLVFEPLPPLRIVESDEEEETMNQGDDGPSGKNAASSPSVPSHPSVLSLSTAPLVQVSVEDCSKDFSSKDSGNNQSAGNTDSALITLEDPMDAEGSSKPEELPEFSCGSPLTLKQKRDLLQKSFALPEMSLDDHPDPGTEGEKPGELMPSSGAKTVLLKVPEDAENPTESEKPDTSAESDTEQNPERKVEEDGAEESEFKIQIVPRQRKQRKIAVSAIQREYLDISFNILDKLGEQKDPDPSTKGLSTLEMPRESSSAPTLDAGVPETSSHSSISTQYRQMKRGSLGVLTMSQLMKRQLEHQSSAPHNISNWDTEQIQPGKRQCNVPTCLNPDLEGQPLRMRGATKSSLLSAPSIVSMFVPAPEEFTDEQPTVMTDKCHDCGAILEEYDEETLGLAIVVLSTFIHLSPDLAAPLLLDIMQSVGRLASSTTFSNQAESMMVPGNAAGVAKQFLRCIFHQLAPNGIFPQLFQSTIKDGTFLRTLASSLMDFNELSSIAALSQLLEGLNNKKNLPAGGAMIRCLENIATFMEALPMDSPSSLWTTISNQFQTFFAKLPCVLPLKCSLDSSLRIMICLLKIPSTNATRSLLEPFSKLLSFVIQNAVFTLAYLVELCGLCYRAFTKERDKFYLSRSVVLELLQALKLKSPLPDTNLLLLVQFICADAGTKLAESTILSKQMIASVPGCGTAAMECVRQYINEVLDFMADMHTLTKLKSHMKTCSQPLHEDTFGGHLKVGLAQIAAMDISRGNHRDNKAVIRYLPWLYHPPSAMQQGPKEFIECVSHIRLLSWLLLGSLTHNAVCPNASSPCLPIPLDAGSHVADHLIVILIGFPEQSKTSVLHMCSLFHAFIFAQLWTVYCEQSAVATNLQNQNEFSFTAILTALEFWSRVTPSILQLMAHNKVMVEMVCLHVISLMEALQECNSTIFVKLIPMWLPMIQSNIKHLSAGLQLRLQAIQNHVNHHSLRTLPGSGQSSAGLAALRKWLQCTQFKMAQVEIQSSEAASQFYPL

SEQ ID NO: 7925 - protein, 307 aa, Homo sapiens
MFSFNMFDHPIPRVFQNRFSTQYRCFSVSMLAGPNDRSDVEKGGKIIMPPSALDQLSRLNITYPMLFKLTNKNSDRMTHCGVLEFVADEGICYLPHWMMQNLLLEEGGLVQVESVNLQVATYSKFQPQSPDFLDITNPKAVLENALRNFACLTTGDVIAINYNEKIYELRVMETKPDKAVSIIECDMNVDFDAPLGYKEPERQVQHEESTEGEADHSGYAGELGFRAFSGSGNRLDGKKKGVEPSPSPIKPGDIKRGIPNYEFKLGKITFIRNSRPLVKKVEEDEAGGRFVAFSGEGQSLRKKGRKP

SEQ ID NO: 7926 - protein, 343 aa, Homo sapiens
MFSFNMFDHPIPRVFQNRFSTQYRCFSVSMLAGPNDRSDVEKGGKIIMPPSALDQLSRLNITYPMLFKLTNKNSDRMTHCGVLEFVADEGICYLPHWMMQNLLLEEDGLVQLETVNLQVATYSKSKFCYLPHWMMQNLLLEEGGLVQVESVNLQVATYSKFQPQSPDFLDITNPKAVLENALRNFACLTTGDVIAINYNEKIYELRVMETKPDKAVSIIECDMNVDFDAPLGYKEPERQVQHEESTEGEADHSGYAGELGFRAFSGSGNRLDGKKKGVEPSPSPIKPGDIKRGIPNYEFKLGKITFIRNSRPLVKKVEEDEAGGRFVAFSGEGQSLRKKGRKP

SEQ ID NO: 7927 - protein, 266 aa, Homo sapiens
MFSFNMFDHPIPRVFQNRFSTQYRCFSVSMLAGPNDRSDVEKGGKIIMPPSALDQLSRLNITYPMLFKLTNKNSDRMTHCGVLEFVADEGICYLPHWMMQNLLLEEGGLVQVESVNLQVATYSKFQPQSPDFLDITNPKAVLENALRNFACLTTGDVIAINYNEKIYELRVMETKPDKAVSIIECDMNVDFDAPLGYKEPERQVQHEESTEGEADHSGYAGELGFRAFSGSGNRLDGKKKGVEPSPSPIKPGDIKRGIPNYEFKLG

SEQ ID NO: 7928 - protein, 785 aa, Homo sapiens
MPGVIPSESNGLSRGSPSKKNRLSLKFFQKKETKRALDFTDSQENEEKASEYRASEIDQVVPAAQSSPINCEKRENLLPFVGLNNLGNTCYLNSILQVLYFCPGFKSGVKHLFNIISRKKEALKDEANQKDKGNCKEDSLASYELICSLQSLIISVEQLQASFLLNPEKYTDELATQPRRLLNTLRELNPMYEGYLQHDAQEVLQCILGNIQETCQLLKKEEVKNVAELPTKVEEIPHPKEEMNGINSIEMDSMRHSEDFKEKLPKGNGKRKSDTEFGNMKKKVKLSKEHQSLEENQRQTRSKRKATSDTLESPPKIIPKYISENESPRPSQKKSRVKINWLKSATKQPSILSKFCSLGKITTNQGVKGQSKENECDPEEDLGKCESDNTTNGCGLESPGNTVTPVNVNEVKPINKGEEQIGFELVEKLFQGQLVLRTRCLECESLTERREDFQDISVPVQEDELSKVEESSEISPEPKTEMKTLRWAISQFASVERIVGEDKYFCENCHHYTEAERSLLFDKMPEVITIHLKCFAASGLEFDCYGGGLSKINTPLLTPLKLSLEEWSTKPTNDSYGLFAVVMHSGITISSGHYTASVKVTDLNSLELDKGNFVVDQMCEIGKPEPLNEEEARGVVENYNDEEVSIRVGGNTQPSKVLNKKNVEAIGLLGGQKSKADYELYNKASNPDKVASTAFAENRNSETSDTTGTHESDRNKESSDQTGINISGFENKISYVVQSLKEYEGKWLLFDDSEVKVTEEKDFLNSLSPSTSPTSTPYLLFYKKL

SEQ ID NO: 7929 - protein, 334 aa, Homo sapiens
MAAAASPAFLLRLPLLLLLSSWCRTGLADPHSLCYDITVIPKFRPGPRWCAVQGQVDEKTFLHYDCGSKTVTPVSPLGKKLNVTTAWKAQNPVLREVVDILTEQLLDIQLENYIPKEPLTLQARMSCEQKAEGHGSGSWQLSFDGQIFLLFDSENRMWTTVHPGARKMKEKWENDKDMTMSFHYISMGDCTGWLEDFLMGMDSTLEPSAGAPPTMSSGTAQPRATATTLILCCLLIMCLLICSRHSLTQSHGHHPQSLQPPPHPPLLHPTWLLRRVLWSDSYQIAKRPLSGGHVTRVTLPIIGDDSHSLPCPLALYTINNGAARYSEPLQVSIS

SEQ ID NO: 7930 - protein, 213 aa, Homo sapiens
MAAAASPAFLLRLPLLLLLSSWCRTGLADPHSLCYDITVIPKFRPGPRWCAVQGQVDEKTFLHYDCGSKTVTPVSPLGKKLNVTTAWKAQNPVLREVVDILTEQLLDIQLENYIPKEPLTLQARMSCEQKAEGHGSGSWQLSFDGQIFLLFDSENRMWTTVHPGARKMKEKWENDKDMTMSFHYISMGDCTGWLEDFLMGMDSTLEPSAGGTV

SEQ ID NO: 7931 - protein, 176 aa, Homo sapiens
MAAAASPAFLLRLPLLLLLSSWCRTGLADPHSLCYDITVIPKFRPGPRWCAVQGQVDEKTFLHYDCGSKTVTPVSPLGKKLNVTTAWKAQNPVLREVVDILTEQLLDIQLENYIPKENRMWTTVHPGARKMKEKWENDKDMTMSFHYISMGDCTGWLEDFLMGMDSTLEPSAGAPP

SEQ ID NO: 7932 - protein, 1073 aa, Homo sapiens
MAWVKFLRKPGGNLGKVYQPGSMLSLAPTKGLLNEPGQNSCFLNSAVQVLWQLDIFRRSLRVLTGHVCQGDACIFCALKTIFAQFQHSREKALPSDNIRHALAESFKDEQRFQLGLMDDAAECFENMLERIHFHIVPSRDADMCTSKSCITHQKFAMTLYEQCVCRSCGASSDPLPFTEFVRYISTTALCNEVERMLERHERFKPEMFAELLQAANTTDDYRKCPSNCGQKIKIRRVLMNCPEIVTIGLVWDSEHSDLTEAVVRNLATHLYLPGLFYRVTDENAKNSELNLVGMICYTSQHYCAFAFHTKSSKWVFFDDANVKEIGTRWKDVVSKCIRCHFQPLLLFYANPDGTAVSTEDALRQVISWSHYKSVAENMGCEKPVIHKSDNLKENGFGDQAKQRENQKFPTDNISSSNRSHSHTGVGKGPAKLSHIDQREKIKDISRECALKAIEQKNLLSSQRKDLEKGQRKDLGRHRDLVDEDLSHFQSGSPPAPNGFKQHGNPHLYHSQGKGSYKHDRVVPQSRASAQIISSSKSQILAPGEKITGKVKSDNGTGYDTDSSQDSRDRGNSCDSSSKSRNRGWKPMRETLNVDSIFSESEKRQHSPRHKPNISNKPKSSKDPSFSNWPKENPKQKGLMTIYEDEMKQEIGSRSSLESNGKGAEKNKGLVEGKVHGDNWQMQRTESGYESSDHISNGSTNLDSPVIDGNGTVMDISGVKETVCFSDQITTSNLNKERGDCTSLQSQHHLEGFRKELRNLEAGYKSHEFHPESHLQIKNHLIKRSHVHEDNGKLFPSSSLQIPKDHNAREHIHQSDEQKLEKPNECKFSEWLNIENSERTGLPFHVDNSASGKRVNSNEPSSLWSSHLRTVGLKPETAPLIQQQNIMDQCYFENSLSTECIIRSASRSDGCQMPKLFCQNLPPPLPPKKYAITSVPQSEKSESTPDVKLTEVFKATSHLPKHSLSTASEPSLEVSTHMNDERHKETFQVRECFGNTPNCPSSSSTNDFQANSGAIDAFCQPELDSISTCPNETVSLTTYFSVDSCMTDTYRLKYHQRPKLSFPESSGFCNNSLS

SEQ ID NO: 7933 - protein, 313 aa, Homo sapiens
MIGQKTLYSFFSPSPARKRHAPSPEPAVQGTGVAGVPEESGDAAAIPAKKAPAGQEEPGTPPSSPLSAEQLDRIQRNKAAALLRLAARNVPVGFGESWKKHLSGEFGKPYFIKLMGFVAEERKHYTVYPPPHQVFTWTQMCDIKDVKVVILGQDPYHGPNQAHGLCFSVQRPVPPPPSLENIYKELSTDIEDFVHPGHGDLSGWAKQGVLLLNAVLTVRAHQANSHKERGWEQFTDAVVSWLNQNSNGLVFLLWGSYAQKKGSAIDRKRHHVLQTAHPSPLSVYRGFFGCRHFSKTNELLQKSGKKPIDWKEL

SEQ ID NO: 7934 - protein, 304 aa, Homo sapiens
MGVFCLGPWGLGRKLRTPGKGPLQLLSRLCGDHLQAIPAKKAPAGQEEPGTPPSSPLSAEQLDRIQRNKAAALLRLAARNVPVGFGESWKKHLSGEFGKPYFIKLMGFVAEERKHYTVYPPPHQVFTWTQMCDIKDVKVVILGQDPYHGPNQAHGLCFSVQRPVPPPPSLENIYKELSTDIEDFVHPGHGDLSGWAKQGVLLLNAVLTVRAHQANSHKERGWEQFTDAVVSWLNQNSNGLVFLLWGSYAQKKGSAIDRKRHHVLQTAHPSPLSVYRGFFGCRHFSKTNELLQKSGKKPIDWKEL

SEQ ID NO: 7935 - protein, 461 aa, Homo sapiens
MNDQYHRAARDGYLELLKEATRKELNAPDEDGMTPTLWAAYHGNLESLRLIVSRGGDPDKCDIWGNTPLHLAASNGHLHCLSFLVSFGANIWCLDNDYHTPLDMAAMKGHMECVRYLDSIAAKQSSLNPKLVGKLKDKAFREAERRIRECAKLQRRHHERMERRYRRELAERSDTLSFSSLTSSTLSRRLQHLALGSHLPYSQATLHGTARGKTKMQKKLERRKQGGEGTFKVSEDGRKSARSLSGLQLGSDVMFVRQGTYANPKEWGRAPLRDMFLSDEDSVSRATLAAEPAHSEVSTDSGHDSLFTRPGLGTMVFRRNYLSSGLHGLGREDGGLDGVGAPRGRLQSSPSLDDDSLGSANSLQDRSCGEELPWDELDLGLDEDLEPETSPLETFLASLHMEDFAALLRQEKIDLEALMLCSDLDLRSISVPLGPRKKILGAVRRRRQAMERPPALEDTEL

SEQ ID NO: 7936 - protein, 365 aa, Homo sapiens
MPGGKKVAGGGSSGATPTSAAATAPSGVRRLETSEGTSAQRDEEPEEEGEEDLRDGGVPFFVNRGGLPVDEATWERMWKHVAKIHPDGEKVAQRIRGATDLPKIPIPSVPTFQPSTPVPERLEAVQRYIRELQYNHTGTQFFEIKKSRPLTGLMDLAKEMTKEALPIKCLEAVILGIYLTNSMPTLERFPISFKTYFSGNYFRHIVLGVNFAGRYGALGMSRREDLMYKPPAFRTLSELVLDFEAAYGRCWHVLKKVKLGQSVSHDPHSVEQIEWKHSVLDVERLGRDDFRKELERHARDMRLKIGKGTGPPSPTKDRKKDVSSPQRAQSSPHRRNSRSERRPSGDKKTSEPKAMPDLNGYQIRV

SEQ ID NO: 7937 - protein, 204 aa, Homo sapiens
MPGGKKVAGGGSSGATPTSAAATAPSGVRRLETSEGTSAQRDEEPEEEGEEDLRDGGVPFFVNRGGLPVDEATWERMWKHVAKIHPDGEKVAQRIRGATDLPKIPIPSVPTFQPSTPVPERLEAVQRYIRELQYNHTGTQFFEIKKSRPLTGLMDLAKEMTKEALPIKCLEAVILGMYPSSPEGEGSGLLWASASCSESEGGVG

SEQ ID NO: 7938 - protein, 782 aa, Homo sapiens
MAAAAAAGPSPGSGPGDSPEGPEGEAPERRRKAHGMLKLYYGLSEGEAAGRPAGPDPLDPTDLNGAHFDPEVYLDKLRRECPLAQLMDSETDMVRQIRALDSDMQTLVYENYNKFISATDTIRKMKNDFRKMEDEMDRLATNMAVITDFSARISATLQDRHERITKLAGVHALLRKLQFLFELPSRLTKCVELGAYGQAVRYQGRAQAVLQQYQHLPSFRAIQDDCQVITARLAQQLRQRFREGGSGAPEQAECVELLLALGEPAEELCEEFLAHARGRLEKELRNLEAELGPSPPAPDVLEFTDHGGSGFVGGLCQVAAAYQELFAAQGPAGAEKLAAFARQLGSRYFALVERRLAQEQGGGDNSLLVRALDRFHRRLRAPGALLAAAGLADAATEIVERVARERLGHHLQGLRAAFLGCLTDVRQALAAPRVAGKEGPGLAELLANVASSILSHIKASLAAVHLFTAKEVSFSNKPYFRGEFCSQGVREGLIVGFVHSMCQTAQSFCDSPGEKGGATPPALLLLLSRLCLDYETATISYILTLTDEQFLVQDQFPVTPVSTLCAEARETARRLLTHYVKVQGLVISQMLRKSVETRDWLSTLEPRNVRAVMKRVVEDTTAIDVQVGLLYEEGVRKAQSSDSSKRTFSVYSSSRQQGRYAPSYTPSAPMDTNLLSNIQKLFSERIDVFSPVEFNKVSVLTGIIKISLKTLLECVRLRTFGRFGLQQVQVDCHFLQLYLWRFVADEELVHLLLDEVVASAALRCPDPVPMEPSVVEVICERG

SEQ ID NO: 7939 - protein, 658 aa, Homo sapiens
MKNDFRKMEDEMDRLATNMAVITDFSARISATLQDRHERITKLAGVHALLRKLQFLFELPSRLTKCVELGAYGQAVRYQGRAQAVLQQYQHLPSFRAIQDDCQVITARLAQQLRQRFREGGSGAPEQAECVELLLALGEPAEELCEEFLAHARGRLEKELRNLEAELGPSPPAPDVLEFTDHGGSGFVGGLCQVAAAYQELFAAQGPAGAEKLAAFARQLGSRYFALVERRLAQEQGGGDNSLLVRALDRFHRRLRAPGALLAAAGLADAATEIVERVARERLGHHLQGLRAAFLGCLTDVRQALAAPRVAGKEGPGLAELLANVASSILSHIKASLAAVHLFTAKEVSFSNKPYFRGEFCSQGVREGLIVGFVHSMCQTAQSFCDSPGEKGGATPPALLLLLSRLCLDYETATISYILTLTDEQFLVQDQFPVTPVSTLCAEARETARRLLTHYVKVQGLVISQMLRKSVETRDWLSTLEPRNVRAVMKRVVEDTTAIDVQVGLLYEEGVRKAQSSDSSKRTFSVYSSSRQQGRYAPSYTPSAPMDTNLLSNIQKLFSERIDVFSPVEFNKVSVLTGIIKISLKTLLECVRLRTFGRFGLQQVQVDCHFLQLYLWRFVADEELVHLLLDEVVASAALRCPDPVPMEPSVVEVICERG

SEQ ID NO: 7940 - protein, 422 aa, Homo sapiens
MEFPEHGGRLLGRLRQQRELGFLCDCTVLVGDARFPAHRAVLAACSVYFHLFYRDRPAGSRDTVRLNGDIVTAPAFGRLLDFMYEGRLDLRSLPVEDVLAAASYLHMYDIVKVCKGRLQEKDRSLDPGNPAPGAEPAQPPCPWPVWTADLCPAARKAKLPPFGVKAALPPRASGPPPCQVPEESDQALDLSLKSGPRQERVHPPCVLQTPLCSQRQPGAQPLVKDERDSLSEQEESSSSRSPHSPPKPPPVPAAKGLVVGLQPLPLSGEGSRELELGAGRLASEDELGPGGPLCICPLCSKLFPSSHVLQLHLSAHFRERDSTRARLSPDGVAPTCPLCGKTFSCTYTLKRHERTHSGEKPYTCVQCGKSFQYSHNLSRHTVVHTREKPHACRWCERRFTQSGDLYRHVRKFHCGLVKSLLV

SEQ ID NO: 7941 - protein, 579 aa, Homo sapiens
MNKSQEQVSFKDVCVDFTQEEWYLLDPAQKILYRDVILENYSNLVSVGYCITKPEVIFKIEQGEEPWILEKGFPSQCHPERKWKVDDVLESSQENEDDHFWELLFHNNKTVSVENGDRGSKTFNLGTDPVSLRNYPYKICDSCEMNLKNISGLIISKKNCSRKKPDEFNVCEKLLLDIRHEKIPIGEKSYKYDQKRNAINYHQDLSQPSFGQSFEYSKNGQGFHDEAAFFTNKRSQIGETVCKYNECGRTFIESLKLNISQRPHLEMEPYGCSICGKSFCMNLRFGHQRALTKDNPYEYNEYGEIFCDNSAFIIHQGAYTRKILREYKVSDKTWEKSALLKHQIVHMGGKSYDYNENGSNFSKKSHLTQLRRAHTGEKTFECGECGKTFWEKSNLTQHQRTHTGEKPYECTECGKAFCQKPHLTNHQRTHTGEKPYECKQCGKTFCVKSNLTEHQRTHTGEKPYECNACGKSFCHRSALTVHQRTHTGEKPFICNECGKSFCVKSNLIVHQRTHTGEKPYKCNECGKTFCEKSALTKHQRTHTGEKPYECNACGKTFSQRSVLTKHQRIHTRVKALSTS

SEQ ID NO: 7942 - protein, 119 aa, Homo sapiens
MNKSQEQVSFKDVCVDFTQEEWYLLDPAQKILYRDVILENYSNLVSVGYCITKPEVIFKIEQGEEPWILEKGFPSQCHPERKWKVDDVLESSQENEDDHFWELLFHNNKTWNLKLIKVE

SEQ ID NO: 7943 - protein, 629 aa, Homo sapiens
MTLLTFRDVAIEFSLEEWKCLDLAQQNLYRDVMLENYRNLFSVGLTVCKPGLITCLEQRKEPWNVKRQEAADGHPEMGFHHATQACLELLGSSDLPASASQSAGITGVNHRAQPGLNVSVDKFTALCSPGVLQTVKWFLEFRCIFSLAMSSHFTQDLLPEQGIQDAFPKRILRGYGNCGLDNLYLRKDWESLDECKLQKDYNGLNQCSSTTHSKIFQYNKYVKIFDNFSNLHRRNISNTGEKPFKCQECGKSFQMLSFLTEHQKIHTGKKFQKCGECGKTFIQCSHFTEPENIDTGEKPYKCQECNNVIKTCSVLTKNRIYAGGEHYRCEEFGKVFNQCSHLTEHEHGTEEKPCKYEECSSVFISCSSLSNQQMILAGEKLSKCETWYKGFNHSPNPSKHQRNEIGGKPFKCEECDSIFKWFSDLTKHKRIHTGEKPYKCDECGKAYTQSSHLSEHRRIHTGEKPYQCEECGKVFRTCSSLSNHKRTHSEEKPYTCEECGNIFKQLSDLTKHKKTHTGEKPYKCDECGKNFTQSSNLIVHKRIHTGEKPYKCEECGRVFMWFSDITKHKKTHTGEKPYKCDECGKNFTQSSNLIVHKRIHTGEKPYKCEKCGKAFTQFSHLTVHESIHT

SEQ ID NO: 7944 - protein, 557 aa, Homo sapiens
MTLLTFRDVAIEFSLEEWKCLDLAQQNLYRDVMLENYRNLFSVGLTVCKPGLITCLEQRKEPWNVKRQEAADGHPAMSSHFTQDLLPEQGIQDAFPKRILRGYGNCGLDNLYLRKDWESLDECKLQKDYNGLNQCSSTTHSKIFQYNKYVKIFDNFSNLHRRNISNTGEKPFKCQECGKSFQMLSFLTEHQKIHTGKKFQKCGECGKTFIQCSHFTEPENIDTGEKPYKCQECNNVIKTCSVLTKNRIYAGGEHYRCEEFGKVFNQCSHLTEHEHGTEEKPCKYEECSSVFISCSSLSNQQMILAGEKLSKCETWYKGFNHSPNPSKHQRNEIGGKPFKCEECDSIFKWFSDLTKHKRIHTGEKPYKCDECGKAYTQSSHLSEHRRIHTGEKPYQCEECGKVFRTCSSLSNHKRTHSEEKPYTCEECGNIFKQLSDLTKHKKTHTGEKPYKCDECGKNFTQSSNLIVHKRIHTGEKPYKCEECGRVFMWFSDITKHKKTHTGEKPYKCDECGKNFTQSSNLIVHKRIHTGEKPYKCEKCGKAFTQFSHLTVHESIHT

SEQ ID NO: 7945 - protein, 606 aa, Homo sapiens
MTLLTFRDVAIEFSLEEWKCLDLAQQNLYRDVMLENYRNLFSVGLTVCKPGLITCLEQRKEPWNVKRQEAADGHPEMGFHHATQACLELLGSSDLPASASQSAGITGVNHRAQPGLNVSVDKFTAMSSHFTQDLLPEQGIQDAFPKRILRGYGNCGLDNLYLRKDWESLDECKLQKDYNGLNQCSSTTHSKIFQYNKYVKIFDNFSNLHRRNISNTGEKPFKCQECGKSFQMLSFLTEHQKIHTGKKFQKCGECGKTFIQCSHFTEPENIDTGEKPYKCQECNNVIKTCSVLTKNRIYAGGEHYRCEEFGKVFNQCSHLTEHEHGTEEKPCKYEECSSVFISCSSLSNQQMILAGEKLSKCETWYKGFNHSPNPSKHQRNEIGGKPFKCEECDSIFKWFSDLTKHKRIHTGEKPYKCDECGKAYTQSSHLSEHRRIHTGEKPYQCEECGKVFRTCSSLSNHKRTHSEEKPYTCEECGNIFKQLSDLTKHKKTHTGEKPYKCDECGKNFTQSSNLIVHKRIHTGEKPYKCEECGRVFMWFSDITKHKKTHTGEKPYKCDECGKNFTQSSNLIVHKRIHTGEKPYKCEKCGKAFTQFSHLTVHESIHT

SEQ ID NO: 7946 - protein, 610 aa, Homo sapiens
MAGAQTLLTFRDVAIEFSLEEWKCLDLAQQNLYRDVMLENYRNLFSVGLTVCKPGLITCLEQRKEPWNVKRQEAADGHPEMGFHHATQACLELLGSSDLPASASQSAGITGVNHRAQPGLNVSVDKFTAMSSHFTQDLLPEQGIQDAFPKRILRGYGNCGLDNLYLRKDWESLDECKLQKDYNGLNQCSSTTHSKIFQYNKYVKIFDNFSNLHRRNISNTGEKPFKCQECGKSFQMLSFLTEHQKIHTGKKFQKCGECGKTFIQCSHFTEPENIDTGEKPYKCQECNNVIKTCSVLTKNRIYAGGEHYRCEEFGKVFNQCSHLTEHEHGTEEKPCKYEECSSVFISCSSLSNQQMILAGEKLSKCETWYKGFNHSPNPSKHQRNEIGGKPFKCEECDSIFKWFSDLTKHKRIHTGEKPYKCDECGKAYTQSSHLSEHRRIHTGEKPYQCEECGKVFRTCSSLSNHKRTHSEEKPYTCEECGNIFKQLSDLTKHKKTHTGEKPYKCDECGKNFTQSSNLIVHKRIHTGEKPYKCEECGRVFMWFSDITKHKKTHTGEKPYKCDECGKNFTQSSNLIVHKRIHTGEKPYKCEKCGKAFTQFSHLTVHESIHT

SEQ ID NO: 7947 - protein, 561 aa, Homo sapiens
MAGAQTLLTFRDVAIEFSLEEWKCLDLAQQNLYRDVMLENYRNLFSVGLTVCKPGLITCLEQRKEPWNVKRQEAADGHPAMSSHFTQDLLPEQGIQDAFPKRILRGYGNCGLDNLYLRKDWESLDECKLQKDYNGLNQCSSTTHSKIFQYNKYVKIFDNFSNLHRRNISNTGEKPFKCQECGKSFQMLSFLTEHQKIHTGKKFQKCGECGKTFIQCSHFTEPENIDTGEKPYKCQECNNVIKTCSVLTKNRIYAGGEHYRCEEFGKVFNQCSHLTEHEHGTEEKPCKYEECSSVFISCSSLSNQQMILAGEKLSKCETWYKGFNHSPNPSKHQRNEIGGKPFKCEECDSIFKWFSDLTKHKRIHTGEKPYKCDECGKAYTQSSHLSEHRRIHTGEKPYQCEECGKVFRTCSSLSNHKRTHSEEKPYTCEECGNIFKQLSDLTKHKKTHTGEKPYKCDECGKNFTQSSNLIVHKRIHTGEKPYKCEECGRVFMWFSDITKHKKTHTGEKPYKCDECGKNFTQSSNLIVHKRIHTGEKPYKCEKCGKAFTQFSHLTVHESIHT

SEQ ID NO: 7948 - protein, 90 aa, Homo sapiens
MAGAQTLLTFRDVAIEFSLEEWKCLDLAQQNLYRDVMLENYRNLFSVGLTVCKPGLITCLEQRKEPWNVKRQEAADGHPGIFFVVTMEII

SEQ ID NO: 7949 - protein, 121 aa, Homo sapiens
MEISCTSQGFFFLKEHSSGVSSVKAAQMPGRTLYRSLCSCVFPLHSPTRPPSPASAPKGFLLLSPTSSNASKLMPYYLFHRSRGVDNSKISVLILLGCELEQTKKKKLGPATALGNSGRVE

SEQ ID NO: 7950 - protein, 300 aa, Homo sapiens
MAEPTVCSFLTKVLCAHGGRMFLKDLRGHVELSEARLRDVLQRAGPERFLLQEVETQEGLGDAEAEAAAGAVGGGGTSAWRVVAVSSVRLCARYQRGECQACDQLHFCRRHMLGKCPNRDCWSTCTLSHDIHTPVNMQVLKSHGLFGLNENQLRILLLQNDPCLLPEVCLLYNKGEALYGYCNLKDKCNKFHVCKSFVKGECKLQTCKRSHQLIHAASLKLLQDQGLNIPSVVNFQIISTYKHMKLHKMLENTDNSSPSTEHSQGLEKQGVHAAGAAEAGPLASVPAQSAKKPCPVSCEK

SEQ ID NO: 7951 - protein, 102 aa, Homo sapiens
MAEPTVCSFLTKVLCAHGGRMFLKDLRGHVELSEARLRDVLQRAGPERFLLQEVETQEGLGDAEAEAAAGAVGGGGTSAWRVVAVSGTIGACHHTQLIFLGF

SEQ ID NO: 7952 - protein, 472 aa, Homo sapiens
MNNSQGRVTFEDVTVNFTQGEWQRLNPEQRNLYRDVMLENYSNLVSVGQGETTKPDVILRLEQGKEPWLEEEEVLGSGRAEKNGDIGGQIWKPKDVKESLAREVPSINKETLTTQKGVECDGSKKILPLGIDDVSSLQHYVQNNSHDDNGYRKLVGNNPSKFVGQQLKCNACRKLFSSKSRLQSHLRRHACQKPFECHSCGRAFGEKWKLDKHQKTHAEERPYKCENCGNAYKQKSNLFQHQKMHTKEKPYQCKTCGKAFSWKSSCINHEKIHNAKKSYQCNECEKSFRQNSTLIQHKKVHTGQKPFQCTDCGKAFIYKSDLVKHQRIHTGEKPYKCSICEKAFSQKSNVIDHEKIHTGKRAYECDLCGNTFIQKKNLIQHKKIHTGEKPYECNRCGKAFFQKSNLHSHQKTHSGERTYRCSECGKTFIRKLNLSLHKKTHTGQKPYGCSECGKAFADRSYLVRHQKRIHSR

SEQ ID NO: 7953 - protein, 595 aa, Homo sapiens
MDPVAFKDVAVNFTQEEWALLDISQRKLYREVMLETFRNLTSLGKRWKDQNIEYEHQNPRRNFRSLIEEKVNEIKDDSHCGETFTPVPDDRLNFQEKKASPEVKSCESFVCGEVGLGNSSFNMNIRGDIGHKAYEYQEYGPKPCKCQQPKKAFRYRPSFRTQERDHTGEKPNACKVCGKTFISHSSVRRHMVMHSGDGPYKCKFCGKAFHCLRLYLIHERIHTGEKPCECKQCGKSFSYSATHRIHKRTHTGEKPYEYQECGKAFHSPRSYRRHERIHMGEKAYQCKECGKAFTCPRYVRIHERTHSRKNLYECKQCGKALSSLTSFQTHVRLHSGERPYECKICGKDFCSVNSFQRHEKIHSGEKPYKCKQCGKAFPHSSSLRYHERTHTGEKPYECKQCGKAFRSASHLRVHGRTHTGEKPYECKECGKAFRYVNNLQSHERTQTHIRIHSGERRYKCKICGKGFYCPKSFQRHEKTHTGEKLYECKQRSVVPSVVPVPFDIMKGLTLERSPINASNVGKPSELCQSFECMVGLTLKRNPMSVSNDGKPSDLPHTFEYVVGHTMERSPMHVRNVGNPSDLPRTFEFMKGHKHT

SEQ ID NO: 7954 - protein, 273 aa, Homo sapiens
MFGFPTATLLDCHGRYAQNVAFFNVMTEAHHKYDHSEATGSSSWDIQNSFRREKLEQKSPDSKTLQEDSPGVRQRVYECQECGKSFRQKGSLTLHERIHTGQKPFECTHCGKSFRAKGNLVTHQRIHTGEKPYQCKECGKSFSQRGSLAVHERLHTGQKPYECAICQRSFRNQSNLAVHRRVHSGEKPYRCDQCGKAFSQKGSLIVHIRVHTGLKPYACTQCRKSFHTRGNCILHGKIHTGETPYLCGQCGKSFTQRGSLAVHQRSCSQRLTL

SEQ ID NO: 7955 - protein, 170 aa, Homo sapiens
MEDPNPEENMKQQDSPKERSPQSPGGNICHLGAPKCTRCLITFADSKFQERHMKREHPADFVAQKLQGVLFICFTCARSFPSSKALITHQRSHGPAAKPTLPVATTTAQPTFPCPDCGKTFGQAVSLRRHRQMHEVRAPPGTFACTECGQDFAQEAGLHQHYIRHARGEL

SEQ ID NO: 7956 - protein, 45 aa, Homo sapiens
MEGGMAAYPVATRESRCRRGRIGVQPSPERRSEVVGPFPLARSLS

SEQ ID NO: 7957 - protein, 693 aa, Homo sapiens
MIAPLLCILSYNFNTFAILNVYSKLTMFCTTNSLPMDLLLKQGSLKQEVESFCYQIVSESNDQKVGILQSEDKQLQPSVSKKSEGELSRVKFISNSNKITFSKKPKRRKYDESYLSFGFTYFGNRDAPHAQCVLCKKILSNSSLAPSKLRRHLETKHAAYKDKDISFFKQHLDSPENNKPPTPKIVNTDNESATEASYNVSYHIALSGEAHTIGELLIKPCAKDVVMRMFDEQYSKKIDAVQLSNSTVARRIKDLAADIEEELVCRLKICDGFSLQLDESADVSGLAVLLVFVRYRFNKSIEEDLLLCESLQSNATGEEIFNCINSFMQKHEIEWEKCVDVCSDASRAVDGKIAEAVTLIKYVAPESTSSHCLLYRHALAVKIMPTSLKNVLDQAVQIINYIKARPHQSRLLKILCEEMGAQHTALLLNTEVRWLSRGKVLVRLFELRRELLVFMDSAFRLSDCLTNSSWLLRLAYLADIFTKLNEVNLSMQGKNVTVFTVFDKMSSLLRKLEFWASSVEEENFDCFPTLSDFLTEINSTVDKDICSAIVQHLRGLRATLLKYFPVTNDNNAWVRNPFTVTVKPASLVARDYESLIDLTSDSQVKQNFSELSLNDFWSSLIQEYPSIARRAVRVLLPFATMHLCETGFSYYAATKTKYRKRLDAAPHMRIRLSNITPNIKRICDKKTQKHCSH

SEQ ID NO: 7958 - protein, 485 aa, Homo sapiens
MNEYPKKRKRKTLHPSRYSDSSGISRIADGFNGIFSDHCYSVCSMRQPDLKYFDNKDDDSDTETSNDLPKFADGIKARNRNQNYLVPSPVLRILDHTAFSTEKSADIVICDEECDSPESVNQQTQEESPIEVHTAEDVPIAVEVHAISEDYDIETENNSSESLQDQTDEEPPAKLCKILDKSQALNVTAQQKWPLLRANSSGLYKCELCEFNSKYFSDLKQHMILKHKRTDSNVCRVCKESFSTNMLLIEHAKLHEEDPYICKYCDYKTVIFENLSQHIADTHFSDHLYWCEQCDVQFSSSSELYLHFQEHSCDEQYLCQFCEHETNDPEDLHSHVVNEHACKLIELSDKYNNGEHGQYSLLSKITFDKCKNFFVCQVCGFRSRLHTNVNRHVAIEHTKIFPHVCDDCGKGFSSMLEYCKHLNSHLSEGIYLCQYCEYSTGQIEDLKIHLDFKHSADLPHKCSDCLMRFGNERELISHLPVHETT

SEQ ID NO: 7959 - protein, 351 aa, Homo sapiens
MSGHPGSWEMNSVAFEDVAVNFTQEEWALLDPSQKNLYRDVMQETFRNLASIGNKGEDQSIEDQYKNSSRNLRHIISHSGNNPYGCEECGKKPCTCKQCQKTSLSVTRVHRDTVMHTGNGHYGCTICEKVFNIPSSFQIHQRNHTGEKPYECMECGKALGFSRSLNRHKRIHTGEKRYECKQCGKAFSRSSHLRDHERTHTGEKPYECKHCGKAFRYSNCLHYHERTHTGEKPYVCMECGKAFSCLSSLQGHIKAHAGEEPYPCKQCGKAFRYASSLQKHEKTHIAQKPYVCNNCGKGFRCSSSLRDHERTHTGEKPYECQKCGKAFSRASTLWKHKKTHTGEKPYKCKKM

SEQ ID NO: 7960 - protein, 289 aa, Homo sapiens
MSGHPGSWEMNSVAFEDVAVNFTQEEWALLDPSQKNLYRDVMQETFRNLASIGNKGEDQSIEDQYKNSSRNLSSFQIHQRNHTGEKPYECMECGKALGFSRSLNRHKRIHTGEKRYECKQCGKAFSRSSHLRDHERTHTGEKPYECKHCGKAFRYSNCLHYHERTHTGEKPYVCMECGKAFSCLSSLQGHIKAHAGEEPYPCKQCGKAFRYASSLQKHEKTHIAQKPYVCNNCGKGFRCSSSLRDHERTHTGEKPYECQKCGKAFSRASTLWKHKKTHTGEKPYKCKKM

SEQ ID NO: 7961 - protein, 296 aa, Homo sapiens
MNALCVKNSSYVHSSLHRHIISHSGNNPYGCEECGKKPCTCKQCQKTSLSVTRVHRDTVMHTGNGHYGCTICEKVFNIPSSFQIHQRNHTGEKPYECMECGKALGFSRSLNRHKRIHTGEKRYECKQCGKAFSRSSHLRDHERTHTGEKPYECKHCGKAFRYSNCLHYHERTHTGEKPYVCMECGKAFSCLSSLQGHIKAHAGEEPYPCKQCGKAFRYASSLQKHEKTHIAQKPYVCNNCGKGFRCSSSLRDHERTHTGEKPYECQKCGKAFSRASTLWKHKKTHTGEKPYKCKKM

SEQ ID NO: 7962 - protein, 156 aa, Homo sapiens
MNALCVKNSSYVHSSLHRHIISHSGNNPYGCEECGKKPCTCKQCQKTSLSVTRVHRDTVMHTGNGHYGCTICEKVFNIPSSFQIHQRNHTGEKPYECMECGKALGFSRSLNRHKRIHTGEKRYECKQCGKAFSRASTLWKHKKTHTGEKPYKCKKM

SEQ ID NO: 7963 - protein, 73 aa, Homo sapiens
MSGHPGSWEMNSVAFEDVAVNFTQEEWALLDPSQKNLYRDVMQETFRNLASIGNKGEDQSIEDQYKNSSRNLR

SEQ ID NO: 7964 - protein, 1059 aa, Homo sapiens
MSGVMVGSHADMAPASTAEGAGEKPGPAAPAPAAQYECGECGKSFRWSSRLLHHQRTHTGERPYKCPDCPKAFKGSSALLYHQRGHTGERPYQCPDCPKAFKRSSLLQIHRSVHTGLRAFICGQCGLAFKWSSHYQYHLRQHTGERPYPCPDCPKAFKNSSSLRRHRHVHTGERPYTCGVCGKSFTQSTNLRQHQRVHTGERPFRCPLCPKTFTHSSNLLLHQRTHGAAPAPGTASAAPPPQSREPGKVFVCDAYLQRHLQPHSPPAPPAPPPPPPPVVPELFLAAAETTVELVYRCDGCEQGFSSEELLLEHQPCPGPDAAPQPQEAPAEAPKADQPPSPLPQPPPPAAAPAPGFACLPCGKSFRTVAGLSRHQHSHGAAGGQAFRCGSCDGSFPQLASLLAHQQCHVEEAAAGRPPPQAEAAEVTCPQEPLAPAAPVPPPPPSAPASAERPYKCAECGKSFKGSSGLRYHLRDHTGERPYQCGECGKAFKRSSLLAIHQRVHTGLRAFTCGQCGLTFKWSSHYQYHLRLHSGERPYACGECGKAFRNTSCLRRHRHVHTGERPHACGVCGKSFAQTSNLRQHQRVHTGERPFRCPLCPKTFTHSSNLLLHQRTHSAERPFTCPICGRGFVMAAYLQRHLRTHAPANTPPSTTAPAAGPQPPAPLAAARAPPATQDVHVLPHLQATLSLEVAGGTAQAPSLGPAAPNSQTFLLVQTAQGLQLIPSSVQPPTPPPPPAPPKLILLPSSSAGAGGGRARQGPRAVGKAGQGAGVVWLPGPGGLGVQGAASAGASGTGQSLIVLQNVGGGEAGPQEMSGVQLQPLRPAPEVTTVQLQPAQEVTTVQLQPAQEVTTVQLQPAQEVTTVQLQPVAGQLSNSSGGAVATEAPNLLVVQSGAAEELLTGPGPGEAGDGEASTGVVQDVLFETLQTDEGLQSVLVLSGADGEQTRLCVQEVETLPPGLTEPPATGPPGQKLLIIRSAPATELLDSSNTGGGTATLQLLAPPPSGPASGPAGLPGAPASQMVQVVPAGAGPGVMTPQGLPSIQIVQTLPAVQLVHTF

SEQ ID NO: 7965 - protein, 869 aa, Homo sapiens
MEPETALWGPDLQGPEQSPNDAHRGAESENEEESPRQESSGEEIIMGDPAQSPESKDSTEMSLERSSQDPSVPQNPPTPLGHSNPLDHQIPLDPPAPEVVPTPSDWTKACEASWQWGALTTWNSPPVVPANEPSLRELVQGRPAGAEKPYICNECGKSFSQWSKLLRHQRIHTGERPNTCSECGKSFTQSSHLVQHQRTHTGEKPYKCPDCGKCFSWSSNLVQHQRTHTGEKPYKCTECEKAFTQSTNLIKHQRSHTGEKPYKCGECRRAFYRSSDLIQHQATHTGEKPYKCPECGKRFGQNHNLLKHQKIHAGEKPYRCTECGKSFIQSSELTQHQRTHTGEKPYECLECGKSFGHSSTLIKHQRTHLREDPFKCPVCGKTFTLSATLLRHQRTHTGERPYKCPECGKSFSVSSNLINHQRIHRGERPYICADCGKSFIMSSTLIRHQRIHTGEKPYKCSDCGKSFIRSSHLIQHRRTHTGEKPYKCPECGKSFSQSSNLITHVRTHMDENLFVCSDCGKAFLEAHELEQHRVIHERGKTPARRAQGDSLLGLGDPSLLTPPPGAKPHKCLVCGKGFNDEGIFMQHQRIHIGENPYKNADGLIAHAAPKPPQLRSPRLPFRGNSYPGAAEGRAEAPGQPLKPPEGQEGFSQRRGLLSSKTYICSHCGESFLDRSVLLQHQLTHGNEKPFLFPDYRIGLGEGAGPSPFLSGKPFKCPECKQSFGLSSELLLHQKVHAGGKSSQKSPELGKSSSVLLEHLRSPLGARPYRCSDCRASFLDRVALTRHQETHTQEKPPNPEDPPPEAVTLSTDQEGEGETPTPTESSSHGEGQNPKTLVEEKPYLCPECGAGFTEVAALLLHRSCHPGVSL

SEQ ID NO: 7966 - protein, 601 aa, Homo sapiens
MGPLEFRDVAIEFSLEEWHCLDTAQQNLYRDVMLENYRHLVFLGIVVTKPDLITCLEQGKKPFTVKRHEMIAKSPVMCFHFAQDLCPEQSLKDSFQKVIVTRYEKREYGNLELKKGCESVDEGKVHKRGYNGLNQCLTATQSKVFQCDTYVKVSHIFSNSNRHKIRDTGKKPFKCIECGKAFNQSSTLATHKKIHTGEITCKCEECGKAFNRSSHLTSHKRIHTGEKRYKCEDCGKELKYSSTLTAHKRIHTGEKRYKCEDCGKELKYSSTLTAHKRIHTGEKPYKCDKCGRAFISSSILYVHKISHTEEKPYKCEECGKAFKLSSILSTHKRIHTGEKPYKCEECGKAFRRSLVLRTHKRIHTGEKPYKCDKCGKAFISSSLLYKHKISHSEKKPYKCEECGKAFKRSSTLTIHKISHTEEKPYKCQECDKVFKRSSALSTHKIIHSGEKPYKCEECGKAFKRSSNLTTHKISHTEEKLYKCQECDKAFKYSSALSTHKIIHSGENPYKCEECGKAFKRSSVLSKHKIIHTGAKPYKCEECGKAFKRSSQLTSHKISHTGEKPYKCEECGKAFNLSSDLNTHKRIHIGQKAYIVKNMANL

SEQ ID NO: 7967 - protein, 852 aa, Homo sapiens
MMAKSALRENGTNSETFRQRFRRFHYQEVAGPREAFSQLWELCCRWLRPEVRTKEQIVELLVLEQFLTVLPGEIQNWVQEQCPENGEEAVTLVEDLEREPGRPRSSVTVSVKGQEVRLEKMTPPKSSQELLSVRQESVEPQPRGVPKKERARSPDLGPQEQMNPKEKLKPFQRSGLPFPKSGVVSRLEQGEPWIPDLLGSKEKELPSGSHIGDRRVHADLLPSKKDRRSWVEQDHWSFEDEKVAGVHWGYEETRTLLAILSQTEFYEALRNCHRNSQVYGAVAERLREYGFLRTLEQCRTKFKGLQKSYRKVKSGHPPETCPFFEEMEALMSAQVIALPSNGLEAAASHSGLVGSDAETEEPGQRGWQHEEGAEEAVAQESDSDDMDLEATPQDPNSAAPVVFRSPGGVHWGYEETKTYLAILSETQFYEALRNCHRNSQLYGAVAERLWEYGFLRTPEQCRTKFKSLQTSYRKVKNGQAPETCPFFEEMDALVSVRVAAPPNDGQEETASCPVQGTSEAEAQKQAEEADEATEEDSDDDEEDTEIPPGAVITRAPVLFQSPRGFEAGFENEDNSKRDISEEVQLHRTLLARSERKIPRYLHQGKGNESDCRSGRQWAKTSGEKRGKLTLPEKSLSEVLSQQRPCLGERPYKYLKYSKSFGPNSLLMHQVSHQVENPYKCADCGKSFSRSARLIRHRRIHTGEKPYKCLDCGKSFRDSSNFITHRRIHTGEKPYQCGECGKCFNQSSSLIIHQRTHTGEKPYQCEECGKSFNNSSHFSAHRRIHTGERPHVCPDCGKSFSKSSDLRAHHRTHTGEKPYGCHDCGKCFSKSSALNKHGEIHAREKLLTQSAPK

SEQ ID NO: 7968 - protein, 732 aa, Homo sapiens
MTPPKSSQELLSVRQESVEPQPRGVPKKERARSPDLGPQEQMNPKEKLKPFQRSGLPFPKSGVVSRLEQGEPWIPDLLGSKEKELPSGSHIGDRRVHADLLPSKKDRRSWVEQDHWSFEDEKVAGVHWGYEETRTLLAILSQTEFYEALRNCHRNSQVYGAVAERLREYGFLRTLEQCRTKFKGLQKSYRKVKSGHPPETCPFFEEMEALMSAQVIALPSNGLEAAASHSGLVGSDAETEEPGQRGWQHEEGAEEAVAQESDSDDMDLEATPQDPNSAAPVVFRSPGGVHWGYEETKTYLAILSETQFYEALRNCHRNSQLYGAVAERLWEYGFLRTPEQCRTKFKSLQTSYRKVKNGQAPETCPFFEEMDALVSVRVAAPPNDGQEETASCPVQGTSEAEAQKQAEEADEATEEDSDDDEEDTEIPPGAVITRAPVLFQSPRGFEAGFENEDNSKRDISEEVQLHRTLLARSERKIPRYLHQGKGNESDCRSGRQWAKTSGEKRGKLTLPEKSLSEVLSQQRPCLGERPYKYLKYSKSFGPNSLLMHQVSHQVENPYKCADCGKSFSRSARLIRHRRIHTGEKPYKCLDCGKSFRDSSNFITHRRIHTGEKPYQCGECGKCFNQSSSLIIHQRTHTGEKPYQCEECGKSFNNSSHFSAHRRIHTGERPHVCPDCGKSFSKSSDLRAHHRTHTGEKPYGCHDCGKCFSKSSALNKHGEIHAREKLLTQSAPK

SEQ ID NO: 7969 - protein, 557 aa, Homo sapiens
MMAKSALRENGTNSETFRQRFRRFHYQEVAGPREAFSQLWELCCRWLRPEVRTKEQIVELLVLEQFLTVLPGEIQNWVQEQCPENGEEAVTLVEDLEREPGRPRSSVTVSVKGQEVRLEKMTPPKSSQELLSVRQESVEPQPRGVPKKERARSPDLGPQEQMNPKEKLKPFQRSGLPFPKSGVVSRLEQGEPWIPDLLGSKEKELPSGSHIGDRRVHADLLPSKKDRRSWVEQDHWSFEDEKVAGVHWGYEETRTLLAILSQTEFYEALRNCHRNSQVYGAVAERLREYGFLRTLEQCRTKFKGLQKSYRKVKSGHPPETCPFFEEMEALMSAQVIALPSNGLEAAASHSGLVGSDAETEEPGQRGWQHEEGAEEAVAQESDSDDMDLEATPQDPNSAAPVVFRSPGGVHWGYEETKTYLAILSETQFYEALRNCHRNSQLYGAVAERLWEYGFLRTPEQCRTKFKSLQTSYRKVKNGQAPETCPFFEEMDALVLKLDLRMKIIQNGIFLRKYNCIGHYLQDLKGKFPGIFIRVKAMRVTVDQEDSGQRPQGRKEEN

SEQ ID NO: 7970 - protein, 463 aa, Homo sapiens
MMAKSALRENGTNSETFRQRFRRFHYQEVAGPREAFSQLWELCCRWLRPEVRTKEQIVELLVLEQFLTVLPGEIQNWVQEQCPENGEEAVTLVEDLEREPGRPRSSVTVSVKGQEVRLEKMTPPKSSQELLSVRQESVEPQPRGVPKKERARSPDLGPQEQMNPKEKLKPFQRSGFEAGFENEDNSKRDISEEVQLHRTLLARSERKIPRYLHQGKGNESDCRSGRQWAKTSGEKRGKLTLPEKSLSEVLSQQRPCLGERPYKYLKYSKSFGPNSLLMHQVSHQVENPYKCADCGKSFSRSARLIRHRRIHTGEKPYKCLDCGKSFRDSSNFITHRRIHTGEKPYQCGECGKCFNQSSSLIIHQRTHTGEKPYQCEECGKSFNNSSHFSAHRRIHTGERPHVCPDCGKSFSKSSDLRAHHRTHTGEKPYGCHDCGKCFSKSSALNKHGEIHAREKLLTQSAPK

SEQ ID NO: 7971 - protein, 507 aa, Homo sapiens
MGCWGRNRGRLLCMLALTFMFMVLEVVVSRVTSSLAMLSDSFHMLSDVLALVVALVAERFARRTHATQKNTFGWIRAEVMGALVNAIFLTGLCFAILLEAIERFIEPHEMQQPLVVLGVGVAGLLVNVLGLCLFHHHSGFSQDSGHGHSHGGHGHGHGLPKGPRVKSTRPGSSDINVAPGEQGPDQEETNTLVANTSNSNGLKLDPADPENPRSGDTVEVQVNGNLVREPDHMELEEDRAGQLNMRGVFLHVLGDALGSVIVVVNALVFYFSWKGCSEGDFCVNPCFPDPCKAFVEIINSTHASVYEAGPCWVLYLDPTLCVVMVCILLYTTYPLLKESALILLQTVPKQIDIRNLIKELRNVEGVEEVHELHVWQLAGSRIIATAHIKCEDPTSYMEVAKTIKDVFHNHGIHATTIQPEFASVGSKSSVVPCELACRTQCALKQCCGTLPQAPSGKDAEKTPAVSISCLELSNNLEKKPRRTKAENIPAVVIEIKNMPNKQPESSL

SEQ ID NO: 7972 - protein, 627 aa, Homo sapiens
MERPEPPPGTAAGQEEQELRERAFFSWAEFSRFFDAWCQQRLALFFVKSSMHLARCRWASAPPLYTLIDVLKYSYVRLVCKDVRAPSRPAVGPPQPGCPAFIIVKLSPLRDRLVVTECQLTHSHPACPLEFAYYFRPGHLLANACLPVRTTNKISKQFVAPADVRRLLSYCKGRDHGVLDALHVLEGLFRTDPEAKVKLVFVEDQAVVETVFFLTSRTRALLRRFPRMLLVDRLPGLQGALDLLAVLCVDGSGRARQAACCVARPGTPSLLRFALASLLQSAPDVKGRVRCLTAGPEVAAQLPAVRQLLPCARVQICRAQGLETLFSKAQELGGAGREDPGLWSRLCRLAGASSPAAYDEALAELHAHGPAAFVDYFERNWEPRRDMWVRFRAFEAARDLDACALVRGHRRRLLRRLSPSRGVAQCLRDLVAMQWADAAGEAVPEGPDGGGPWLEDEPGRGAQGENERVRGLETGDWGGAPKEGSIWRGAQMEKEWARALETRDWGGAQFEGEKGRALQIRDWRGGRLENQKPRGLEGGVLRGSKLEKGHLRGPEIRDWRGPQLEGEKDWGLEGYVWRGSQLEDQALRGLEGYTWRVAQLEDRRSTTDLRGTQFDYERGKGESTEDR

SEQ ID NO: 7973 - protein, 920 aa, Homo sapiens
MERPEPPPGTAAGQEEQELRERAFFSWAEFSRFFDAWCQQRLALFFVKSSMHLARCRWASAPPLYTLIDVLKYSYVRLVCKDVRAPSRPAVGPPQPGCPAFIIVKLSPLRDRLVVTECQLTHSHPACPLEFAYYFRPGHLLANACLPVRTTNKISKQFVAPADVRRLLSYCKGRDHGVLDALHVLEGLFRTDPEAKVKLVFVEDQAVVETVFFLTSRTRALLRRFPRMLLVDRLPGLQGALDLLAVLCVDGSGRARQAACCVARPGTPSLLRFALASLLQSAPDVKGRVRCLTAGPEVAAQLPAVRQLLPCARVQICRAQGLETLFSKAQELGGAGREDPGLWSRLCRLAGASSPAAYDEALAELHAHGPAAFVDYFERNWEPRRDMWVRFRAFEAARDLDACALVRGHRRRLLRRLSPSRGVAQCLRDLVAMQWADAAGEAVPEGPDGGGPWLEDEPGRGAQGENERVRGLETGDWGGAPKEGSIWRGAQMEKEWARALETRDWGGAQFEGEKGRALQIRDWRGGRLENQKPRGLEGGVLRGSKLEKGHLRGPEIRDWRGPQLEGEKDWGLEGYVWRGSQLEDQALRGLEGYTWRVAQLEDRRSTTDLRGTQFDYERVRSLEGSPWRGAQLHDERAGGLRTAEWKGPQSEVEKGRGLEVRNLRGIPLEKSLELAPENGDQRGPQWEDERRRGPEIAEERGARVGVKRRRGLEDIVLVQLGDTRVTGMENGDGGGARSVGPKSRAGRGMEWGDAGGRCLGLGNGVVSGTPVGTVLEGSPEWAAARSEHLAAGDGLQEGGEDGPREPKRLCRPPGEEEVDWEPLAKFRAACGPELADLVAEELAFARQHGTRGFHWTGAGFALKDGTSDFFLDGALTRCSCSIHAARRLPCRHLFAARLLTGAALFHMDLLRDCWGRAPEP

SEQ ID NO: 7974 - protein, 708 aa, Homo sapiens
MSERGIKWACEYCTYENWPSAIKCTMCRAQRPSGTIITEDPFKSGSSDVGRDWDPSSTEGGSSPLICPDSSARPRVKSSYSMENANKWSCHMCTYLNWPRAIRCTQCLSQRRTRSPTESPQSSGSGSRPVAFSVDPCEEYNDRNKLNTRTQHWTCSVCTYENWAKAKRCVVCDHPRPNNIEAIELAETEEASSIINEQDRARWRGSCSSGNSQRRSPPATKRDSEVKMDFQRIELAGAVGSKEELEVDFKKLKQIKNRMKKTDWLFLNACVGVVEGDLAAIEAYKSSGGDIARQLTADEVRLLNRPSAFDVGYTLVHLAIRFQRQDMLAILLTEVSQQAAKCIPAMVCPELTEQIRREIAASLHQRKGDFACYFLTDLVTFTLPADIEDLPPTVQEKLFDEVLDRDVQKELEEESPIINWSLELATRLDSRLYALWNRTAGDCLLDSVLQATWGIYDKDSVLRKALHDSLHDCSHWFYTRWKDWESWYSQSFGLHFSLREEQWQEDWAFILSLASQPGASLEQTHIFVLAHILRRPIIVYGVKYYKSFRGETLGYTRFQGVYLPLLWEQSFCWKSPIALGYTRGHFSALVAMENDGYGNRGAGANLNTDDDVTITFLPLVDSERKLLHVHFLSAQELGNEEQQEKLLREWLDCCVTEGGVLVAMQKSSRRRNHPLVTQMVEKWLDRYRQIRPCTSLSDGEEDEDDEDE

SEQ ID NO: 7975 - protein, 485 aa, Homo sapiens
MLERLKAPWSAALQRKYFDLGIWTAPISPMALTMLNGLLIKDSSPPMLLHQVNKTAQLDTFNYQSCFMQSVFDHFPEILFIHRTYNPRGKVLYTFLVDGPRVQLEGHLARAVYFAIPAKEDTEGLAQMFQVFKKFNPAWERVCTILVDPHFLPLPILAMEFPTAEVLLSAFHICKFLQAKFYQLSLERPVERLLLTSLQSTMCSATAGNLRKLYTLLSNCIPPAKLPELHSHWLLNDRIWLAHRWRSRAESSHYFQSLEVTTHILSQFFGTTPSEKQGMASLFRYMQQNSADKANFNQGLCAQNNHAPSDTIPESPKLEQLVESHIQHSLNAICTGPAAQLCLGELAVVQKSTHLIGSGSEKMNIQILEDTHKVQPQPPASCSCYFNQAFHLPCRHILAMLSARRQVLQPDMLPAQWTAGCATSLDSILGSKWSETLDKHLAVTHLTEEVGQLLQHCTKEEFERRYSTLRELADSWIGPYEQVQL

SEQ ID NO: 7976 - protein, 495 aa, Homo sapiens
MAANWTLSWGQGGPCNSPGSDTPRSVASPETQLGNHDRNPETWHMNFRMFSCPEESDPIQALRKLTELCHLWLRPDLHTKEQILDMLVMEQFMISMPQELQVLVKVNGVQSCKDLEDLLRNNRRPKKWSIVNLLGKEYLMLNSDVEMAEAPASVRDDPRDVSSQWASSVNQMHPGTGQARREQQILPRVAALSRRQGEDFLLHKSIDVTGDPNSPRPKQTLEKDLKENREENPGLSSPEPQLPKSPNLVRAKEGKEPQKRASVENVDADTPSACVVEREALTHSGNRGDALNLSSPKRSKPDASSISQEEPQGEATPVGNRESPGQAEINPVHSPGPAGPVSHPDGQEAKALPPFACDVCNKSFKYFSQLSIHRRSHTGDRPFQCDLCRKRFLQPSDLRVHQRVHTGERPYMCDVCQKRFAHESTLQGHKRIHTGERPFKCKYCSKVFSHKGNLNVHQRTHSGEKPYKCPTCQKAFRQLGTFKRHLKTHRETTSQ

SEQ ID NO: 7977 - protein, 1215 aa, Homo sapiens
MAERGQQPPPAKRLCCRPGGGGGGGGSSGGGGGAGGGYSSACRPGPRAGGAAAAAACGGGAALGLLPPGKTQSPESLLDIAARRVAEKWPFQRVEERFERIPEPVQRRIVYWSFPRSEREICMYSSFNTGGGAAGGPGDDSGGGGGAGGGGGGGSSSSPAATSAAATSAAAAAAAAAAAAAAAAGAGAPSVGAAGAADGGDETRLPFRRGIALLESGCVDNVLQVGFHLSGTVTEPAIQSEPETVCNVAISFDRCKITSVTCSCGNKDIFYCAHVVALSLYRIRKPDQVKLHLPISETLFQMNRDQLQKFVQYLITVHHTEVLPTAQKLADEILSQNSEINQVHGAPDPTAGASIDDENCWHLDEEQVQEQVKLFLSQGGYHGSGKQLNLLFAKVREMLKMRDSNGARMLTLITEQFMADPRLSLWRQQGTAMTDKYRQLWDELGALWMCIVLNPHCKLEQKASWLKQLKKWNSVDVCPWEDGNHGSELPNLTNALPQGANANQDSSNRPHRTVFTRAIEACDLHWQDSHLQHIISSDLYTNYCYHDDTENSLFDSRGWPLWHEHVPTACARVDALRSHGYPREALRLAIAIVNTLRRQQQKQLEMFRTQKKELPHKNITSITNLEGWVGHPLDPVGTLFSSLMEACRIDDENLSGFSDFTENMGQCKSLEYQHLPAHKFLEEGESYLTLAVEVALIGLGQQRIMPDGLYTQEKVCRNEEQLISKLQEIELDDTLVKIFRKQAVFLLEAGPYSGLGEIIHRESVPMHTFAKYLFTSLLPHDAELAYKIALRAMRLLVLESTAPSGDLTRPHHIASVVPNRYPRWFTLSHIESQQCELASTMLTAAKGDVRRLETVLESIQKNIHSSSHIFKLAQDAFKIATLMDSLPDITLLKVSLELGLQVMRMTLSTLNWRRREMVRWLVTCATEVGVYALDSIMQTWFTLFTPTEATSIVATTVMSNSTIVRLHLDCHQQEKLASSARTLALQCAMKDPQNCALSALTLCEKDHIAFETAYQIVLDAATTGMSYTQLFTIARYMEHRGYPMRAYKLATLAMTHLNLSYNQDTHPAINDVLWACALSHSLGKNELAAIIPLVVKSVKCATVLSDILRRCTLTTPGMVGLHGRRNSGKLMSLDKAPLRQLLDATIGAYINTTHSRLTHISPRHYSEFIEFLSKARETFLMAHDGHIQFTQFIDNLKQIYKGKKKLMMLVRERFG

SEQ ID NO: 7978 - protein, 140 aa, Homo sapiens
MAVVLPAVVEELLSEMAAAVQESARIPDEYLLSLKFLFGSSATQALDLVDRQSITLISSPSGRRVYQVLGSSSKTYTCLASCHYCSCPAFAFSVLRKSDSILCKHLLAVYLSQVMRTCQQLSVSDKQLTDILLMEKKQEA

SEQ ID NO: 7979 - protein, 426 aa, Homo sapiens
MSAFDMSHGFFPREPICPFEEKTKIGTMVEDHRSNSYQDSVTFDDVAVEFTPEEWALLDTTQKYLYRDVMLENYMNLASVDFFFCLTSEWEIQPRTKRSSLQQGFLKNQIFTGIQMQTRSYSGWKLCENCGEVFSEQFCLKTHMRAQNGGNTFEGNCYGKDSISVHKEASIGQELSKFNPCGKVFTLTPGLAVHLEILNGRQPYKCKECGKGFKYFASLDNHMGIHIGEKLCEFQECERAITTSSHLKQCVAVHTGKKSEKTKNCGKSFTNFSQLSAHAKTHKGEKSFECKECGRSFRNSSSFNVHIQIHTGIKPHKCTECGKAFTRSTHLTQHVRTHTGIKPYECKECGQAFTQYTGLAIHIRNHTGEKPYQCKECGKAFNRSSTLTQHRRIHTGEKPYECVECGKTFITSSHRSKHLKTHSGER

SEQ ID NO: 7980 - protein, 354 aa, Homo sapiens
MSAFDMSHDFFFCLTSEWEIQPRTKRSSLQQGFLKNQIFTGIQMQTRSYSGWKLCENCGEVFSEQFCLKTHMRAQNGGNTFEGNCYGKDSISVHKEASIGQELSKFNPCGKVFTLTPGLAVHLEILNGRQPYKCKECGKGFKYFASLDNHMGIHIGEKLCEFQECERAITTSSHLKQCVAVHTGKKSEKTKNCGKSFTNFSQLSAHAKTHKGEKSFECKECGRSFRNSSSFNVHIQIHTGIKPHKCTECGKAFTRSTHLTQHVRTHTGIKPYECKECGQAFTQYTGLAIHIRNHTGEKPYQCKECGKAFNRSSTLTQHRRIHTGEKPYECVECGKTFITSSHRSKHLKTHSGER

SEQ ID NO: 7981 - protein, 123 aa, Homo sapiens
MPDASLGSLGITWCFLESPLEVSSGRFGLARLLGSQDHGDDPAERGRTATDAWGPSRWGQSPGNGGGYCDASPPSALAPGDRAWALPASPSSGAPASQHCCLEKAGTRTKASPVWGRDGNTWN

SEQ ID NO: 7982 - protein, 644 aa, Homo sapiens
MEIPAPEPEKTALSSQDPALSLKENLEDISGWGLPEARSKESVSFKDVAVDFTQEEWGQLDSPQRALYRDVMLENYQNLLALGPPLHKPDVISHLERGEEPWSMQREVPRGPCPEWELKAVPSQQQGICKEEPAQEPIMERPLGGAQAWGRQAGALQRSQAAPWAPAPAMVWDVPVEEFPLRCPLFAQQRVPEGGPLLDTRKNVQATEGRTKAPARLCAGENASTPSEPEKFPQVRRQRGAGAGEGEFVCGECGKAFRQSSSLTLHRRWHSREKAYKCDECGKAFTWSTNLLEHRRIHTGEKPFFCGECGKAFSCHSSLNVHQRIHTGERPYKCSACEKAFSCSSLLSMHLRVHTGEKPYRCGECGKAFNQRTHLTRHHRIHTGEKPYQCGSCGKAFTCHSSLTVHEKIHSGDKPFKCSDCEKAFNSRSRLTLHQRTHTGEKPFKCADCGKGFSCHAYLLVHRRIHSGEKPFKCNECGKAFSSHAYLIVHRRIHTGEKPFDCSQCWKAFSCHSSLIVHQRIHTGEKPYKCSECGRAFSQNHCLIKHQKIHSGEKSFKCEKCGEMFNWSSHLTEHQRLHSEGKPLAIQFNKHLLSTYYVPGSLLGAGDAGLRDVDPIDALDVAKLLCVVPPRAGRNFSLGSKPRN

SEQ ID NO: 7983 - protein, 573 aa, Homo sapiens
MLENYQNLLALGPPLHKPDVISHLERGEEPWSMQREVPRGPCPEWELKAVPSQQQGICKEEPAQEPIMERPLGGAQAWGRQAGALQRSQAAPWAPAPAMVWDVPVEEFPLRCPLFAQQRVPEGGPLLDTRKNVQATEGRTKAPARLCAGENASTPSEPEKFPQVRRQRGAGAGEGEFVCGECGKAFRQSSSLTLHRRWHSREKAYKCDECGKAFTWSTNLLEHRRIHTGEKPFFCGECGKAFSCHSSLNVHQRIHTGERPYKCSACEKAFSCSSLLSMHLRVHTGEKPYRCGECGKAFNQRTHLTRHHRIHTGEKPYQCGSCGKAFTCHSSLTVHEKIHSGDKPFKCSDCEKAFNSRSRLTLHQRTHTGEKPFKCADCGKGFSCHAYLLVHRRIHSGEKPFKCNECGKAFSSHAYLIVHRRIHTGEKPFDCSQCWKAFSCHSSLIVHQRIHTGEKPYKCSECGRAFSQNHCLIKHQKIHSGEKSFKCEKCGEMFNWSSHLTEHQRLHSEGKPLAIQFNKHLLSTYYVPGSLLGAGDAGLRDVDPIDALDVAKLLCVVPPRAGRNFSLGSKPRN

SEQ ID NO: 7984 - protein, 612 aa, Homo sapiens
MEIPAPEPEKTALSSQDPALSLKENLEDISGWGLPEARSKESVSFKDVAVDFTQEEWGQLDSPQRALYRDVMLENYQNLLALEWELKAVPSQQQGICKEEPAQEPIMERPLGGAQAWGRQAGALQRSQAAPWAPAPAMVWDVPVEEFPLRCPLFAQQRVPEGGPLLDTRKNVQATEGRTKAPARLCAGENASTPSEPEKFPQVRRQRGAGAGEGEFVCGECGKAFRQSSSLTLHRRWHSREKAYKCDECGKAFTWSTNLLEHRRIHTGEKPFFCGECGKAFSCHSSLNVHQRIHTGERPYKCSACEKAFSCSSLLSMHLRVHTGEKPYRCGECGKAFNQRTHLTRHHRIHTGEKPYQCGSCGKAFTCHSSLTVHEKIHSGDKPFKCSDCEKAFNSRSRLTLHQRTHTGEKPFKCADCGKGFSCHAYLLVHRRIHSGEKPFKCNECGKAFSSHAYLIVHRRIHTGEKPFDCSQCWKAFSCHSSLIVHQRIHTGEKPYKCSECGRAFSQNHCLIKHQKIHSGEKSFKCEKCGEMFNWSSHLTEHQRLHSEGKPLAIQFNKHLLSTYYVPGSLLGAGDAGLRDVDPIDALDVAKLLCVVPPRAGRNFSLGSKPRN

SEQ ID NO: 7985 - protein, 572 aa, Homo sapiens
MPSPPFSPRAGPPLHKPDVISHLERGEEPWSMQREVPRGPCPEWELKAVPSQQQGICKEEPAQEPIMERPLGGAQAWGRQAGALQRSQAAPWAPAPAMVWDVPVEEFPLRCPLFAQQRVPEGGPLLDTRKNVQATEGRTKAPARLCAGENASTPSEPEKFPQVRRQRGAGAGEGEFVCGECGKAFRQSSSLTLHRRWHSREKAYKCDECGKAFTWSTNLLEHRRIHTGEKPFFCGECGKAFSCHSSLNVHQRIHTGERPYKCSACEKAFSCSSLLSMHLRVHTGEKPYRCGECGKAFNQRTHLTRHHRIHTGEKPYQCGSCGKAFTCHSSLTVHEKIHSGDKPFKCSDCEKAFNSRSRLTLHQRTHTGEKPFKCADCGKGFSCHAYLLVHRRIHSGEKPFKCNECGKAFSSHAYLIVHRRIHTGEKPFDCSQCWKAFSCHSSLIVHQRIHTGEKPYKCSECGRAFSQNHCLIKHQKIHSGEKSFKCEKCGEMFNWSSHLTEHQRLHSEGKPLAIQFNKHLLSTYYVPGSLLGAGDAGLRDVDPIDALDVAKLLCVVPPRAGRNFSLGSKPRN

SEQ ID NO: 7986 - protein, 178 aa, Homo sapiens
MEIPAPEPEKTGIGEFQGCGCGLHPGGVGSTRLPSEGLVPGCDVGELPEPSCPRTSTAQARCDLSSGTRRGAMEHAEGSPQRALSRMGAEGGALSTAGHLQRRTGPGAHHGAAPRRGAGVGAPGRCSAEESGCALGARTCHGLGRPCRGIPPQVSPLRPATRSRGGTLAGHTQERPGH

SEQ ID NO: 7987 - protein, 498 aa, Homo sapiens
MLEEGVLPSPGPALPQEENTGEEGMAAGLLTAGPRGSTFFSSVTVAFAQERWRCLVSTPRDRFKEGIPGKSRSLVLLGLPVSQPGMNSQLEQREGAWMLEGEDLRSPSPGWKIISGSPPEQALSEASFQDPCVEMPPGDSDHGTSDLEKSFNLRPVLSPQQRVPVEARPRKCETHTESFKNSEILKPHRAKPYACNECGKAFSYCSSLSQHQKSHTGEKPYECSECGKAFSQSSSLIQHQRIHTGEKPYKCSECGRAFSQNANLTKHQRTHTGEKPYRCSECEKAFSDCSALVQHQRIHTGEKPYECSDCGKAFRHSANLTNHQRTHTGEKPYKCSECGKAFSYCAAFIQHQRIHTGEKPYRCAACGKAFSQSANLTNHQRTHTGEKPYKCSECGKAFSQSTNLIIHQKTHTGEKPYKCNECGKFFSESSALIRHHIIHTGEKPYECNECGKAFNQSSSLSQHQRIHTGVKPYECSECGKAFRCSSAFVRHQRLHAGE

SEQ ID NO: 7988 - protein, 665 aa, Homo sapiens
MFPVLEPHQVGLIRSYNSKTMTCFQELVTFRDVAIDFSRQEWEYLDPNQRDLYRDVMLENYRNLVSLGGHSISKPVVVDLLERGKEPWMILREETQFTDLDLQCEIISYIEVPTYETDISSTQLQSIYKREKLYECKKCQKKFSSGYQLILHHRFHVIERPYECKECGKNFRSGYQLTLHQRFHTGEKPYECTECGKNFRSGYQLTVHQRFHTGEKTYECRQCGKAFIYASHIVQHERIHTGGKPYECQECGRAFSQGGHLRIHQRVHTGEKPYKCKECGKTFSRRSNLVEHGQFHTDEKPYICEKCGKAFRRGHQLTVHQRVHTGKKPYECKECGKGYTTASYFLLHQRIHKGGKPYECKECKKTFTLYRNLTRHQNIHTGEKLFECKQCGKTYTTGSKLFQHQKTHTGEKPYECKECGKAFSLYGYLKQHQKIHTGMKHFECKECKKTFTLYRNLTRHQNIHTGKKLFECQECGKAYSTGSNLIQHRKTHTGEKPYKCKECGKTFSLHGYLNQHQKIHTGMKPYECKVCRKTFTFYRNLTLHQSIHTDEKPFECKECGKTFRRSSHLTAHQSIHADKKPYECKECGKAFKMYGYLTQHQKIHTGGKPYECKECGKAFSRASNLVQHERIHTGEKPYVCKQCGKTFRYGSALKAHQRIHRSIKV

SEQ ID NO: 7989 - protein, 577 aa, Homo sapiens
MILREETQFTDLDLQCEIISYIEVPTYETDISSTQLQSIYKREKLYECKKCQKKFSSGYQLILHHRFHVIERPYECKECGKNFRSGYQLTLHQRFHTGEKPYECTECGKNFRSGYQLTVHQRFHTGEKTYECRQCGKAFIYASHIVQHERIHTGGKPYECQECGRAFSQGGHLRIHQRVHTGEKPYKCKECGKTFSRRSNLVEHGQFHTDEKPYICEKCGKAFRRGHQLTVHQRVHTGKKPYECKECGKGYTTASYFLLHQRIHKGGKPYECKECKKTFTLYRNLTRHQNIHTGEKLFECKQCGKTYTTGSKLFQHQKTHTGEKPYECKECGKAFSLYGYLKQHQKIHTGMKHFECKECKKTFTLYRNLTRHQNIHTGKKLFECQECGKAYSTGSNLIQHRKTHTGEKPYKCKECGKTFSLHGYLNQHQKIHTGMKPYECKVCRKTFTFYRNLTLHQSIHTDEKPFECKECGKTFRRSSHLTAHQSIHADKKPYECKECGKAFKMYGYLTQHQKIHTGGKPYECKECGKAFSRASNLVQHERIHTGEKPYVCKQCGKTFRYGSALKAHQRIHRSIKV

SEQ ID NO: 7990 - protein, 607 aa, Homo sapiens
MESCSVAQAGVQWPDLSSLQPPPPRFKQFSCHSLQVAGITDLDLQCEIISYIEVPTYETDISSTQLQSIYKREKLYECKKCQKKFSSGYQLILHHRFHVIERPYECKECGKNFRSGYQLTLHQRFHTGEKPYECTECGKNFRSGYQLTVHQRFHTGEKTYECRQCGKAFIYASHIVQHERIHTGGKPYECQECGRAFSQGGHLRIHQRVHTGEKPYKCKECGKTFSRRSNLVEHGQFHTDEKPYICEKCGKAFRRGHQLTVHQRVHTGKKPYECKECGKGYTTASYFLLHQRIHKGGKPYECKECKKTFTLYRNLTRHQNIHTGEKLFECKQCGKTYTTGSKLFQHQKTHTGEKPYECKECGKAFSLYGYLKQHQKIHTGMKHFECKECKKTFTLYRNLTRHQNIHTGKKLFECQECGKAYSTGSNLIQHRKTHTGEKPYKCKECGKTFSLHGYLNQHQKIHTGMKPYECKVCRKTFTFYRNLTLHQSIHTDEKPFECKECGKTFRRSSHLTAHQSIHADKKPYECKECGKAFKMYGYLTQHQKIHTGGKPYECKECGKAFSRASNLVQHERIHTGEKPYVCKQCGKTFRYGSALKAHQRIHRSIKV

SEQ ID NO: 7991 - protein, 578 aa, Homo sapiens
MLENYRNLVSLDLDLQCEIISYIEVPTYETDISSTQLQSIYKREKLYECKKCQKKFSSGYQLILHHRFHVIERPYECKECGKNFRSGYQLTLHQRFHTGEKPYECTECGKNFRSGYQLTVHQRFHTGEKTYECRQCGKAFIYASHIVQHERIHTGGKPYECQECGRAFSQGGHLRIHQRVHTGEKPYKCKECGKTFSRRSNLVEHGQFHTDEKPYICEKCGKAFRRGHQLTVHQRVHTGKKPYECKECGKGYTTASYFLLHQRIHKGGKPYECKECKKTFTLYRNLTRHQNIHTGEKLFECKQCGKTYTTGSKLFQHQKTHTGEKPYECKECGKAFSLYGYLKQHQKIHTGMKHFECKECKKTFTLYRNLTRHQNIHTGKKLFECQECGKAYSTGSNLIQHRKTHTGEKPYKCKECGKTFSLHGYLNQHQKIHTGMKPYECKVCRKTFTFYRNLTLHQSIHTDEKPFECKECGKTFRRSSHLTAHQSIHADKKPYECKECGKAFKMYGYLTQHQKIHTGGKPYECKECGKAFSRASNLVQHERIHTGEKPYVCKQCGKTFRYGSALKAHQRIHRSIKV

SEQ ID NO: 7992 - protein, 1237 aa, Homo sapiens
MGDMKTPDFDDLLAAFDIPDIDANEAIHSGPEENEGPGGPGKPEPGVGSESEDTAAASAGDGPGVPAQASDHGLPPPDISVVSVIVKNTVCPEQSEALAGGSAGDGAQAAGVTKEGPVGPHRMQNGFGSPEPSLPGTPHSPAPPSGGTWKEKGMEGKTPLDLFAHFGPEPGDHSDPLPPSAPSPTREGALTPPPFPSSFELAQENGPGMQPPVSSPPLGALKQESCSPHHPQVLAQQGSGSSPKATDIPASASPPPVAGVPFFKQSPGHQSPLASPKVPVCQPLKEEDDDEGPVDKSSPGSPQSPSSGAEAADEDSNDSPASSSSRPLKVRIKTIKTSCGNITRTVTQVPSDPDPPAPLAEGAFLAEASLLKLSPATPTSEGPKVVSVQLGDGTRLKGTVLPVATIQNASTAMLMAASVARKAVVLPGGTATSPKMIAKNVLGLVPQALPKADGRAGLGTGGQKVNGASVVMVQPSKTATGPSTGGGTVISRTQSSLVEAFNKILNSKNLLPAYRPNLSPPAEAGLALPPTGYRCLECGDAFSLEKSLARHYDRRSMRIEVTCNHCARRLVFFNKCSLLLHAREHKDKGLVMQCSHLVMRPVALDQMVGQPDITPLLPVAVPPVSGPLALPALGKGEGAITSSAITTVAAEAPVLPLSTEPPAAPATSAYTCFRCLECKEQCRDKAGMAAHFQQLGPPAPGATSNVCPTCPMMLPNRCSFSAHQRMHKNRPPHVCPECGGNFLQANFQTHLREACLHVSRRVGYRCPSCSVVFGGVNSIKSHIQTSHCEVFHKCPICPMAFKSGPSAHAHLYSQHPSFQTQQAKLIYKCAMCDTVFTHKPLLSSHFDQHLLPQRVSVFKCPSCPLLFAQKRTMLEHLKNTHQSGRLEETAGKGAGGALLTPKTEPEELAVSQGGAAPATEESSSSSEEEEVPSSPEPPRPAKRPRRELGSKGLKGGGGGPGGWTCGLCHSWFPERDEYVAHMKKEHGKSVKKFPCRLCERSFCSAPSLRRHVRVNHEGIKRVYPCRYCTEGKRTFSSRLILEKHVQVRHGLQLGAQSPGRGTTLARGSSARAQGPGRKRRQSSDSCSEEPDSTTPPAKSPRGGPGSGGHGPLRYRSSSSTEQSLMMGLRVEDGAQQCLDCGLCFASPGSLSRHRFISHKKRRGVGKASALGLGDGEEEAPPSRSDPDGGDSPLPASGGPLTCKVCGKSCDSPLNLKTHFRTHGMAFIRARQGAVGDN

SEQ ID NO: 7993 - protein, 1103 aa, Homo sapiens
MGDMKTPDFDDLLAAFDIPDIDANEAIHSGPEENEGPGGPGKPEPGVGSESEDTAAASAGDGPGVPAQASDHGLPPPDISVVSVIVKNTVCPEQSEALAGGSAGDGAQAAGVTKEGPVGPHRMQNGFGSPEPSLPGTPHSPAPPSGGTWKEKGMEGKTPLDLFAHFGPEPGDHSDPLPPSAPSPTREGALTPPPFPSSFELAQENGPGMQPPVSSPPLGALKQESCSPHHPQVLAQQGSGSSPKATDIPASASPPPVAGVPFFKQSPGHQSPLASPKVPVCQPLKEEDDDEGPVDKSSPGSPQSPSSGAEAADEDSNDSPASSSSRPLKVRIKTIKTSCGNITRTVTQVPSDPDPPAPLAEGAFLAEASLLKLSPATPTSEGPKVVSVQLGDGTRLKGTVLPVATIQNASTAMLMAASVARKAVVLPGGTATSPKMIAKNVLGLVPQALPKADGRAGLGTGGQKVNGASVVMVQPSKTATGPSTGGGTVISRTQSSLVEAFNKILNSKNLLPAYRPNLSPPAEAGLALPPTGYRCLECGDAFSLEKSLARHYDRRSMRIEVTCNHCARRLVFFNKCSLLLHAREHKDKGLVMQCSHLVMRPVALDQMVGQPDITPLLPVAVPPVSGPLALPALGKGEGAITSSAITTVAAEAPVLPLSTEPPAAPATSAYTCFRCLECKEQCRDKAGMAAHFQQLGPPAPGATSNVCPTCPMMLPNRCSFSAHQRMHKNRPPHVCPECGGNFLQANFQTHLREACLHVSRRVGYRCPSCSVVFGGVNSIKSHIQTSHCEVFHKCPICPMAFKSGPSAHAHLYSQHPSFQTQQAKLIYKCAMCDTVFTHKPLLSSHFDQHLLPQRVSVFKCPSCPLLFAQKRTMLEHLKNTHQSGRLEETAGKGAGGALLTPKTEPEELAVSQGGAAPATEESSSSSEEEEVPSSPEPPRPAKRPRRELGSKGLKGGGGGPGGWTCGLCHSWFPERDEYVAHMKKEHGKSVKKFPCRLCERSFCSAPSLRRHVRVNHEGIKRVYPCRSKGPGLRAVPLLPSCPLPFQVLHRGKTHLQQPPDPRETCPGPARLAAWGPVPWPGDHLGSGFQCQSPGARSETPPVF

SEQ ID NO: 7994 - protein, 533 aa, Homo sapiens
MNLTEGRVVFEDVAIYFSQEEWGHLDEAQRLLYRDVMLENLALLSSLGSWHGAEDEEAPSQQGFSVGVSEVTASKPCLSSQKVHPSETCGPPLKDILCLVEHNGIHPEQHIYICEAELFQHPKQQIGENLSRGDDWIPSFGKNHRVHMAEEIFTCMEGWKDLPATSCLLQHQGPQSEWKPYRDTEDREAFQTGQNDYKCSECGKTFTCSYSFVEHQKIHTGERSYECNKCGKFFKYSANFMKHQTVHTSERTYECRECGKSFMYNYRLMRHKRVHTGERPYECNTCGKFFRYSSTFVRHQRVHTGERPYECRECGKFFMDSSTLIKHQRVHTGERPYKCNDCGKFFRYISTLIRHQRIHTGERPYECSVCGELFRYNSSLVKHWRNHTGERPYKCSECGKSFRYHCRLIRHQRVHTGERPYECSECGKFFRYNSNLIKHWRNHTGERPYECRECGKAFSHKHILVEHQKIHSGERPYECSECQKAFIRKSHLVHHQKIHSEERLVCSMNVGNSLAKTPTSLNIRDFTMEKVYH

SEQ ID NO: 7995 - protein, 545 aa, Homo sapiens
MNLTEGPLAMAEMDPTQGRVVFEDVAIYFSQEEWGHLDEAQRLLYRDVMLENLALLSSLGSWHGAEDEEAPSQQGFSVGVSEVTASKPCLSSQKVHPSETCGPPLKDILCLVEHNGIHPEQHIYICEAELFQHPKQQIGENLSRGDDWIPSFGKNHRVHMAEEIFTCMEGWKDLPATSCLLQHQGPQSEWKPYRDTEDREAFQTGQNDYKCSECGKTFTCSYSFVEHQKIHTGERSYECNKCGKFFKYSANFMKHQTVHTSERTYECRECGKSFMYNYRLMRHKRVHTGERPYECNTCGKFFRYSSTFVRHQRVHTGERPYECRECGKFFMDSSTLIKHQRVHTGERPYKCNDCGKFFRYISTLIRHQRIHTGERPYECSVCGELFRYNSSLVKHWRNHTGERPYKCSECGKSFRYHCRLIRHQRVHTGERPYECSECGKFFRYNSNLIKHWRNHTGERPYECRECGKAFSHKHILVEHQKIHSGERPYECSECQKAFIRKSHLVHHQKIHSEERLVCSMNVGNSLAKTPTSLNIRDFTMEKVYH

SEQ ID NO: 7996 - protein, 483 aa, Homo sapiens
MKRHEMVAKHLVMFYYFAQHLWPEQNIRDSFQKVTLRRYRKCGYENLQLRKGCKSVVECKQHKGDYSGLNQCLKTTLSKIFQCNKYVEVFHKISNSNRHKMRHTENKHFKCKECRKTFCMLSHLTQHKRIQTRVNFYKCEAYGRAFNWSSTLNKHKRIHTGEKPYKCKECGKAFNQTSHLIRHKRIHTEEKPYKCEECGKAFNQSSTLTTHNIIHTGEIPYKCEKCVRAFNQASKLTEHKLIHTGEKRYECEECGKAFNRSSKLTEHKYIHTGEKLYKCEECGKAFNQSSTLTTHKRIHSGEKPYKCEECGKAFKQFSNLTDHKKIHTGEKPYKCEECGKAFNQLSNLTRHKVIHTGEKPYKCGECGKAFNQSSALNTHKIIHTGENPHKCRESGKVFHLSSKLSTCKKIHTGEKLYKCEECGKAFNRSSTLIGHKRIHTGEKPYKCEECGKAFNQSSTLTTHKIIHTEEKQYKCDECGKAST

SEQ ID NO: 7997 - protein, 914 aa, Homo sapiens
MFPVFSGCFQELQEKNKSLELVSFEEVAVHFTWEEWQDLDDAQRTLYRDVMLETYSSLVSLGHYITKPEMIFKLEQGAEPWIVEETPNLRLSAVQIIDDLIERSHESHDRFFWQIVITNSNTSTQERVELGKTFNLNSNHVLNLIINNGNSSGMKPGQFNDCQNMLFPIKPGETQSGEKPHVCDITRRSHRHHEHLTQHHKIQTLLQTFQCNEQGKTFNTEAMFFIHKRVHIVQTFGKYNEYEKACNNSAVIVQVITQVGQPTCCRKSDFTKHQQTHTGEKPYECVECEKPSISKSDLMLQCKMPTEEKPYACNWCEKLFSYKSSLIIHQRIHTGEKPYGCNECGKTFRRKSFLTLHERTHTGDKPYKCIECGKTFHCKSLLTLHHRTHSGEKPYQCSECGKTFSQKSYLTIHHRTHTGEKPYACDHCEEAFSHKSRLTVHQRTHTGEKPYECNECGKPFINKSNLRLHQRTHTGEKPYECNECGKTFHRKSFLTIHQWTHTGEKPYECNECGKTFRCKSFLTVHQRTHAGEKPYACNECGKTYSHKSYLTVHHRTHTGEKPYECNECGKSFHCKSFLTIHQRTHAGKKPYECNECEKTFINKLNLGIHKRTHTGERPYECNECGKTFRQKSNLSTHQGTHTGEKPYVCNECGKTFHRKSFLTIHQRTHTGKNRMDVMNVEKLFVRNHTLLYIRELTPGKSPMNVMNVENPFIRRQIFRSIKVFTRGRNPMNVANVEKPCQKSVLTVHHRTHTGEKPYECNECGKTFCHKSNLSTHQGTHSGEKPYECDECRKTFYDKTVLTIHQRTHTGEKPFECKECRKTFSQKSKLFVHHRTHTGEKPFRCNECRKTFSQKSGLSIHQRTHTGEKPYECKECGKTFCQKSHLSRHQQTHIGEKSDVAEAGYVFPQNHSFFP

SEQ ID NO: 7998 - protein, 1812 aa, Homo sapiens
MAVDSAMELLFLDTFKHPSAEQSSHIDVVRFPCVVYINEVRVIPPGVRAHSSLPDNRAYGETSPHTFQLDLFFNNVSKPSAPVFDRLGSLEYDENTSIIFRPNSKVNTDGLVLRGWYNCLTLAIYGSVDRVISHDRDSPPPPPPPPPPPQPQPSLKRNPKHADGEKEDQFNGSPPRPQPRGPRTPPGPPPPDDDEDDPVPLPVSGDKEEDAPHREDYFEPISPDRNSVPQEGQYSDEGEVEEEQQEEGEEDEDDVDVEEEEDEDEDDRRTVDSIPEEEEEDEEEEGEEDEEGEGDDGYEQISSDEDGIADLERETFKYPNFDVEYTAEDLASVPPMTYDPYDRELVPLLYFSCPYKTTFEIEISRMKDQGPDKENSGAIEASVKLTELLDLYREDRGAKWVTALEEIPSLIIKGLSYLQLKNTKQDSLGQLVDWTMQALNLQVALRQPIALNVRQLKAGTKLVSSLAECGAQGVTGLLQAGVISGLFELLFADHVSSSLKLNAFKALDSVISMTEGMEAFLRGRQNEKSGYQKLLELILLDQTVRVVTAGSAILQKCHFYEVLSEIKRLGDHLAEKTSSLPNHSEPDHDTDAGLERTNPEYENEVEASMDMDLLESSNISEGEIERLINLLEEVFHLMETAPHTMIQQPVKSFPTMARITGPPERDDPYPVLFRYLHSHHFLELVTLLLSIPVTSAHPGVLQATKDVLKFLAQSQKGLLFFMSEYEATNLLIRALCHFYDQDEEEGLQSDGVIDDAFALWLQDSTQTLQCITELFSHFQRCTASEETDHSDLLGTLHNLYLITFNPVGRSAVGHVFSLEKNLQSLITLMEYYSKEALGDSKSKKSVAYNYACILILVVVQSSSDVQMLEQHAASLLKLCKADENNAKLQELGKWLEPLKNLRFEINCIPNLIEYVKQNIDNLMTPEGVGLTTALRVLCNVACPPPPVEGQQKDLKWNLAVIQLFSAEGMDTFIRVLQKLNSILTQPWRLHVNMGTTLHRVTTISMARCTLTLLKTMLTELLRGGSFEFKDMRVPSALVTLHMLLCSIPLSGRLDSDEQKIQNDIIDILLTFTQGVNEKLTISEETLANNTWSLMLKEVLSSILKVPEGFFSGLILLSELLPLPLPMQTTQVIEPHDISVALNTRKLWSMHLHVQAKLLQEIVRSFSGTTCQPIQHMLRRICVQLCDLASPTALLIMRTVLDLIVEDLQSTSEDKEKQYTSQTTRLLALLDALASHKACKLAILHLINGTIKGDERYAEIFQDLLALVRSPGDSVIRQQCVEYVTSILQSLCDQDIALILPSSSEGSISELEQLSNSLPNKELMTSICDCLLATLANSESSYNCLLTCVRTMMFLAEHDYGLFHLKSSLRKNSSALHSLLKRVVSTFSKDTGELASSFLEFMRQILNSDTIGCCGDDNGLMEVEGAHTSRTMSINAAELKQLLQSKEESPENLFLELEKLVLEHSKDDDNLDSLLDSVVGLKQMLESSGDPLPLSDQDVEPVLSAPESLQNLFNNRTAYVLADVMDDQLKSMWFTPFQAEEIDTDLDLVKVDLIELSEKCCSDFDLHSELERSFLSEPSSPGRTKTTKGFKLGKHKHETFITSSGKSEYIEPAKRAHVVPPPRGRGRGGFGQGIRPHDIFRQRKQNTSRPPSMHVDDFVAAESKEVVPQDGIPPPKRPLKVSQKISSRGGFSGNRGGRGAFHSQNRFFTPPASKGNYSRREGTRGSSWSAQNTPRGNYNESRGGQSNFNRGPLPPLRPLSSTGYRPSPRDRASRGRGGLGPSWASANSGSGGSRGKFVSGGSGRGRHVRSFTR

SEQ ID NO: 7999 - protein, 1377 aa, Homo sapiens
MAVDSAMELLFLDTFKHPSAEQSSHIDVVRFPCVVYINEVRVIPPGVRAHSSLPDNRAYGETSPHTFQLDLFFNNVSKPSAPVFDRLGSLEYDENTSIIFRPNSKVNTDGLVLRGWYNCLTLAIYGSVDRVISHDRDSPPPPPPPPPPPQPQPSLKRNPKHADGEKEDQFNGSPPRPQPRGPRTPPGPPPPDDDEDDPVPLPVSGDKEEDAPHREDYFEPISPDRNSVPQEGQYSDEGEVEEEQQEEGEEDEDDVDVEEEEDEDEDDRRTVDSIPEEEEEDEEEEGEEDEEGEGDDGYEQISSDEDGIADLERETFKYPNFDVEYTAEDLASVPPMTYDPYDRELVPLLYFSCPYKTTFEIEISRMKDQGPDKENSGAIEASVKLTELLDLYREDRGAKWVTALEEIPSLIIKGLSYLQLKNTKQDSLGQLVDWTMQALNLQVALRQPIALNVRQLKAGTKLVSSLAECGAQGVTGLLQAGVISGLFELLFADHVSSSLKLNAFKALDSVISMTEGMEAFLRGRQNEKSGYQKLLELILLDQTVRVVTAGSAILQKCHFYEVLSEIKRLGDHLAEKTSSLPNHSEPDHDTDAGLERTNPEYENEVEASMDMDLLESSNISEGEIERLINLLEEVFHLMETAPHTMIQQPVKSFPTMARITGPPERDDPYPVLFRYLHSHHFLELVTLLLSIPVTSAHPGVLQATKDVLKFLAQSQKGLLFFMSEYEATNLLIRALCHFYDQDEEEGLQSDGVIDDAFALWLQDSTQTLQCITELFSHFQRCTASEETDHSDLLGTLHNLYLITFNPVGRSAVGHVFSLEKNLQSLITLMEYYSKEALGDSKSKKSVAYNYACILILVVVQSSSDVQMLEQHAASLLKLCKADENNAKLQELGKWLEPLKNLRFEINCIPNLIEYVKQNIDNLMTPEGVGLTTALRVLCNVACPPPPVEGQQKDLKWNLAVIQLFSAEGMDTFIRVLQKLNSILTQPWRLHVNMGTTLHRVTTISMARCTLTLLKTMLTELLRGGSFEFKDMRVPSALVTLHMLLCSIPLSGRLDSDEQKIQNDIIDILLTFTQGVNEKLTISEETLANNTWSLMLKEVLSSILKVPEGFFSGLILLSELLPLPLPMQTTQVIEPHDISVALNTRKLWSMHLHVQAKLLQEIVRSFSGTTCQPIQHMLRRICVQLCDLASPTALLIMRTVLDLIVEDLQSTSEDKEKQYTSQTTRLLALLDALASHKACKLAILHLINGTIKGDERYAEIFQDLLALVRSPGDSVIRQQCVEYVTSILQSLCDQDIALILPSSSEGSISELEQLSNSLPNKELMTSICDCLLATLANSESSYNCLLTCVRTMMFLAEHDYGLFHLKRDAVEMIMVSWK

SEQ ID NO: 8000 - protein, 1797 aa, Homo sapiens
MAVDSAMELLFLDTFKHPSAEQSSHIDVVRFPCVVYINEVRVIPPGVRAHSSLPDNRAYGETSPHTFQLDLFFNNVSKPSAPVFDRLGSLEYDENTSIIFRPNSKVNTDGLVLRGWYNCLTLAIYGSVDRVISHDRDSPPPPPPPPPPPQPQPSLKRNPKHADGEKEDQFNGSPPRPQPRGPRTPPGPPPPDDDEDDPVPLPVSGDKEEDAPHREDYFEPISPDRNSVPQEGQYSDEGEVEEEQQEEGEEDEDDVDVEEEEDEDEDDRRTVDSIPEEEEEDEEEEGEEDEEGEGDDGYEQISSDEDGIADLERETFKYPNFDVEYTAEDLASVPPMTYDPYDRELVPLLYFSCPYKTTFEIEISRMKDQGPDKENSGAIEASVKLTELLDLYREDRGAKWVTALEEIPSLIIKGLSYLQLKNTKQDSLGQLVDWTMQALNLQVALRQPIALNVRQLKAGTKLVSSLAECGAQGVTGLLQAGVISGLFELLFADHVSSSLKLNAFKALDSVISMTEGMEAFLRGRQNEKSGYQKLLELILLDQTVRVVTAGSAILQKCHFYEVLSEIKRLGDHLAEKTSSLPNHSEPDHDTDAGLERTNPEYENEVEASMDMDLLESSNISEGEIERLINLLEEVFHLMETAPHTMIQQPVKSFPTMARITGPPERDDPYPVLFRYLHSHHFLELVTLLLSIPVTSAHPGVLQATKDVLKFLAQSQKGLLFFMSEYEATNLLIRALCHFYDQDEEEGLQSDGVIDDAFALWLQDSTQTLQCITELFSHFQRCTASEETDHSDLLGTLHNLYLITFNPVGRSAVGHVFSLEKNLQSLITLMEYYSKEALGDSKSKKSVAYNYACILILVVVQSSSDVQMLEQHAASLLKLCKADENNAKLQELGKWLEPLKNLRFEINCIPNLIEYVKQNIDNLMTPEGVGLTTALRVLCNVACPPPPVEGQQKDLKWNLAVIQLFSAEGMDTFIRVLQKLNSILTQPWRLHVNMGTTLHRVTTISMARCTLTLLKTMLTELLRGGSFEFKDMRVPSALVTLHMLLCSIPLSGRLDSDEQKIQNDIIDILLTFTQGVNEKLTISEETLANNTWSLMLKEVLSSILKVPEGFFSGLILLSELLPLPLPMQTTQVIEPHDISVALNTRKLWSMHLHVQAKLLQEIVRSFSGTTCQPIQHMLRRICVQLCDLASPTALLIMRTVLDLIVEDLQSTSEDKEKQYTSQTTRLLALLDALASHKACKLAILHLINGTIKGDERYAEIFQDLLALVRSPGDSVIRQQCVEYVTSILQSLCDQDIALILPSSSEGSISELEQLSNSLPNKELMTSICDCLLATLANSESSYNCLLTCVRTMMFLAEHDYGLFHLKSSLRKNSSALHSLLKRVVSTFSKDTGELASSFLEFMRQILNSDTIGCCGDDNGLMEVEGAHTSRTMSINAAELKQLLQSKEESPENLFLELEKLVLEHSKDDDNLDSLLDSVVGLKQMLESSGDPLPLSDQDVEPVLSAPESLQNLFNNRTAYVLADVMDDQLKSMWFTPFQAEEIDTDLDLVKVDLIELSEKCCSDFDLHSELERSFLSEPSSPGRTKTTKGFKLGKHKHETFITSSGKSEYIEPAKRAHVVPPPRGRGRGGFGQGIRPHDIFRQRKQNTSRPPSMHVDDFVAAESKEVVPQDGIPPPKRPLKVSQKEQEAPVGVLRILLEEITMKVVEARAILTEALFHHYDPLVLQVTAQVLGTVLLEVVGDLDLPGLVQIAAVEAQEESLLVEAVVEVVMYAPLHDKNPFGNILTVYEHFTRTIKIRH

SEQ ID NO: 8001 - protein, 1147 aa, Homo sapiens
MAVDSAMELLFLDTFKHPSAEQSSHIDVVRFPCVVYINEVRVIPPGVRAHSSLPDNRAYGETSPHTFQLDLFFNNVSKPSAPVFDRLGSLEYDENTSIIFRPNSKVNTDGLVLRGWYNCLTLAIYGSVDRVISHDRDSPPPPPPPPPPPQPQPSLKRNPKHADGEKEDQFNGSPPRPQPRGPRTPPGPPPPDDDEDDPVPLPVSGDKEEDAPHREDYFEPISPDRNSVPQEGQYSDEGEVEEEQQEEGEEDEDDVDVEEEEDEDEDDRRTVDSIPEEEEEDEEEEGEEDEEGEGDDGYEQISSDEDGIADLERETFKYPNFDVEYTAEDLASVPPMTYDPYDRELVPLLYFSCPYKTTFEIEISRMKDQGPDKENSGAIEASVKLTELLDLYREDRGAKWVTALEEIPSLIIKGLSYLQLKNTKQDSLGQLVDWTMQALNLQVALRQPIALNVRQLKAGTKLVSSLAECGAQGVTGLLQAGVISGLFELLFADHVSSSLKLNAFKALDSVISMTEGMEAFLRGRQNEKSGYQKLLELILLDQTVRVVTAGSAILQKCHFYEVLSEIKRLGDHLAEKTSSLPNHSEPDHDTDAGLERTNPEYENEVEASMDMDLLESSNISEGEIERLINLLEEVFHLMETAPHTMIQQPVKSFPTMARITGPPERDDPYPVLFRYLHSHHFLELVTLLLSIPVTSAHPGVLQATKDVLKFLAQSQKGLLFFMSEYEATNLLIRALCHFYDQDEEEGLQSDGVIDDAFALWLQDSTQTLQCITELFSHFQRCTASEETDHSDLLGTLHNLYLITFNPVGRSAVGHVFSLEKNLQSLITLMEYYSKEALGDSKSKKSVAYNYACILILVVVQSSSDVQMLEQHAASLLKLCKADENNAKLQELGKWLEPLKNLRFEINCIPNLIEYVKQNIDNLMTPEGVGLTTALRVLCNVACPPPPVEGQQKDLKWNLAVIQLFSAEGMDTFIRVLQKLNSILTQPWRLHVNMGTTLHRVTTISMARCTLTLLKTMLTELLRGGSFEFKDMRVPSALVTLHMLLCSIPLSGRLDSDEQKIQNDIIDILLTFTQGVNEKLTISEETLANNTWSLMLKEVLSSILKVPEGFFSGLILLSELLPLPLPMQTTQVSLPYNMHLINDCSNTF

SEQ ID NO: 8002 - protein, 977 aa, Homo sapiens
MASSHSSSPVPQGSSSDVFFKIEVDPSKHIRPVPSLPDVCPKEPTGDSHSLYVAPSLVTDQHRWTVYHSKVNLPAALNDPRLAKRESDFFTKTWGLDFVDTEVIPSFYLPQISKEHFTVYQQEISQREKIHERCKNICPPKDTFERTLLHTHDKSRTDLEQVPKIFMKPDFALDDSLTFNSVLPWSHFNTAGGKGNRDAASSKLLQEKLSHYLDIVEVNIAHQISLRSEAFFHAMTSQHELQDYLRKTSQAVKMLRDKIAQIDKVMCEGSLHILRLALTRNNCVKVYNKLKLMATVHQTQPTVQVLLSTSEFVGALDLIATTQEVLQQELQGIHSFRHLGSQLCELEKLIDKMMIAEFSTYSHSDLNRPLEDDCQVLEEERLISLVFGLLKQRKLNFLEIYGEKMVITAKNIIKQCVINKVSQTEEIDTDVVVKLADQMRMLNFPQWFDLLKDIFSKFTIFLQRVKATLNIIHSVVLSVLDKNQRTRELEEISQQKNAAKDNSLDTEVAYLIHEGMFISDAFGEGELTPIAVDTTSQRNASPNSEPCSSDSVSEPECTTDSSSSKEHTSSSAIPGGVDIMVSEDMKLTDSELGKLANNIQELLYSASDICHDRAVKFLMSRAKDGFLEKLNSMEFITLSRLMETFILDTEQICGRKSTSLLGALQSQAIKFVNRFHEERKTKLSLLLDNERWKQADVPAEFQDLVDSLSDGKIALPEKKSGATEERKPAEVLIVEGQQYAVVGTVLLLIRIILEYCQCVDNIPSVTTDMLTRLSDLLKYFNSRSCQLVLGAGALQVVGLKTITTKNLALSSRCLQLIVHYIPVIRAHFEARLPPKQYSMLRHFDHITKDYHDHIAEISAKLVAIMDSLFDKLLSKYEVKAPVPSACFRNICKQMTKMHEAIFDLLPEEQTQMLFLRINASYKLHLKKQLSHLNVINDGGPQNGLVTADVAFYTGNLQALKGLKDLDLNMAEIWEQKR

SEQ ID NO: 8003 - protein, 966 aa, Homo sapiens
MASSHSSSPVPQGSSSDVFFKIEVDPSKHIRPVPSLPDVCPKEPTGDSHSLYVAPSLVTDQHRWTVYHSKVNLPAALNDPRLAKRESDFFTKTWGLDFVDTEVIPSFYLPQISKEHFTVYQQEISQREKIHERCKNICPPKDTFERTLLHTHDKSRTDLEQVPKIFMKPDFALDDSLTFNSVLPWSHFNTAGGKGNRDAASSKLLQEKLSHYLDIVEVNIAHQISLRSEAFFHAMTSQHELQDYLRKTSQAVKMLRDKIAQIDKVMCEGSLHILRLALTRNNCVKVYNKLKLMATVHQTQPTVQVLLSTSEFVGALDLIATTQEVLQQELQGIHSFRHLGSQLCELEKLIDKMMIAEFSTYSHSDLNRPLEDDCQVLEEERLISLVFGLLKQRKLNFLEIYGEKMVITAKNIIKQCVINKVSQTEEIDTDVVVKLADQMRMLNFPQWFDLLKDIFSKFTIFLQRVKATLNIIHSVVLSVLDKNQRTRELEEISQQKNAAKDNSLDTEVAYLIHEGMFISDAFGEGELTPIAVDTTSQRNASPNSEPCSSDSVSEPECTTDSSSSKEHTSSSAIPGGVDIMVSEDMKLTDSELGKLANNIQELLYSASDICHDRAVKFLMSRAKDGFLEKLNSMEFITLSRLMETFILDTEQICGRKSTSLLGALQSQAIKFVNRFHEERKTKLSLLLDNERWKQADVPAEFQDLVDSLSDGKIALPEKKSGATEERKPAEVLIVEGQQYAVVGTVLLLIRIILEYCQCVDNIPSVTTDMLTRLSDLLKYFNSRSCQLVLGAGALQVVGLKTITTKNLALSSRCLQLIVHYIPVIRAHFEARLPPKQYSMLRHFDHITKDYHDHIAEISAKLVAIMDSLFDKLLSKYEVKAPVPSACFRNICKQMTKMHEAIFDLLPEEQTQMLFLRINASYKLHLKKQLSHLNVINDGGPQNGLVTADVAFYTGNLQALKGLKIWT

SEQ ID NO: 8004 - protein, 824 aa, Homo sapiens
MLPTKNRIKREKIHERCKNICPPKDTFERTLLHTHDKSRTDLEQVPKIFMKPDFALDDSLTFNSVLPWSHFNTAGGKGNRDAASSKLLQEKLSHYLDIVEVNIAHQISLRSEAFFHAMTSQHELQDYLRKTSQAVKMLRDKIAQIDKVMCEGSLHILRLALTRNNCVKVYNKLKLMATVHQTQPTVQVLLSTSEFVGALDLIATTQEVLQQELQGIHSFRHLGSQLCELEKLIDKMMIAEFSTYSHSDLNRPLEDDCQVLEECVINKVSQTEEIDTDVVVKLADQMRMLNFPQWFDLLKDIFSKFTIFLQRVKATLNIIHSVVLSVLDKNQRTRELEEISQQKNAAKDNSLDTEVAYLIHEGMFISDAFGEGELTPIAVDTTSQRNASPNSEPCSSDSVSEPECTTDSSSSKEHTSSSAIPGGVDIMVSEDMKLTDSELGKLANNIQELLYSASDICHDRAVKFLMSRAKDGFLEKLNSMEFITLSRLMETFILDTEQICGRKSTSLLGALQSQAIKFVNRFHEERKTKLSLLLDNERWKQADVPAEFQDLVDSLSDGKIALPEKKSGATEERKPAEVLIVEGQQYAVVGTVLLLIRIILEYCQCVDNIPSVTTDMLTRLSDLLKYFNSRSCQLVLGAGALQVVGLKTITTKNLALSSRCLQLIVHYIPVIRAHFEARLPPKQYSMLRHFDHITKDYHDHIAEISAKLVAIMDSLFDKLLSKYEVKAPVPSACFRNICKQMTKMHEAIFDLLPEEQTQMLFLRINASYKLHLKKQLSHLNVINDGGPQNGLVTADVAFYTGNLQALKGLKDLDLNMAEIWEQKR

SEQ ID NO: 8005 - protein, 965 aa, Homo sapiens
MASSHSSSPVPQGSSSDVFFKIEVDPSKHIRPVPSLPDVCPKEPTVTDQHRWTVYHSKVNLPAALNDPRLAKRESDFFTKTWGLDFVDTEVIPSFYLPQISKEHFTVYQQEISQREKIHERCKNICPPKDTFERTLLHTHDKSRTDLEQVPKIFMKPDFALDDSLTFNSVLPWSHFNTAGGKGNRDAASSKLLQEKLSHYLDIVEVNIAHQISLRSEAFFHAMTSQHELQDYLRKTSQAVKMLRDKIAQIDKVMCEGSLHILRLALTRNNCVKVYNKLKLMATVHQTQPTVQVLLSTSEFVGALDLIATTQEVLQQELQGIHSFRHLGSQLCELEKLIDKMMIAEFSTYSHSDLNRPLEDDCQVLEEERLISLVFGLLKQRKLNFLEIYGEKMVITAKNIIKQCVINKVSQTEEIDTDVVVKLADQMRMLNFPQWFDLLKDIFSKFTIFLQRVKATLNIIHSVVLSVLDKNQRTRELEEISQQKNAAKDNSLDTEVAYLIHEGMFISDAFGEGELTPIAVDTTSQRNASPNSEPCSSDSVSEPECTTDSSSSKEHTSSSAIPGGVDIMVSEDMKLTDSELGKLANNIQELLYSASDICHDRAVKFLMSRAKDGFLEKLNSMEFITLSRLMETFILDTEQICGRKSTSLLGALQSQAIKFVNRFHEERKTKLSLLLDNERWKQADVPAEFQDLVDSLSDGKIALPEKKSGATEERKPAEVLIVEGQQYAVVGTVLLLIRIILEYCQCVDNIPSVTTDMLTRLSDLLKYFNSRSCQLVLGAGALQVVGLKTITTKNLALSSRCLQLIVHYIPVIRAHFEARLPPKQYSMLRHFDHITKDYHDHIAEISAKLVAIMDSLFDKLLSKYEVKAPVPSACFRNICKQMTKMHEAIFDLLPEEQTQMLFLRINASYKLHLKKQLSHLNVINDGGPQNGLVTADVAFYTGNLQALKGLKDLDLNMAEIWEQKR

SEQ ID NO: 8006 - protein, 139 aa, Homo sapiens
MLRHFDHITKDYHDHIAEISAKLVAIMDSLFDKLLSKYEVKAPVPSACFRNICKQMTKMHEAIFDLLPEEQTQMLFLRINASYKLHLKKQLSHLNVINDGGPQNGLVTADVAFYTGNLQALKGLKDLDLNMAEIWEQKR

SEQ ID NO: 8007 - protein, 1490 aa, Homo sapiens
MAGNSLVLPIVLWGRKAPTHCISAVLLTDDGATIVTGCHDGQICLWDLSVELQINPRALLFGHTASITCLSKACASSDKQYIVSASESGEMCLWDVSDGRCIEFTKLACTHTGIQFYQFSVGNQREGRLLCHGHYPEILVVDATSLEVLYSLVSKISPDWISSMSIIRSHRTQEDTVVALSVTGILKVWIVTSEISDMQDTEPIFEEESKPIYCQNCQSISFCAFTQRSLLVVCSKYWRVFDAGDYSLLCSGPSENGQTWTGGDFVSSDKVIIWTENGQSYIYKLPASCLPASDSFRSDVGKAVENLIPPVQHILLDRKDKELLICPPVTRFFYGCREYFHKLLIQGDSSGRLNIWNISDTADKQGSEEGLAMTTSISLQEAFDKLNPCPAGIIDQLSVIPNSNEPLKVTASVYIPAHGRLVCGREDGSIVIVPATQTAIVQLLQGEHMLRRGWPPHRTLRGHRNKVTCLLYPHQVSARYDQRYLISGGVDFSVIIWDIFSGEMKHIFCVHGGEITQLLVPPENCSARVQHCICSVASDHSVGLLSLREKKCIMLASRHLFPIQVIKWRPSDDYLVVGCSDGSVYVWQMDTGALDRCVMGITAVEILNACDEAVPAAVDSLSHPAVNLKQAMTRRSLAALKNMAHHKLQTLATNLLASEASDKGNLPKYSHNSLMVQAIKTNLTDPDIHVLFFDVEALIIQLLTEEASRPNTALISPENLQKASGSSDKGGSFLTGKRAAVLFQQVKETIKENIKEHLLDDEEEDEEIMRQRREESDPEYRSSKSKPLTLLEYNLTMDTAKLFMSCLHAWGLNEVLDEVCLDRLGMLKPHCTVSFGLLSRGGHMSLMLPGYNQPACKLSHGKTEVGRKLPASEGVGKGTYGVSRAVTTQHLLSIISLANTLMSMTNATFIGDHMKKGPTRPPRPSTPDLSKARGSPPTSSNIVQGQIKQVAAPVVSARSDADHSGSDPPSAPALHTCFLVNEGWSQLAAMHCVMLPDLLGLDKFRPPLLEMLARRWQDRCLEVREAAQALLLAELRRIEQAGRKEAIDAWAPYLPQYIDHVISPGVTSEAAQTITTAPDASGPEAKVQEEEHDLVDDDITTGCLSSVPQMKKISTSYEERRKQATAIVLLGVIGAEFGAEIEPPKLLTRPRSSSQIPEGFGLTSGGSNYSLARHTCKALTFLLLQPPSPKLPPHSTIRRTAIDLIGRGFTVWEPYMDVSAVLMGLLELCADAEKQLANITMGLPLSPAADSARSARHALSLIATARPPAFITTIAKEVHRHTALAANTQSQQNMHTTTLARAKGEILRVIEILIEKMPTDVVDLLVEVMDIIMYCLEGSLVKKKGLQECFPAICRFYMVSYYERNHRIAVGARHGSVALYDIRTGKCQTIHGHKGPITAVAFAPDGRYLATYSNTDSHISFWQMNTSLLGSIGMLNSAPQLRCIKTYQVPPVQPASPGSHNALKLARLIWTSNRNVILMAHDGKEHRFMV

SEQ ID NO: 8008 - protein, 1457 aa, Homo sapiens
MAGNSLVLPIVLWGRKAPTHCISAVLLTDDGATIVTGCHDGQICLWDLSVELQINPRALLFGHTASITCLSKACASSDKQYIVSASESGEMCLWDVSDGRCIEFTKLACTHTGIQFYQFSVGNQREGRLLCHGHYPEILVVDATSLEVLYSLVSKISPDWISSMSIIRSHRTQEDTVVALSVTGILKVWIVTSEISDMQDTEPIFEEESKPIYCQNCQSISFCAFTQRSLLVVCSKYWRVFDAGDYSLLCSGPSENGQTWTGGDFVSSDKVIIWTENGQSYIYKLPASCLPASDSFRSDVGKAVENLIPPVQHILLDRKDKELLICPPVTRFFYGCREYFHKLLIQGDSSGRLNIWNISDTADKQGSEEGLAMTTSISLQEAFDKLNPCPAGIIDQLSVIPNSNEPLKVTASVYIPAHGRLVCGREDGSIVIVPATQTAIVQLLQGEHMLRRGWPPHRTLRGHRNKVTCLLYPHQVSARYDQRYLISGGVDFSVIIWDIFSGEMKHIFCVHGGEITQLLVPPENCSARVQHCICSVASDHSVGLLSLREKKCIMLASRHLFPIQVIKWRPSDDYLVVGCSDGSVYVWQMDTGALDRCVMGITAVEILNACDEAVPAAVDSLSHPAVNLKQAMTRRSLAALKNMAHHKLQTLATNLLASEASDKGNLPKYSHNSLMVQAIKTNLTDPDIHVLFFDVEALIIQLLTEEASRPNTALISPENLQKASGSSDKGGSFLTGKRAAVLFQQVKETIKENIKEHLLDDEEEDEEIMRQRREESDPEYRSSKSKPLTLLEYNLTMDTAKLFMSCLHAWGLNEVLDEVCLDRLGMLKPHCTVSFGLLSRGGHMSLMLPGYNQPACKLSHGKTEVGRKLPASEGVGKGTYGVSRAVTTQHLLSIISLANTLMSMTNATFIGDHMKKGPTRPPRPSTPDLSKARGSPPTSSNIVQGQIKQGWSQLAAMHCVMLPDLLGLDKFRPPLLEMLARRWQDRCLEVREAAQALLLAELRRIEQAGRKEAIDAWAPYLPQYIDHVISPGVTSEAAQTITTAPDASGPEAKVQEEEHDLVDDDITTGCLSSVPQMKKISTSYEERRKQATAIVLLGVIGAEFGAEIEPPKLLTRPRSSSQIPEGFGLTSGGSNYSLARHTCKALTFLLLQPPSPKLPPHSTIRRTAIDLIGRGFTVWEPYMDVSAVLMGLLELCADAEKQLANITMGLPLSPAADSARSARHALSLIATARPPAFITTIAKEVHRHTALAANTQSQQNMHTTTLARAKGEILRVIEILIEKMPTDVVDLLVEVMDIIMYCLEGSLVKKKGLQECFPAICRFYMVSYYERNHRIAVGARHGSVALYDIRTGKCQTIHGHKGPITAVAFAPDGRYLATYSNTDSHISFWQMNTSLLGSIGMLNSAPQLRCIKTYQVPPVQPASPGSHNALKLARLIWTSNRNVILMAHDGKEHRFMV

SEQ ID NO: 8009 - protein, 180 aa, Homo sapiens
MESWWGLPCLAFLCFLMHARGQRDFDLADALDDPEPTKKPNSDIYPKPKPPYYPQPENPDSGGNIYPRPKPRPQPQPGNSGNSGGYFNDVDRDDGRYPPRPRPRPPAGGGGGGYSSYGNSDNTHGGDHHSTYGNPEGNMVAKIVSPIVSVVVVTLLGAAASYFKLNNRRNCFRTHEPENV

SEQ ID NO: 8010 - protein, 181 aa, Homo sapiens
MESWWGLPCLAFLCFLMHARGQRDFDLADALDDPEPTKKPNSDIYPKPKPPYYPQPENPDSGGNIYPRPKPRPQPQPGNSGNSGGSYFNDVDRDDGRYPPRPRPRPPAGGGGGGYSSYGNSDNTHGGDHHSTYGNPEGNMVAKIVSPIVSVVVVTLLGAAASYFKLNNRRNCFRTHEPENV

SEQ ID NO: 8011 - protein, 195 aa, Homo sapiens
MESWWGLPCLAFLCFLMHARGQRDFDLADALDDPEPTKKPNSDIYPKPKPPYYPQPENPDSGGNIYPRPKPRPQPQPGNSGNSGGYFNDVDRDDGRYPPRPRPRPPAGGGGGGYSSYGNSDNTHGRGGYRLNSRYGNTYGGDHHSTYGNPEGNMVAKIVSPIVSVVVVTLLGAAASYFKLNNRRNCFRTHEPENV

SEQ ID NO: 8012 - protein, 769 aa, Homo sapiens
MPASWTSPQKSSALAPEDHGSSYEGSVSFRDVAIDFSREEWRHLDLSQRNLYRDVMLETYSHLLSVGYQVPKPEVVMLEQGKEPWALQGERPRHSCPGEKLWDHNQHRKIIGYKPASSQDQKIYSGEKSYECAEFGKSFTWKSQFKVHLKVPTGEKLYVCIECGRAFVQKPEFITHQKTHMREKPYKCNECGKSFFQVSSLFRHHRIHTGEKLYECSECGKGFPYNSDLSIHEKIHTGERHHECTDCGKAFTQKSTLKIHQKIHTGERSYICIECGQAFIQKTQLIAHRRIHSGEKPYECNNCGKSFISKSQLQVHQRVHTRVKPYICTEYGKVFSNNSNLITHEKIQSREKSSICTECGKAFTYRSELIIHQRIHTGEKPYECSDCGRAFTQKSALTVHQRIHTGEKSYICMKCGLAFIRKAHLITHQIIHTGEKPYKCGHCGKLFTSKSQLHVHKRIHTGEKPYVCNKCGKAFTNRSNLITHQKTHTGEKSYICSKCGKAFTQRSDLITHQRIHTGEKPYECNTCGKAFTQKSNLNIHQKIHTGERQYECHECGKAFNQKSILIVHQKIHTGEKPYVCTECGRAFIRKSNFITHQRIHTGEKPYECSDCGKSFTSKSQLLVHQPVHTGEKPYVCAECGKAFSGRSNLSKHQKTHTGEKPYICSECGKTFRQKSELITHHRIHTGEKPYECSDCGKSFTKKSQLQVHQRIHTGEKPYVCAECGKAFSNRSNLNKHQTTHTGDKPYKCGICGKGFVQKSVFSVHQSSHA

SEQ ID NO: 8013 - protein, 428 aa, Homo sapiens
MRDEVAEKEKADINVTLVFQGYENTPIMVCVDGIVFSKPDLVTCLEQRKKPWSMKHPGLTQHNIVHTGDKPYKCKDCGKIFKWSSNLTIHQRIHSGEKPYKCEECGKAFKQSSKLNEHMRAHTGEKFYKCEECGKAFKHPSGLTLHKRIHTGENPYKFEECDKAFYWVLSFTKHMIIHRGEKPYKYQECGKAFKWSSNLTIHKRIHTGEKPCKCEECGKACKQSLGLTIQKRIHTEEKPYKCEECGSSNLTIYKKIHAGEKPYNCEKCGKAFYCSSNLIQNNIVHAEEKHYKCQECGKAFKKSLDLNVHKIIHSGEKPYRYEECGKITHSGEESYKCEECGKGFYCSSSLTKHMIVHTEEKLYKCEECGKAFKWSSELTIHQRIRTEEKPYKCEECVRVFKHSSKLNEHKRNHTGEKPYKCEACGKAF

SEQ ID NO: 8014 - protein, 688 aa, Homo sapiens
MARKLVMFRDVAIDFSQEEWECLDSAQRDLYRDVMLENYSNLVSLDLPSRCASKDLSPEKNTYETELSQWEMSDRLENCDLEESNSRDYLEAKGKMEKQQENQKEYFRQGMIIYDKMSIFNQHTYLSQHSRCHSTEKPYKCKECGKAFRRASHLTQHQSIHTGEKPYECKQCGKAFSRDSQLSLHQRLHTGEKPYACKECGKAFTQSSQLILHHRIHTGEKPYKCEECGKAFIRSSQLTRHQKVHTGEKPYECKECGKAFTQNSQLTLHQRLHTGEKLYECKECRKVFTQLSQLILHKRIHTGEKPYECKECGKAFICGSQLSQHQKIHNGEKPYECKECGRAFIRGSLLMQHQRIHTGEKPYKCEECGKAFIRGSQLTQHQRIHTNEKPYECKECGKMFSHGSQLTQHQRIHTGEKPYQCKECGKAFNRGSLLTRHQRIHTGEKPYECKECGKTFSRGSELTQHERIHTGEKPYECKECGKSFIRGSQLTQHQRIHTGEKPYECKECRMAFTQSSHLSQHQRLHTGEKPYVCNECGKAFARGLLLIQHQRIHTGEKPYQCKECGKAFIRGSQLTQHQRIHTGEKPYECKECGKAFSHGSQLTLHQRIHTGEKPYECRECRKAFTQSSHLSRHQRIHTGEKPYQCKECGKAFTRGSQLTQHQRIHISEKSFEYKECGIDFSHGSQVYM

SEQ ID NO: 8015 - protein, 536 aa, Homo sapiens
MARKLVMFRDVAIDFSQEEWECLDSAQRDLYRDVMLENYSNLVSLDLPSRCASKDLSPEKNTYETELSQWEMSDRLENCDLEESNSRDYLEAKGKMEKQQENQKEYFRQGMIIYDKMSIFNQHTYLSQHSRCHSTEKPYKCKECGKAFRRASHLTQHQSIHTGEKPYECKQCGKAFSRDSQLSLHQRLHTGEKPYACKECGKAFTQSSQLILHHRIHTGEKPYKCEECGKAFIRSSQLTRHQKVHTGEKPYECKECGKAFTQNSQLTLHQRLHTGEKLYECKECRKVFTQLSQLILHKRIHTGEKPYECKECGKAFICGSQLSQHQKIHNGEKPYECKECGRAFIRGSLLMQHQRIHTGEKPYKCEECGKAFIRGSQLTQHQRIHTNEKPYECKECGKMFSHGSQLTQHQRIHTGEKPYQCKECGKAFNRGSLLTRHQRIHTGEKPYECKECGKTFSRGSELTQHERIHTAFLAGQQDRSDIYMSRRFTKSIFPVFFSVPTMWTSKLELRYSHGDFENGIWVLWIMEQKYRRSLQP

SEQ ID NO: 8016 - protein, 1090 aa, Homo sapiens
MNMEGLVMFQDLSIDFSQEEWECLDAAQKDLYRDVMMENYSSLVSLGLSIPKPDVISLLEQGKEPWMVSRDVLGGWCRDSEFRCKTKDSCLPKEIYEVTSSQWVRMEKCHSLVGSSVRDDWECKGQFQHQDINQERYLEKAIMTYETTPTFCLQTSLTLHHRIHPGEKLYKSTECMAFKYGSELTQQQETHTGEKLYKCKECGKAFHHFSYLVKHQRIHTGEKPCACKEYGKAFISGSHLIQHQKMYTDERPHECQESVKAFRPSAHLIQHWRIHTGDKPYECKECGKSFTSGSTLNQHQQIHTGEKPYHCKQCGKSFTVGSTLIRHQQIHTGEKPYDCKECGKSFASGSALIRHQRIHTGEKPYDCKECGKSFTFHSALIRHQRIHTGEKPYDCKECGKSFTFRSGLIGHQAIHTGEKPYDCKECGKSFTAGSTLIQHQRIHTGEKPYDCKECGKSFASGSALLQHQRIHTGEKPYCCKECGKSFTFRSTRNRHQRIHTGEKPYNCKECGKSFASGSALLQHQRIHTGEKPYHCKECGKSFTFRSGLIGHQAVHTGEKPYDCKECGKSFTSRSALIQHQRIHTGEKPYHCKECGKSFTVGSTLLQHQQIHTGEKPYDCKECGKAFRLRLRLTQHQQIHTGEKPYQCQECGKAFVSVSGLTQHHRIHTGEKPYECPDCGKAFRQRTYLNQHRRIHTGEKPYECKECGKSFTFCSGLIQHQQNHTDEKPYDGKECGKSFTSHSTLIQHQQIHTGEKPYDCKECGKSFTSHSTLIQHQQIHTGEKLYDCKECGKSFTSHSTLIQHQPLHTGEKPYHCKECGKSFTLRSALIQHRPVHTGEKRYSCKECGKSFTSRSTLIEHQRIHTGEKPYHCKECGKSFAFRSAIIQHRRIHTGEKPYDCKECGKAFRRRSKLTQHQRIHTGEKPYRCHECGKAFVRFSGLTKHHSIHTGEKPYECKTCGKSFRQRTHLTLHQRIHTGDRPYECKECGKSFTCGSELIRHQRTHTGEKPYDCKECGKAFRCPSQLSQHKRIHTGEKTYQCPECGKAFFYASGLSRHQSVHTGEKPYECKTCGKAFKQLTQLTRHQRIHDLT

SEQ ID NO: 8017 - protein, 654 aa, Homo sapiens
MAFRDVAVDFTQDEWRLLSPAQRTLYREVMLENYSNLVSLGISFSKPELITQLEQGKETWREEKKCSPATCPADPEPELYLDPFCPPGFSSQKFPMQHVLCNHPPWIFTCLCAEGNIQPGDPGPGDQEKQQQASEGRPWSDQAEGPEGEGAMPLFGRTKKRTLGAFSRPPQRQPVSSRNGLRGVELEASPAQSGNPEETDKLLKRIEVLGFGTVNCGECGLSFSKMTNLLSHQRIHSGEKPYVCGVCEKGFSLKKSLARHQKAHSGEKPIVCRECGRGFNRKSTLIIHERTHSGEKPYMCSECGRGFSQKSNLIIHQRTHSGEKPYVCRECGKGFSQKSAVVRHQRTHLEEKTIVCSDCGLGFSDRSNLISHQRTHSGEKPYACKECGRCFRQRTTLVNHQRTHSKEKPYVCGVCGHSFSQNSTLISHRRTHTGEKPYVCGVCGRGFSLKSHLNRHQNIHSGEKPIVCKDCGRGFSQQSNLIRHQRTHSGEKPMVCGECGRGFSQKSNLVAHQRTHSGERPYVCRECGRGFSHQAGLIRHKRKHSREKPYMCRQCGLGFGNKSALITHKRAHSEEKPCVCRECGQGFLQKSHLTLHQMTHTGEKPYVCKTCGRGFSLKSHLSRHRKTTSVHHRLPVQPDPEPCAGQPSDSLYSL

SEQ ID NO: 8018 - protein, 653 aa, Homo sapiens
MAFRDVAVDFTQDEWRLLSPAQRTLYREVMLENYSNLVSLGISFSKPELITQLEQGKETWREEKKCSPATCPDPEPELYLDPFCPPGFSSQKFPMQHVLCNHPPWIFTCLCAEGNIQPGDPGPGDQEKQQQASEGRPWSDQAEGPEGEGAMPLFGRTKKRTLGAFSRPPQRQPVSSRNGLRGVELEASPAQSGNPEETDKLLKRIEVLGFGTVNCGECGLSFSKMTNLLSHQRIHSGEKPYVCGVCEKGFSLKKSLARHQKAHSGEKPIVCRECGRGFNRKSTLIIHERTHSGEKPYMCSECGRGFSQKSNLIIHQRTHSGEKPYVCRECGKGFSQKSAVVRHQRTHLEEKTIVCSDCGLGFSDRSNLISHQRTHSGEKPYACKECGRCFRQRTTLVNHQRTHSKEKPYVCGVCGHSFSQNSTLISHRRTHTGEKPYVCGVCGRGFSLKSHLNRHQNIHSGEKPIVCKDCGRGFSQQSNLIRHQRTHSGEKPMVCGECGRGFSQKSNLVAHQRTHSGERPYVCRECGRGFSHQAGLIRHKRKHSREKPYMCRQCGLGFGNKSALITHKRAHSEEKPCVCRECGQGFLQKSHLTLHQMTHTGEKPYVCKTCGRGFSLKSHLSRHRKTTSVHHRLPVQPDPEPCAGQPSDSLYSL

SEQ ID NO: 8019 - protein, 559 aa, Homo sapiens
MQHVLCNHPPWIFTCLCAEGNIQPGDPGPGDQEKQQQASEGRPWSDQAEGPEGEGAMPLFGRTKKRTLGAFSRPPQRQPVSSRNGLRGVELEASPAQSGNPEETDKLLKRIEVLGFGTVNCGECGLSFSKMTNLLSHQRIHSGEKPYVCGVCEKGFSLKKSLARHQKAHSGEKPIVCRECGRGFNRKSTLIIHERTHSGEKPYMCSECGRGFSQKSNLIIHQRTHSGEKPYVCRECGKGFSQKSAVVRHQRTHLEEKTIVCSDCGLGFSDRSNLISHQRTHSGEKPYACKECGRCFRQRTTLVNHQRTHSKEKPYVCGVCGHSFSQNSTLISHRRTHTGEKPYVCGVCGRGFSLKSHLNRHQNIHSGEKPIVCKDCGRGFSQQSNLIRHQRTHSGEKPMVCGECGRGFSQKSNLVAHQRTHSGERPYVCRECGRGFSHQAGLIRHKRKHSREKPYMCRQCGLGFGNKSALITHKRAHSEEKPCVCRECGQGFLQKSHLTLHQMTHTGEKPYVCKTCGRGFSLKSHLSRHRKTTSVHHRLPVQPDPEPCAGQPSDSLYSL

SEQ ID NO: 8020 - protein, 591 aa, Homo sapiens
MCNGRKTVLADPEPELYLDPFCPPGFSSQKFPMQHVLCNHPPWIFTCLCAEGNIQPGDPGPGDQEKQQQASEGRPWSDQAEGPEGEGAMPLFGRTKKRTLGAFSRPPQRQPVSSRNGLRGVELEASPAQSGNPEETDKLLKRIEVLGFGTVNCGECGLSFSKMTNLLSHQRIHSGEKPYVCGVCEKGFSLKKSLARHQKAHSGEKPIVCRECGRGFNRKSTLIIHERTHSGEKPYMCSECGRGFSQKSNLIIHQRTHSGEKPYVCRECGKGFSQKSAVVRHQRTHLEEKTIVCSDCGLGFSDRSNLISHQRTHSGEKPYACKECGRCFRQRTTLVNHQRTHSKEKPYVCGVCGHSFSQNSTLISHRRTHTGEKPYVCGVCGRGFSLKSHLNRHQNIHSGEKPIVCKDCGRGFSQQSNLIRHQRTHSGEKPMVCGECGRGFSQKSNLVAHQRTHSGERPYVCRECGRGFSHQAGLIRHKRKHSREKPYMCRQCGLGFGNKSALITHKRAHSEEKPCVCRECGQGFLQKSHLTLHQMTHTGEKPYVCKTCGRGFSLKSHLSRHRKTTSVHHRLPVQPDPEPCAGQPSDSLYSL

SEQ ID NO: 8021 - protein, 657 aa, Homo sapiens
MAHMAFRDVAVDFTQDEWRLLSPAQRTLYREVMLENYSNLVSLGISFSKPELITQLEQGKETWREEKKCSPATCPADPEPELYLDPFCPPGFSSQKFPMQHVLCNHPPWIFTCLCAEGNIQPGDPGPGDQEKQQQASEGRPWSDQAEGPEGEGAMPLFGRTKKRTLGAFSRPPQRQPVSSRNGLRGVELEASPAQSGNPEETDKLLKRIEVLGFGTVNCGECGLSFSKMTNLLSHQRIHSGEKPYVCGVCEKGFSLKKSLARHQKAHSGEKPIVCRECGRGFNRKSTLIIHERTHSGEKPYMCSECGRGFSQKSNLIIHQRTHSGEKPYVCRECGKGFSQKSAVVRHQRTHLEEKTIVCSDCGLGFSDRSNLISHQRTHSGEKPYACKECGRCFRQRTTLVNHQRTHSKEKPYVCGVCGHSFSQNSTLISHRRTHTGEKPYVCGVCGRGFSLKSHLNRHQNIHSGEKPIVCKDCGRGFSQQSNLIRHQRTHSGEKPMVCGECGRGFSQKSNLVAHQRTHSGERPYVCRECGRGFSHQAGLIRHKRKHSREKPYMCRQCGLGFGNKSALITHKRAHSEEKPCVCRECGQGFLQKSHLTLHQMTHTGEKPYVCKTCGRGFSLKSHLSRHRKTTSVHHRLPVQPDPEPCAGQPSDSLYSL

SEQ ID NO: 8022 - protein, 273 aa, Homo sapiens
MSPKRDGLGTGDGLHSQVLQEQVSTGDNLHECDSQGPSKDTLVREGKTYKCKECGSVFNKNSLLVRHQQIHTGVKPYECQECGKAFPEKVDFVRPMRIHTGEKPCKCVECGKVFNRRSHLLCYRQIHTGEKPYECSECGKTFSYHSVFIQHRVTHTGEKLFGCKECGKTFYYNSSLTRHMKIHTGEKPCKCSECGKTFTYRSVFFRHSMTHTAGKPYECKECGKGFYYSYSLTRHTRSHTGEKPYECLEHRKDFGYHSAFAQQSKIHSGGKNL

SEQ ID NO: 8023 - protein, 657 aa, Homo sapiens
MIESQEPVTFEDVAVDFTQEEWQQLNPAQKTLHRDVMLETYNHLVSVGCSGIKPDVIFKLEHGKDPWIIESELSRWIYPDRVKGLESSQQIISGELLFQREILERAPKDNSLYSVLKIWHIDNQMDRYQGNQDRVLRQVTVISRETLTDEMGSKYSAFGKMFNRCTDLAPLSQKFHKFDSCENSLKSNSDLLNYNRSYARKNPTKRFRCGRPPKYNASCSVPEKEGFIHTGMEPYGDSQCEKVLSHKQAHVQYKKFQAREKPNVCSMCGKAFIKKSQLIIHQRIHTGEKPYVCGDCRKAFSEKSHLIVHQRIHTGEKPYECTKYGRAFSRKSPFTVHQRVHTGEKPYECFECPKAFSQKSHLIIHQRVHTREKPFECSECRKAFCEMSHLFIHQITHTGKKPYECTECGKTFPRKTQLIIHQRTHTGEKPYKCGECGKTFCQQSHLIGHQRIHTGEKPYVCTDCGKAFSQKSHLTGHQRLHTGEKPYMCTECGKSFSQKSPLIIHQRIHTGEKPYQCGECGKTFSQKSLLIIHLRVHTGEKPYECTECGRAFSLKSHLILHQRGHTGEKPYECSECGKAFCGKSPLIIHQKTHPREKTPECAESGMTFFWKSQMITYQRRHTGEKPSRCSDCGKAFCQHVYFTGHQNPYRKDTLYIC

SEQ ID NO: 8024 - protein, 643 aa, Homo sapiens
MIESQEEWQQLNPAQKTLHRDVMLETYNHLVSVGCSGIKPDVIFKLEHGKDPWIIESELSRWIYPDRVKGLESSQQIISGELLFQREILERAPKDNSLYSVLKIWHIDNQMDRYQGNQDRVLRQVTVISRETLTDEMGSKYSAFGKMFNRCTDLAPLSQKFHKFDSCENSLKSNSDLLNYNRSYARKNPTKRFRCGRPPKYNASCSVPEKEGFIHTGMEPYGDSQCEKVLSHKQAHVQYKKFQAREKPNVCSMCGKAFIKKSQLIIHQRIHTGEKPYVCGDCRKAFSEKSHLIVHQRIHTGEKPYECTKYGRAFSRKSPFTVHQRVHTGEKPYECFECPKAFSQKSHLIIHQRVHTREKPFECSECRKAFCEMSHLFIHQITHTGKKPYECTECGKTFPRKTQLIIHQRTHTGEKPYKCGECGKTFCQQSHLIGHQRIHTGEKPYVCTDCGKAFSQKSHLTGHQRLHTGEKPYMCTECGKSFSQKSPLIIHQRIHTGEKPYQCGECGKTFSQKSLLIIHLRVHTGEKPYECTECGRAFSLKSHLILHQRGHTGEKPYECSECGKAFCGKSPLIIHQKTHPREKTPECAESGMTFFWKSQMITYQRRHTGEKPSRCSDCGKAFCQHVYFTGHQNPYRKDTLYIC

SEQ ID NO: 8025 - protein, 678 aa, Homo sapiens
MRTVVLTMKASVIEMFLVLLVTGVHSNKETAKKIKRPKFTVPQINCDVKAGKIIDPEFIVKCPAGCQDPKYHVYGTDVYASYSSVCGAAVHSGVLDNSGGKILVRKVAGQSGYKGSYSNGVQSLSLPRWRESFIVLESKPKKGVTYPSALTYSSSKSPAAQAGETTKAYQRPPIPGTTAQPVTLMQLLAVTVAVATPTTLPRPSPSAASTTSIPRPQSVGHRSQEMDLWSTATYTSSQNRPRADPGIQRQDPSGAAFQKPVGADVSLGLVPKEELSTQSLEPVSLGDPNCKIDLSFLIDGSTSIGKRRFRIQKQLLADVAQALDIGPAGPLMGVVQYGDNPATHFNLKTHTNSRDLKTAIEKITQRGGLSNVGRAISFVTKNFFSKANGNRSGAPNVVVVMVDGWPTDKVEEASRLARESGINIFFITIEGAAENEKQYVVEPNFANKAVCRTNGFYSLHVQSWFGLHKTLQPLVKRVCDTDRLACSKTCLNSADIGFVIDGSSSVGTGNFRTVLQFVTNLTKEFEISDTDTRIGAVQYTYEQRLEFGFDKYSSKPDILNAIKRVGYWSGGTSTGAAINFALEQLFKKSKPNKRKLMILITDGRSYDDVRIPAMAAHLKGVITYAIGVAWAAQEELEVIATHPARDHSFFVDEFDNLHQYVPRIIQNICTEFNSQPRN

SEQ ID NO: 8026 - protein, 656 aa, Homo sapiens
MRTVVLTMKASVIEMFLVLLVTGVHSNKETAKKIKRPKFTVPQINCDVKAGKIIDPEFIVKCPAGCQDPKYHVYGTDVYASYSSVCGAAVHSGVLDNSGGKILVRKVAGQSGYKGSYSNGVQSLSLPRWRESFIVLESKPKKGVTYPSALTYSSSKSPAAQAGETTKAYQRPPIPGTTAQPVTLMQLLAVTVAVATPTTLPRPSPSAASTTSIPRPQSVGHRSQEMDLWSTATYTSSQNRPRADPGLVPKEELSTQSLEPVSLGDPNCKIDLSFLIDGSTSIGKRRFRIQKQLLADVAQALDIGPAGPLMGVVQYGDNPATHFNLKTHTNSRDLKTAIEKITQRGGLSNVGRAISFVTKNFFSKANGNRSGAPNVVVVMVDGWPTDKVEEASRLARESGINIFFITIEGAAENEKQYVVEPNFANKAVCRTNGFYSLHVQSWFGLHKTLQPLVKRVCDTDRLACSKTCLNSADIGFVIDGSSSVGTGNFRTVLQFVTNLTKEFEISDTDTRIGAVQYTYEQRLEFGFDKYSSKPDILNAIKRVGYWSGGTSTGAAINFALEQLFKKSKPNKRKLMILITDGRSYDDVRIPAMAAHLKGVITYAIGVAWAAQEELEVIATHPARDHSFFVDEFDNLHQYVPRIIQNICTEFNSQPRN

SEQ ID NO: 8027 - protein, 203 aa, Homo sapiens
MRTVVLTMKASVIEMFLVLLVTGVHSNKETAKKIKRPKFTVPQINCDVKAGKIIDPEFIVKCPAGCQDPKYHVYGTDVYASYSSVCGAAVHSGVLDNSGGKILVRKVAGQSGYKGSYSNGVQSLSLPRWRESFIVLESKPKKGVTYPSALTYSSSKSPAAQAGKCSRVIESKPSESMNTRRVLGDSGEINILTGQAPLALAIF

SEQ ID NO: 8028 - protein, 693 aa, Homo sapiens
MRTVVLTMKASVIEMFLVLLVTGVHSNKETAKKIKRPKFTVPQINCDVKAGKIIDPEFIVKCPAGCQDPKYHVYGTDVYASYSSVCGAAVHSGVLDNSGGKILVRKVAGQSGYKGSYSNGVQSLSLPRWRESFIVLESKPKKGVTYPSALTYSSSKSPAAQAGETTKAYQRPPIPGTTAQPVTLMQLLAVTVAVATPTTLPRPSPSAASTTSIPRPQSVGHRSQEMDLWSTATYTSSQNRPRADPGIQRQDPSGAAFQKPVGADVSLGEMDSWKPGSVLLDEGLVPKEELSTQSLEPVSLGDPNCKIDLSFLIDGSTSIGKRRFRIQKQLLADVAQALDIGPAGPLMGVVQYGDNPATHFNLKTHTNSRDLKTAIEKITQRGGLSNVGRAISFVTKNFFSKANGNRSGAPNVVVVMVDGWPTDKVEEASRLARESGINIFFITIEGAAENEKQYVVEPNFANKAVCRTNGFYSLHVQSWFGLHKTLQPLVKRVCDTDRLACSKTCLNSADIGFVIDGSSSVGTGNFRTVLQFVTNLTKEFEISDTDTRIGAVQYTYEQRLEFGFDKYSSKPDILNAIKRVGYWSGGTSTGAAINFALEQLFKKSKPNKRKLMILITDGRSYDDVRIPAMAAHLKGVITYAIGVAWAAQEELEVIATHPARDHSFFVDEFDNLHQYVPRIIQNICTEFNSQPRN

SEQ ID NO: 8029 - protein, 657 aa, Homo sapiens
MRTVVLTMKASVIEMFLVLLVTGVHSNKETAKKIKRPKFTVPQINCDVKAGKIIDPEFIVKCPAGCQDPKYHVYGTDVYASYSSVCGAAVHSGVLDNSGGKILVRKVAGQSGYKGSYSNGVQSLSLPRWRESFIVLESKPKKGVTYPSALTYSSSKSPAAQAGETTKAYQRPPIPGTTAQPVTLMQLLAVTVAVATPTTLPRPSPSAASTTSIPRPQSVGHRSQEMDLWSTATYTSSQNRPRADPGIQRQDPSGAAFQKPVGADVSLDCKIDLSFLIDGSTSIGKRRFRIQKQLLADVAQALDIGPAGPLMGVVQYGDNPATHFNLKTHTNSRDLKTAIEKITQRGGLSNVGRAISFVTKNFFSKANGNRSGAPNVVVVMVDGWPTDKVEEASRLARESGINIFFITIEGAAENEKQYVVEPNFANKAVCRTNGFYSLHVQSWFGLHKTLQPLVKRVCDTDRLACSKTCLNSADIGFVIDGSSSVGTGNFRTVLQFVTNLTKEFEISDTDTRIGAVQYTYEQRLEFGFDKYSSKPDILNAIKRVGYWSGGTSTGAAINFALEQLFKKSKPNKRKLMILITDGRSYDDVRIPAMAAHLKGVITYAIGVAWAAQEELEVIATHPARDHSFFVDEFDNLHQYVPRIIQNICTEFNSQPRN

SEQ ID NO: 8030 - protein, 559 aa, Homo sapiens
MPLVKRNIDPRHLCHTALPRGIKNELECVTNISLANIIRQLSSLSKYAEDIFGELFNEAHSFSFRVNSLQERVDRLSVSVTQLDPKEEELSLQDITMRKAFRSSTIQDQQLFDRKTLPIPLQETYDVCEQPPPLNILTPYRDDGKEGLKFYTNPSYFFDLWKEKMLQDTEDKRKEKRKQKQKNLDRPHEPEKVPRAPHDRRREWQKLAQGPELAEDDANLLHKHIEVANGPASHFETRPQTYVDHMDGSYSLSALPFSQMSELLTRAEERVLVRPHEPPPPPPMHGAGDAKPIPTCISSATGLIENRPQSPATGRTPVFVSPTPPPPPPPLPSALSTSSLRASMTSTPPPPVPPPPPPPATALQAPAVPPPPAPLQIAPGVLHPAPPPIAPPLVQPSPPVARAAPVCETVPVHPLPQGEVQGLPPPPPPPPLPPPGIRPSSPVTVTALAHPPSGLHPTPSTAPGPHVPLMPPSPPSQVIPASEPKRHPSTLPVISDARSVLLEAIRKGIQLRKVEEQREQEAKHERIENDVATILSRRIAVEYSDSEDDSEFDEVDWLE

SEQ ID NO: 8031 - protein, 543 aa, Homo sapiens
MGCIKSKENKSPAIKYRPENTPEPVSTSVSHYGAEPTTVSPCPSSSAKGTAVNFSSLSMTPFGGSSGVTPFGGASSSFSVVPSSYPAGLTGGVTIFVALYDYEARTTEDLSFKKGERFQIINNTEGDWWEARSIATGKNGYIPSNYVAPADSIQAEEWYFGKMGRKDAERLLLNPGNQRGIFLVRESETTKGAYSLSIRDWDEIRGDNVKHYKIRKLDNGGYYITTRAQFDTLQKLVKHYTEHADGLCHKLTTVCPTVKPQTQGLAKDAWEIPRESLRLEVKLGQGCFGEVWMGTWNGTTKVAIKTLKPGTMMPEAFLQEAQIMKKLRHDKLVPLYAVVSEEPIYIVTEFMSKGSLLDFLKEGDGKYLKLPQLVDMAAQIADGMAYIERMNYIHRDLRAANILVGENLVCKIADFGLARLIEDNEYTARQGAKFPIKWTAPEAALYGRFTIKSDVWSFGILQTELVTKGRVPYPGMVNREVLEQVERGYRMPCPQGCPESLHELMNLCWKKDPDERPTFEYIQSFLEDYFTATEPQYQPGENL

SEQ ID NO: 8032 - protein, 129 aa, Homo sapiens
MATFPGQVSTYFLAAWTGPGPATHWPLYAQLMPHSGLSRPSSCPGTSSPGPKLPQVGLSRPSCCLPAFSPGLALPPGCIYKTNSCLTTTFYGSAPAQLLPAFVGPKLPQVKLFRPTFCLAVACTDPALA

SEQ ID NO: 8033 - protein, 172 aa, Homo sapiens
MAAAGVTAKAGGGTSAAAASLIRARSPAWPRRAVSCSLARGTGAPKCGSDSTPPPPLPRRRSRARRGHLGNGDRPSAGATVGGEGQASQIGGGGGGGGGRRNATGRGRRRRQGGAGSAVKCRRDSVLEPGLASSPGVAPAGGSGGLWSGAGLCSGLGARGFPGGRRSGRDAG

SEQ ID NO: 8034 - protein, 138 aa, Homo sapiens
MLWFQGNSMQLARSSFGLFLRNCSASKTTLPVLTLFTKDPCPLCDEAKEVLKPYENRQPYKDQKLPGTRRRRSPSSPSHPHMASQSGKRYNLTLNQVLSFDYDMGLDAPKTISSDCGAFYCLRMFKSPDMTCCFYPKQ

SEQ ID NO: 8035 - protein, 115 aa, Homo sapiens
MLWFQGNSMQLARSSFGLFLRNCSASKTTLPVLTLFTKDPCPLCDEAKEVLKPYENRFILQEVNITLPENSVWYERYKFDIPVFHLNGQFLMMHRVNTSKLEKQLLKLEQQSTGG

SEQ ID NO: 8036 - protein, 1845 aa, Homo sapiens
MGLCGLLERCWLHHDPDGVLTLNAENTNYAYQVPNFHKCEICLLSFPKESQFQRHMRDHERNDKPHRCDQCPQTFNVEFNLTLHKCTHSGEDPTCPVCNKKFSRVASLKAHIMLHEKEENLICSECGDEFTLQSQLAVHMEEHRQELAGTRQHACKACKKEFETSSELKEHMKTHYKIRVSSTRSYNRNIDRSGFTYSCPHCGKTFQKPSQLTRHIRIHTGERPFKCSECGKAFNQKGALQTHMIKHTGEKPHACAFCPAAFSQKGNLQSHVQRVHSEVKNGPTYNCTECSCVFKSLGSLNTHISKMHMGGPQNSTSSTETAHVLTATLFQTLPLQQTEAQATSASSQPSSQAVSDVIQQLLELSEPAPVESGQSPQPGQQLSITVGINQDILQQALENSGLSSIPAAAHPNDSCHAKTSAPHAQNPDVSSVSNEQTDPTDAEQEKEQESPEKLDKKEKKMIKKKSPFLPGSIREENGVRWHVCPYCAKEFRKPSDLVRHIRIHTHEKPFKCPQCFRAFAVKSTLTAHIKTHTGIKAFKCQYCMKSFSTSGSLKVHIRLHTGVRPFACPHCDKKFRTSGHRKTHIASHFKHTELRKMRHQRKPAKVRVGKTNIPVPDIPLQEPILITDLGLIQPIPKNQFFQSYFNNNFVNEADRPYKCFYCHRAYKKSCHLKQHIRSHTGEKPFKCSQCGRGFVSAGVLKAHIRTHTGLKSFKCLICNGAFTTGGSLRRHMGIHNDLRPYMCPYCQKTFKTSLNCKKHMKTHRYELAQQLQQHQQAASIDDSTVDQQSMQASTQMQVEIESDELPQTAEVVAANPEAMLDLEPQHVVGTEEAGLGQQLADQPLEADEDGFVAPQDPLRGHVDQFEEQSPAQQSFEPAGLPQGFTVTDTYHQQPQFPPVQQLQDSSTLESQALSTSFHQQSLLQAPSSDGMNVTTRLIQESSQEELDLQAQGSQFLEDNEDQSRRSYRCDYCNKGFKKSSHLKQHVRSHTGEKPYKCKLCGRGFVSSGVLKSHEKTHTGVKAFSCSVCNASFTTNGSLTRHMATHMSMKPYKCPFCEEGFRTTVHCKKHMKRHQTVPSAVSATGETEGGDICMEEEEEHSDRNASRKSRPEVITFTEEETAQLAKIRPQESATVSEKVLVQSAAEKDRISELRDKQAELQDEPKHANCCTYCPKSFKKPSDLVRHVRIHTGEKPYKCDECGKSFTVKSTLDCHVKTHTGQKLFSCHVCSNAFSTKGSLKVHMRLHTGAKPFKCPHCELRFRTSGRRKTHMQFHYKPDPKKARKPMTRSSSEGLQPVNLLNSSSTDPNVFIMNNSVLTGQFDQNLLQPGLVGQAILPASVSAGGDLTVSLTDGSLATLEGIQLQLAANLVGPNVQISGIDAASINNITLQIDPSILQQTLQQGNLLAQQLTGEPGLAPQNSSLQTSDSTVPASVVIQPISGLSLQPTVTSANLTIGPLSEQDSVLTTNSSGTQDLTQVMTSQGLVSPSGGPHEITLTINNSSLSQVLAQAAGPTATSSSGSPQEITLTISELNTTSGSLPSTTPMSPSAISTQNLVMSSSGVGGDASVTLTLADTQGMLSGGLDTVTLNITSQGQQFPALLTDPSLSGQGGAGSPQVILVSHTPQSASAACEEIAYQVAGVSGNLAPGNQPEKEGRAHQCLECDRAFSSAAVLMHHSKEVHGRERIHGCPVCRKAFKRATHLKEHMQTHQAGPSLSSQKPRVFKCDTCEKAFAKPSQLERHSRIHTGERPFHCTLCEKAFNQKSALQVHMKKHTGERPYKCAYCVMGFTQKSNMKLHMKRAHSYAGALQESAGHPEQDGEELSRTLHLEEVVQEAAGEWQALTHVF

SEQ ID NO: 8037 - protein, 1558 aa, Homo sapiens
MGLCGLLERCWLHHDPDGVLTLNAENTNYAYQVPNFHKCEICLLSFPKESQFQRHMRDHERNDKPHRCDQCPQTFNVEFNLTLHKCTHSGEDPTCPVCNKKFSRVASLKAHIMLHEKEENLICSECGDEFTLQSQLAVHMEEHRQELAGTRQHACKACKKEFETSSELKEHMKTHYKIRVSSTRSYNRNIDRSGFTYSCPHCGKTFQKPSQLTRHIRIHTGERPFKCSECGKAFNQKGALQTHMIKHTGEKPHACAFCPAAFSQKGNLQSHVQRVHSEVKNGPTYNCTECSCVFKSLGSLNTHISKMHMGGPQNSTSSTETAHVLTATLFQTLPLQQTEAQATSASSQPSSQAVSDVIQQLLELSEPAPVESGQSPQPGQQLSITVGINQDILQQALENSGLSSIPAAAHPNDSCHAKTSAPHAQNPDVSSVSNEQTDPTDAEQEKEQESPEKLDKKEKKMIKKKSPFLPGSIREENGVRWHVCPYCAKEFRKPSDLVRHIRIHTHEKPFKCPQCFRAFAVKSTLTAHIKTHTGIKAFKCQYCMKSFSTSGSLKVHIRLHTGVRPFACPHCDKKFRTSGHRKTHIASHFKHTELRKMRHQRKPAKVRVGKTNIPVPDIPLQEPILITDLGLIQPIPKNQFFQSYFNNNFVNEADRPYKCFYCHRAYKKSCHLKQHIRSHTGEKPFKCSQCGRGFVSAGVLKAHIRTHTGLKSFKCLICNGAFTTGGSLRRHMGIHNDLRPYMCPYCQKTFKTSLNCKKHMKTHRYELAQQLQQHQQAASIDDSTVDQQSMQASTQMQVEIESDELPQTAEVVAANPEAMLDLEPQHVVGTEEAGLGQQLADQPLEADEDGFVAPQDPLRGHVDQFEEQSPAQQSFEPAGLPQGFTVTDTYHQQPQFPPVQQLQDSSTLESQALSTSFHQQSLLQAPSSDGMNVTTRLIQESSQEELDLQAQGSQFLEDNEDQSRRSYRCDYCNKGFKKSSHLKQHVRSHTGEKPYKCKLCGRGFVSSGVLKSHEKTHTGVKAFSCSVCNASFTTNGSLTRHMATHMSMKPYKCPFCEEGFRTTVHCKKHMKRHQTVPSAVSATGETEGGDICMEEEEEHSDRNASRKSRPEVITFTEEETAQLAKIRPQESATVSEKVLVQSAAEKDRISELRDKQAELQDEPKHANCCTYCPKSFKKPSDLVRHVRIHTGEKPYKCDECGKSFTVKSTLDCHVKTHTGQKLFSCHVCSNAFSTKGSLKVHMRLHTGAKPFKCPHCELRFRTSGRRKTHMQFHYKPDPKKARKPMTRSSSEGLQPVNLLNSSSTDPNVFIMNNSVLTGQFDQNLLQPGLVGQAILPASVSAGGDLTVSLTDGSLATLEGIQLQLAANLVGPNVQISGIDAASINNITLQIDPSILQQTLQQGNLLAQQLTGEPGLAPQNSSLQTSDSTVPASVVIQPISGLSLQPTVTSANLTIGPLSEQDSVLTTNSSGTQDLTQVMTSQGLVSPSGGPHEITLTINNSSLSQVLAQAAGPTATSSSGSPQEITLTISGSRSVQHSVGPQECGSVEALYLENSSDKT

SEQ ID NO: 8038 - protein, 562 aa, Homo sapiens
MAAAWMAPAQESVTFEDVAVTFTQEEWGQLDVTQRALYVEVMLETCGLLVALGDSTKPETVEPIPSHLALPEEVSLQEQLAQGVPRYSYLGQAMDQDGPSEMQEYFLRPGTDPQSEKLHGKMSLEHEGLATADGICSMMIQNQVSPEDALYGFDSYGPVTDSLIHEGENSYKFEEMFNENCFLVQHEQILPRVKPYDCPECGKAFGKSKHLLQHHIIHTGEKPYKCLECGKDFNRRSHLTRHQRTHNGDKPFVCSECGRTFNRGSHLTRHQRVHSGEKPFVCNECGKAFTYRSNFVLHNKSHNEKKPFACSECGKGFYESTALIQHFIIHTGERPFKCLECGKAFNCRSHLKQHERIHTGEKPFVCSQCGKAFTHYSTYVLHERAHTGEKPFECKECGKAFSIRKDLIRHFNIHTGEKPYECLQCGKAFTRMSGLTRHQWIHTGEKPYVCIQCGKAFCRTTNLIRHFSIHTGEKPYECVECGKAFNRRSPLTRHQRIHTAEKSHEPIQSGNVSCESTDLIQHSIIHTESSPVSAVNMETPSIAAHSSSLDINGFIVEETLPL

SEQ ID NO: 8039 - protein, 521 aa, Homo sapiens
MLETCGLLVALGDSTKPETVEPIPSHLALPEEVSLQEQLAQGVPRYSYLGQAMDQDGPSEMQEYFLRPGTDPQSEKLHGKMSLEHEGLATADGICSMMIQNQVSPEDALYGFDSYGPVTDSLIHEGENSYKFEEMFNENCFLVQHEQILPRVKPYDCPECGKAFGKSKHLLQHHIIHTGEKPYKCLECGKDFNRRSHLTRHQRTHNGDKPFVCSECGRTFNRGSHLTRHQRVHSGEKPFVCNECGKAFTYRSNFVLHNKSHNEKKPFACSECGKGFYESTALIQHFIIHTGERPFKCLECGKAFNCRSHLKQHERIHTGEKPFVCSQCGKAFTHYSTYVLHERAHTGEKPFECKECGKAFSIRKDLIRHFNIHTGEKPYECLQCGKAFTRMSGLTRHQWIHTGEKPYVCIQCGKAFCRTTNLIRHFSIHTGEKPYECVECGKAFNRRSPLTRHQRIHTAEKSHEPIQSGNVSCESTDLIQHSIIHTESSPVSAVNMETPSIAAHSSSLDINGFIVEETLPL

SEQ ID NO: 8040 - protein, 2812 aa, Homo sapiens
MVPPVWTLLLLVGAALFRKEKPPDQKLVVRSSRDNYVLTQCDFEDDAKPLCDWSQVSADDEDWVRASGPSPTGSTGAPGGYPNGEGSYLHMESNSFHRGGVARLLSPDLWEQGPLCVHFAHHMFGLSWGAQLRLLLLSGEEGRRPDVLWKHWNTQRPSWMLTTVTVPAGFTLPTRLMFEGTRGSTAYLDIALDALSIRRGSCNRVCMMQTCSFDIPNDLCDWTWIPTASGAKWTQKKGSSGKPGVGPDGDFSSPGSGCYMLLDPKNARPGQKAVLLSPVSLSSGCLSFSFHYILRGQSPGAALHIYASVLGSIRKHTLFSGQPGPNWQAVSVNYTAVGRIQFAVVGVFGKTPEPAVAVDATSIAPCGEGFPQCDFEDNAHPFCDWVQTSGDGGHWALGHKNGPVHGMGPAGGFPNAGGHYIYLEADEFSQAGQSVRLVSRPFCAPGDICVEFAYHMYGLGEGTMLELLLGSPAGSPPIPLWKRVGSQRPYWQNTSVTVPSGHQQPMQLIFKGIQGSNTASVVAMGFILINPGTCPVKVLPELPPVSPVSSTGPSETTGLTENPTISTKKPTVSIEKPSVTTEKPTVPKEKPTIPTEKPTISTEKPTIPSEKPNMPSEKPTIPSEKPTILTEKPTIPSEKPTIPSEKPTISTEKPTVPTEEPTTPTEETTTSMEEPVIPTEKPSIPTEKPSIPTEKPTISMEETIISTEKPTISPEKPTIPTEKPTIPTEKSTISPEKPTTPTEKPTIPTEKPTISPEKPTTPTEKPTISPEKLTIPTEKPTIPTEKPTIPTEKPTISTEEPTTPTEETTISTEKPSIPMEKPTLPTEETTTSVEETTISTEKLTIPMEKPTISTEKPTIPTEKPTISPEKLTIPTEKLTIPTEKPTIPIEETTISTEKLTIPTEKPTISPEKPTISTEKPTIPTEKPTIPTEETTISTEKLTIPTEKPTISPEKLTIPTEKPTISTEKPTIPTEKLTIPTEKPTIPTEKPTIPTEKLTALRPPHPSPTATGLAALVMSPHAPSTPMTSVILGTTTTSRSSTERCPPNARYESCACPASCKSPRPSCGPLCREGCVCNPGFLFSDNHCIQASSCNCFYNNDYYEPGAEWFSPNCTEHCRCWPGSRVECQISQCGTHTVCQLKNGQYGCHPYAGTATCLVYGDPHYVTFDGRHFGFMGKCTYILAQPCGNSTDPFFRVTAKNEEQGQEGVSCLSKVYVTLPESTVTLLKGRRTLVGGQQVTLPAIPSKGVFLGASGRFVELQTEFGLRVRWDGDQQLYVTVSSTYSGKLCGLCGNYDGNSDNDHLKLDGSPAGDKEELGNSWQTDQDEDQECQKYQVVNSPSCDSSLQSSMSGPGFCGRLVDTHGPFETCLLHVKAASFFDSCMLDMCGFQGLQHLLCTHMSTMTTTCQDAGHAVKPWREPHFCPMACPPNSKYSLCAKPCPDTCHSGFSGMFCSDRCVEACECNPGFVLSGLECIPRSQCGCLHPAGSYFKVGERWYKPGCKELCVCESNNRIRCQPWRCRAQEFCGQQDGIYGCHAQGAATCTASGDPHYLTFDGALHHFMGTCTYVLTRPCWSRSQDSYFVVSATNENRGGILEVSYIKAVHVTVFDLSISLLRGCKVMLNGHRVALPVWLAQGRVTIRLSSNLVLLYTNFGLQVRYDGSHLVEVTVPSSYGGQLCGLCGNYNNNSLDDNLRPDRKLAGDSMQLGAAWKLPESSEPGCFLVGGKPSSCQENSMADAWNKNCAILINPQGPFSQCHQVVPPQSSFASCVHGQCGTKGDTTALCRSLQAYASLCAQAGQAPAWRNRTFCPMRCPPGSSYSPCSSPCPDTCSSINNPRDCPKALPCAESCECQKGHILSGTSCVPLGQCGCTDPAGSYHPVGERWYTENTCTRLCTCSVHNNITCFQSTCKPNQICWALDGLLHCRASGVGVCQLPGESHYVSFDGSNHSIPDACTLVLVKVCHPAMALPFFKISAKHEKEEGGTEAFRLHEVYIDIYDAQVTLQKGHRVLINSKQVTLPAISQIPGVSVKSSSIYSIVNIKIGVQVKFDGNHLLEIEIPTTYYGKVCGMCGNFNDEEEDELMMPSDEVANSDSEFVNSWKDKDIDPSCQSLLVDEQQIPAEQQENPSGNCRAADLRRAREKCEAALRAPVWAQCASRIDLTPFLVDCANTLCEFGGLYQALCQALQAFGATCQSQGLKPPLWRNSSFCPLECPAYSSYTNCLPSCSPSCWDLDGRCEGAKVPSACAEGCICQPGYVLSEDKCVPRSQCGCKDAHGGSIPLGKSWVSSGCTEKCVCTGGAIQCGDFRCPSGSHCQLTSDNSNSNCVSDKSEQCSVYGDPRYLTFDGFSYRLQGRMTYVLIKTVDVLPEGVEPLLVEGRNKMDPPRSSIFLQEVITTVYGYKVQLQAGLELVVNNQKMAVPYRPNEHLRVTLWGQRLYLVTDFELVVSFGGRKNAVISLPSMYEGLVSGLCGNYDKNRKNDMMLPSGALTQNLNTFGNSWEVKTEDALLRFPRAIPAEEEGQGAELGLRTGLQVSECSPEQLASNSTQACRVLADPQGPFAACHQTVAPEPFQEHCVLDLCSAQDPREQEELRCQVLSGHGVSSRYHISELYDTLPSILCQPGRPRGLRGPLRGRLRQHPRLCLQWHPEPPLADCGCTSNGIYYQLGSSFLTEDCSQRCTCASSRILLCEPFSCRAGEVCTLGNHTQGCFPESPCLQNPCQNDGQCREQGATFTCECEVGYGGGLCMEPRDAPPPRKPASNLVGVLLGLLVPVVVVLLAVTRECIYRTRRKREKTQEGDRLARLVDTDTVLDCAC

SEQ ID NO: 8041 - protein, 2724 aa, Homo sapiens
MVPPVWTLLLLVGAALFRKEKPPDQKLVVRSSRDNYVLTQCDFEDDAKPLCDWSQVSADDEDWVRASGPSPTGSTGAPGGYPNGEGSYLHMESNSFHRGGVARLLSPDLWEQGPLCVHFAHHMFGLSWGAQLRLLLLSGEEGRRPDVLWKHWNTQRPSWMLTTVTVPAGFTLPTRLMFEGTRGSTAYLDIALDALSIRRGSCNRVCMMQTCSFDIPNDLCDWTWIPTASGAKWTQKKGSSGKPGVGPDGDFSSPGSGCYMLLDPKNARPGQKAVLLSPVSLSSGCLSFSFHYILRGQSPGAALHIYASVLGSIRKHTLFSGQPGPNWQAVSVNYTAVGRIQFAVVGVFGKTPEPAVAVDATSIAPCGEGFPQCDFEDNAHPFCDWVQTSGDGGHWALGHKNGPVHGMGPAGGFPNAGGHYIYLEADEFSQAGQSVRLVSRPFCAPGDICVEFAYHMYGLGEGTMLELLLGSPAGSPPIPLWKRVGSQRPYWQNTSVTVPSGHQQPMQLIFKGIQGSNTASVVAMGFILINPGTCPVKVLPELPPVSPVSSTGPSETTGLTENPTISTKKPTVSIEKPSVTTEKPTVPKEKPTIPTEKPTISTEKPTIPSEKPNMPSEKPTIPSEKPTILTEKPTIPSEKPTIPSEKPTISTEKPTVPTEEPTTPTEETTTSMEEPVIPTEKPSIPTEKPSIPTEKPTISMEETIISTEKPTISPEKPTIPTEKPTIPTEKSTISPEKPTTPTEKPTIPTEKPTISPEKPTTPTEKPTISPEKLTIPTEKPTIPTEKPTIPTEKPTISTEEPTTPTEETTISTEKPSIPMEKPTLPTEETTTSVEETTISTEKLTIPMEKPTISTEKPTIPTEKPTISPEKLTIPTEKLTIPTEKPTIPIEETTISTEKLTIPTEKPTISPEKPTISTEKPTIPTEKPTIPTEETTISTEKLTIPTEKPTISPEKLTIPTEKPTISTEKPTIPTEKLTIPTEKPTIPTEKPTIPTEKLTALRPPHPSPTATGLAALVMSPHAPSTPMTSVILGTTTTSRSSTERCPPNARYESCACPASCKSPRPSCGPLCREGCVCNPGFLFSDNHCIQASSCNCFYNNDYYEPGAEWFSPNCTEHCRCWPGSRVECQISQCGTHTVCQLKNGQYGCHPYAGTATCLVYGDPHYVTFDGRHFGFMGKCTYILAQPCGNSTDPFFRVTAKNEEQGQEGVSCLSKVYVTLPESTVTLLKGRRTLVGGQQVTLPAIPSKGVFLGASGRFVELQTEFGLRVRWDGDQQLYVTVSSTYSGKLCGLCGNYDGNSDNDHLKLDGSPAGDKEELGNSWQTDQDEDQECQKYQVVNSPSCDSSLQSSMSGPGFCGRLVDTHGPFETCLLHVKAASFFDSCMLDMCGFQGLQHLLCTHMSTMTTTCQDAGHAVKPWREPHFCPMACPPNSKYSLCAKPCPDTCHSGFSGMFCSDRCVEACECNPGFVLSGLECIPRSQCGCLHPAGSYFKVGERWYKPGCKELCVCESNNRIRCQPWRCRAQEFCGQQDGIYGCHAQGAATCTASGDPHYLTFDGALHHFMGTCTYVLTRPCWSRSQDSYFVVSATNENRGGILEVSYIKAVHVTVFDLSISLLRGCKVMLNGHRVALPVWLAQGRVTIRLSSNLVLLYTNFGLQVRYDGSHLVEVTVPSSYGGQLCGLCGNYNNNSLDDNLRPDRKLAGDSMQLGAAWKLPESSEPGCFLVGGKPSSCQENSMADAWNKNCAILINPQGPFSQCHQVVPPQSSFASCVHGQCGTKGDTTALCRSLQAYASLCAQAGQAPAWRNRTFCPMRCPPGSSYSPCSSPCPDTCSSINNPRDCPKALPCAESCECQKGHILSGTSCVPLGQCGCTDPAGSYHPVGERWYTENTCTRLCTCSVHNNITCFQSTCKPNQICWALDGLLHCRASGVGVCQLPGESHYVSFDGSNHSIPDACTLVLVKVCHPAMALPFFKISAKHEKEEGGTEAFRLHEVYIDIYDAQVTLQKGHRVLINSKQVTLPAISQIPGVSVKSSSIYSIVNIKIGVQVKFDGNHLLEIEIPTTYYGKVCGMCGNFNDEEEDELMMPSDEVANSDSEFVNSWKDKDIDPSCQSLLVDEQQIPAEQQENPSGNCRAADLRRAREKCEAALRAPVWAQCASRIDLTPFLVDCANTLCEFGGLYQALCQALQAFGATCQSQGLKPPLWRNSSFCPLECPAYSSYTNCLPSCSPSCWDLDGRCEGAKVPSACAEGCICQPGYVLSEDKCVPRSQCGCKDAHGGSIPLGKSWVSSGCTEKCVCTGGAIQCGDFRCPSGSHCQLTSDNSNSNCVSDKSEQCSVYGDPRYLTFDGFSYRLQGRMTYVLIKTVDVLPEGVEPLLVEGRNKMDPPRSSIFLQEVITTVYGYKVQLQAGLELVVNNQKMAVPYRPNEHLRVTLWGQRLYLVTDFELVVSFGGRKNAVISLPSMYEGLVSGLCGNYDKNRKNDMMLPSGALTQNLNTFGNSWEVKTEDALLRFPRAIPAEEEGQGAELGLRTGLQVSECSPEQLASNSTQACRVLADPQGPFAACHQTVAPEPFQEHCVLDLCSAQDPREQEELRCQVLSGYAILCQEAGAALAGWRDRTLCAMECPAGTIYQSCMTPCPASCANLADPGDCEGPCVEGCASIPGYAYSGTQSLPWLTVAAPAMASTTRSELAAGGPGEQRRQGEPDQGWNWNVSSWPFPFLAGQQLSD

SEQ ID NO: 8042 - protein, 2689 aa, Homo sapiens
MVPPVWTLLLLVGAALFRKEKPPDQKLVVRSSRDNYVLTQCDFEDDAKPLCDWSQVSADDEDWVRASGPSPTGSTGAPGGYPNGEGSYLHMESNSFHRGGVARLLSPDLWEQGPLCVHFAHHMFGLSWGAQLRLLLLSGEEGRRPDVLWKHWNTQRPSWMLTTVTVPAGFTLPTRLMFEGTRGSTAYLDIALDALSIRRGSCNRVCMMQTCSFDIPNDLCDWTWIPTASGAKWTQKKGSSGKPGVGPDGDFSSPGSGCYMLLDPKNARPGQKAVLLSPVSLSSGCLSFSFHYILRGQSPGAALHIYASVLGSIRKHTLFSGQPGPNWQAVSVNYTAVGRIQFAVVGVFGKTPEPAVAVDATSIAPCGEGFPQCDFEDNAHPFCDWVQTSGDGGHWALGHKNGPVHGMGPAGGFPNAGGHYIYLEADEFSQAGQSVRLVSRPFCAPGDICVEFAYHMYGLGEGTMLELLLGSPAGSPPIPLWKRVGSQRPYWQNTSVTVPSGHQQPMQLIFKGIQGSNTASVVAMGFILINPGTCPVKVLPELPPVSPVSSTGPSETTGLTENPTISTKKPTVSIEKPSVTTEKPTVPKEKPTIPTEKPTISTEKPTIPSEKPNMPSEKPTIPSEKPTILTEKPTIPSEKPTIPSEKPTISTEKPTVPTEEPTTPTEETTTSMEEPVIPTEKPSIPTEKPSIPTEKPTISMEETIISTEKPTISPEKPTIPTEKPTIPTEKSTISPEKPTTPTEKPTIPTEKPTISPEKPTTPTEKPTISPEKLTIPTEKPTIPTEKPTIPTEKPTISTEEPTTPTEETTISTEKPSIPMEKPTLPTEETTTSVEETTISTEKLTIPMEKPTISTEKPTIPTEKPTISPEKLTIPTEKLTIPTEKPTIPIEETTISTEKLTIPTEKPTISPEKPTISTEKPTIPTEKPTIPTEETTISTEKLTIPTEKPTISPEKLTIPTEKPTISTEKPTIPTEKLTIPTEKPTIPTEKPTIPTEKLTALRPPHPSPTATGLAALVMSPHAPSTPMTSVILGTTTTSRSSTERCPPNARYESCACPASCKSPRPSCGPLCREGCVCNPGFLFSDNHCIQASSCNCFYNNDYYEPGAEWFSPNCTEHCRCWPGSRVECQISQCGTHTVCQLKNGQYGCHPYAGTATCLVYGDPHYVTFDGRHFGFMGKCTYILAQPCGNSTDPFFRVTAKNEEQGQEGVSCLSKVYVTLPESTVTLLKGRRTLVGGQQVTLPAIPSKGVFLGASGRFVELQTEFGLRVRWDGDQQLYVTVSSTYSGKLCGLCGNYDGNSDNDHLKLDGSPAGDKEELGNSWQTDQDEDQECQKYQVVNSPSCDSSLQSSMSGPGFCGRLVDTHGPFETCLLHVKAASFFDSCMLDMCGFQGLQHLLCTHMSTMTTTCQDAGHAVKPWREPHFCPMACPPNSKYSLCAKPCPDTCHSGFSGMFCSDRCVEACECNPGFVLSGLECIPRSQCGCLHPAGSYFKVGERWYKPGCKELCVCESNNRIRCQPWRCRAQEFCGQQDGIYGCHAQGAATCTASGDPHYLTFDGALHHFMGTCTYVLTRPCWSRSQDSYFVVSATNENRGGILEVSYIKAVHVTVFDLSISLLRGCKVMLNGHRVALPVWLAQGRVTIRLSSNLVLLYTNFGLQVRYDGSHLVEVTVPSSYGGQLCGLCGNYNNNSLDDNLRPDRKLAGDSMQLGAAWKLPESSEPGCFLVGGKPSSCQENSMADAWNKNCAILINPQGPFSQCHQVVPPQSSFASCVHGQCGTKGDTTALCRSLQAYASLCAQAGQAPAWRNRTFCPMRCPPGSSYSPCSSPCPDTCSSINNPRDCPKALPCAESCECQKGHILSGTSCVPLGQCGCTDPAGSYHPVGERWYTENTCTRLCTCSVHNNITCFQSTCKPNQICWALDGLLHCRASGVGVCQLPGESHYVSFDGSNHSIPDACTLVLVKVCHPAMALPFFKISAKHEKEEGGTEAFRLHEVYIDIYDAQVTLQKGHRVLINSKQVTLPAISQIPGVSVKSSSIYSIVNIKIGVQVKFDGNHLLEIEIPTTYYGKVCGMCGNFNDEEEDELMMPSDEVANSDSEFVNSWKDKDIDPSCQSLLVDEQQIPAEQQENPSGNCRAADLRRAREKCEAALRAPVWAQCASRIDLTPFLVDCANTLCEFGGLYQALCQALQAFGATCQSQGLKPPLWRNSSFCPLECPAYSSYTNCLPSCSPSCWDLDGRCEGAKVPSACAEGCICQPGYVLSEDKCVPRSQCGCKDAHGGSIPLGKSWVSSGCTEKCVCTGGAIQCGDFRCPSGSHCQLTSDNSNSNCVSDKSEQCSVYGDPRYLTFDGFSYRLQGRMTYVLIKTVDVLPEGVEPLLVEGRNKMDPPRSSIFLQEVITTVYGYKVQLQAGLELVVNNQKMAVPYRPNEHLRVTLWGQRLYLVTDFELVVSFGGRKNAVISLPSMYEGLVSGLCGNYDKNRKNDMMLPSGALTQNLNTFGNSWEVKTEDALLRFPRAIPAEEEGQGAELGLRTGLQVSECSPEQLASNSTQACRVLADPQGPFAACHQTVAPEPFQEHCVLDLCSAQDPREQEELRCQVLSGYAILCQEAGAALAGWRDRTLCAMECPAGTIYQSCMTPCPASCANLADPGDCEGPCVEGCASIPGYAYSGTQSLPWLTVAAPAMASTTSWAAAF

SEQ ID NO: 8043 - protein, 2624 aa, Homo sapiens
MVPPVWTLLLLVGAALFRKEKPPDQKLVVRSSRDNYVLTQCDFEDDAKPLCDWSQVSADDEDWVRASGPSPTGSTGAPGGYPNGEGSYLHMESNSFHRGGVARLLSPDLWEQGPLCVHFAHHMFGLSWGAQLRLLLLSGEEGRRPDVLWKHWNTQRPSWMLTTVTVPAGFTLPTRLMFEGTRGSTAYLDIALDALSIRRGSCNRVCMMQTCSFDIPNDLCDWTWIPTASGAKWTQKKGSSGKPGVGPDGDFSSPGSGCYMLLDPKNARPGQKAVLLSPVSLSSGCLSFSFHYILRGQSPGAALHIYASVLGSIRKHTLFSGQPGPNWQAVSVNYTAVGRIQFAVVGVFGKTPEPAVAVDATSIAPCGEGFPQCDFEDNAHPFCDWVQTSGDGGHWALGHKNGPVHGMGPAGGFPNAGGHYIYLEADEFSQAGQSVRLVSRPFCAPGDICVEFAYHMYGLGEGTMLELLLGSPAGSPPIPLWKRVGSQRPYWQNTSVTVPSGHQQPMQLIFKGIQGSNTASVVAMGFILINPGTCPVKVLPELPPVSPVSSTGPSETTGLTENPTISTKKPTVSIEKPSVTTEKPTVPKEKPTIPTEKPTISTEKPTIPSEKPNMPSEKPTIPSEKPTILTEKPTIPSEKPTIPSEKPTISTEKPTVPTEEPTTPTEETTTSMEEPVIPTEKPSIPTEKPSIPTEKPTISMEETIISTEKPTISPEKPTIPTEKPTIPTEKSTISPEKPTTPTEKPTIPTEKPTISPEKPTTPTEKPTISPEKLTIPTEKPTIPTEKPTIPTEKPTISTEEPTTPTEETTISTEKPSIPMEKPTLPTEETTTSVEETTISTEKLTIPMEKPTISTEKPTIPTEKPTISPEKLTIPTEKLTIPTEKPTIPIEETTISTEKLTIPTEKPTISPEKPTISTEKPTIPTEKPTIPTEETTISTEKLTIPTEKPTISPEKLTIPTEKPTISTEKPTIPTEKLTIPTEKPTIPTEKPTIPTEKLTALRPPHPSPTATGLAALVMSPHAPSTPMTSVILGTTTTSRSSTERCPPNARYESCACPASCKSPRPSCGPLCREGCVCNPGFLFSDNHCIQASSCNCFYNNDYYEPGAEWFSPNCTEHCRCWPGSRVECQISQCGTHTVCQLKNGQYGCHPYAGTATCLVYGDPHYVTFDGRHFGFMGKCTYILAQPCGNSTDPFFRVTAKNEEQGQEGVSCLSKVYVTLPESTVTLLKGRRTLVGGQQVTLPAIPSKGVFLGASGRFVELQTEFGLRVRWDGDQQLYVTVSSTYSGKLCGLCGNYDGNSDNDHLKLDGSPAGDKEELGNSWQTDQDEDQECQKYQVVNSPSCDSSLQSSMSGPGFCGRLVDTHGPFETCLLHVKAASFFDSCMLDMCGFQGLQHLLCTHMSTMTTTCQDAGHAVKPWREPHFCPMACPPNSKYSLCAKPCPDTCHSGFSGMFCSDRCVEACECNPGFVLSGLECIPRSQCGCLHPAGSYFKVGERWYKPGCKELCVCESNNRIRCQPWRCRAQEFCGQQDGIYGCHAQGAATCTASGDPHYLTFDGALHHFMGTCTYVLTRPCWSRSQDSYFVVSATNENRGGILEVSYIKAVHVTVFDLSISLLRGCKVMLNGHRVALPVWLAQGRVTIRLSSNLVLLYTNFGLQVRYDGSHLVEVTVPSSYGGQLCGLCGNYNNNSLDDNLRPDRKLAGDSMQLGAAWKLPESSEPGCFLVGGKPSSCQENSMADAWNKNCAILINPQGPFSQCHQVVPPQSSFASCVHGQCGTKGDTTALCRSLQAYASLCAQAGQAPAWRNRTFCPMRCPPGSSYSPCSSPCPDTCSSINNPRDCPKALPCAESCECQKGHILSGTSCVPLGQCGCTDPAGSYHPVGERWYTENTCTRLCTCSVHNNITCFQSTCKPNQICWALDGLLHCRASGVGVCQLPGESHYVSFDGSNHSIPDACTLVLVKVCHPAMALPFFKISAKHEKEEGGTEAFRLHEVYIDIYDAQVTLQKGHRVLINSKQVTLPAISQIPGVSVKSSSIYSIVNIKIGVQVKFDGNHLLEIEIPTTYYGKVCGMCGNFNDEEEDELMMPSDEVANSDSEFVNSWKDKDIDPSCQSLLVDEQQIPAEQQENPSGNCRAADLRRAREKCEAALRAPVWAQCASRIDLTPFLVDCANTLCEFGGLYQALCQALQAFGATCQSQGLKPPLWRNSSFCPLECPAYSSYTNCLPSCSPSCWDLDGRCEGAKVPSACAEGCICQPGYVLSEDKCVPRSQCGCKDAHGGSIPLGKSWVSSGCTEKCVCTGGAIQCGDFRCPSGSHCQLTSDNSNSNCVSDKSEQCSVYGDPRYLTFDGFSYRLQGRMTYVLIKTVDVLPEGVEPLLVEGRNKMDPPRSSIFLQEVITTVYGYKVQLQAGLELVVNNQKMAVPYRPNEHLRVTLWGQRLYLVTDFELVVSFGGRKNAVISLPSMYEGLVSGLCGNYDKNRKNDMMLPSGALTQNLNTFGNSWEVKTEDALLRFPRAIPAEEEGQGAELGLRTGLQVSECSPEQLASNSTQACRVLADPQGPFAACHQTVAPEPFQEHCVLDLCSAQDPREQEELRCQVLSGYAILCQEAGAALAGWRDRTLCAGQQLSD

SEQ ID NO: 8044 - protein, 2601 aa, Homo sapiens
MVPPVWTLLLLVGAALFRKEKPPDQKLVVRSSRDNYVLTQCDFEDDAKPLCDWSQVSADDEDWVRASGPSPTGSTGAPGGYPNGEGSYLHMESNSFHRGGVARLLSPDLWEQGPLCVHFAHHMFGLSWGAQLRLLLLSGEEGRRPDVLWKHWNTQRPSWMLTTVTVPAGFTLPTRLMFEGTRGSTAYLDIALDALSIRRGSCNRVCMMQTCSFDIPNDLCDWTWIPTASGAKWTQKKGSSGKPGVGPDGDFSSPGSGCYMLLDPKNARPGQKAVLLSPVSLSSGCLSFSFHYILRGQSPGAALHIYASVLGSIRKHTLFSGQPGPNWQAVSVNYTAVGRIQFAVVGVFGKTPEPAVAVDATSIAPCGEGFPQCDFEDNAHPFCDWVQTSGDGGHWALGHKNGPVHGMGPAGGFPNAGGHYIYLEADEFSQAGQSVRLVSRPFCAPGDICVEFAYHMYGLGEGTMLELLLGSPAGSPPIPLWKRVGSQRPYWQNTSVTVPSGHQQPMQLIFKGIQGSNTASVVAMGFILINPGTCPVKVLPELPPVSPVSSTGPSETTGLTENPTISTKKPTVSIEKPSVTTEKPTVPKEKPTIPTEKPTISTEKPTIPSEKPNMPSEKPTIPSEKPTILTEKPTIPSEKPTIPSEKPTISTEKPTVPTEEPTTPTEETTTSMEEPVIPTEKPSIPTEKPSIPTEKPTISMEETIISTEKPTISPEKPTIPTEKPTIPTEKSTISPEKPTTPTEKPTIPTEKPTISPEKPTTPTEKPTISPEKLTIPTEKPTIPTEKPTIPTEKPTISTEEPTTPTEETTISTEKPSIPMEKPTLPTEETTTSVEETTISTEKLTIPMEKPTISTEKPTIPTEKPTISPEKLTIPTEKLTIPTEKPTIPIEETTISTEKLTIPTEKPTISPEKPTISTEKPTIPTEKPTIPTEETTISTEKLTIPTEKPTISPEKLTIPTEKPTISTEKPTIPTEKLTIPTEKPTIPTEKPTIPTEKLTALRPPHPSPTATGLAALVMSPHAPSTPMTSVILGTTTTSRSSTERCPPNARYESCACPASCKSPRPSCGPLCREGCVCNPGFLFSDNHCIQASSCNCFYNNDYYEPGAEWFSPNCTEHCRCWPGSRVECQISQCGTHTVCQLKNGQYGCHPYAGTATCLVYGDPHYVTFDGRHFGFMGKCTYILAQPCGNSTDPFFRVTAKNEEQGQEGVSCLSKVYVTLPESTVTLLKGRRTLVGGQQVTLPAIPSKGVFLGASGRFVELQTEFGLRVRWDGDQQLYVTVSSTYSGKLCGLCGNYDGNSDNDHLKLDGSPAGDKEELGNSWQTDQDEDQECQKYQVVNSPSCDSSLQSSMSGPGFCGRLVDTHGPFETCLLHVKAASFFDSCMLDMCGFQGLQHLLCTHMSTMTTTCQDAGHAVKPWREPHFCPMACPPNSKYSLCAKPCPDTCHSGFSGMFCSDRCVEACECNPGFVLSGLECIPRSQCGCLHPAGSYFKVGERWYKPGCKELCVCESNNRIRCQPWRCRAQEFCGQQDGIYGCHAQGAATCTASGDPHYLTFDGALHHFMGTCTYVLTRPCWSRSQDSYFVVSATNENRGGILEVSYIKAVHVTVFDLSISLLRGCKVMLNGHRVALPVWLAQGRVTIRLSSNLVLLYTNFGLQVRYDGSHLVEVTVPSSYGGQLCGLCGNYNNNSLDDNLRPDRKLAGDSMQLGAAWKLPESSEPGCFLVGGKPSSCQENSMADAWNKNCAILINPQGPFSQCHQVVPPQSSFASCVHGQCGTKGDTTALCRSLQAYASLCAQAGQAPAWRNRTFCPMRCPPGSSYSPCSSPCPDTCSSINNPRDCPKALPCAESCECQKGHILSGTSCVPLGQCGCTDPAGSYHPVGERWYTENTCTRLCTCSVHNNITCFQSTCKPNQICWALDGLLHCRASGVGVCQLPGESHYVSFDGSNHSIPDACTLVLVKVCHPAMALPFFKISAKHEKEEGGTEAFRLHEVYIDIYDAQVTLQKGHRVLINSKQVTLPAISQIPGVSVKSSSIYSIVNIKIGVQVKFDGNHLLEIEIPTTYYGKVCGMCGNFNDEEEDELMMPSDEVANSDSEFVNSWKDKDIDPSCQSLLVDEQQIPAEQQENPSGNCRAADLRRAREKCEAALRAPVWAQCASRIDLTPFLVDCANTLCEFGGLYQALCQALQAFGATCQSQGLKPPLWRNSSFCPLECPAYSSYTNCLPSCSPSCWDLDGRCEGAKVPSACAEGCICQPGYVLSEDKCVPRSQCGCKDAHGGSIPLGKSWVSSGCTEKCVCTGGAIQCGDFRCPSGSHCQLTSDNSNSNCVSDKSEQCSVYGDPRYLTFDGFSYRLQGRMTYVLIKTVDVLPEGVEPLLVEGRNKMDPPRSSIFLQEVITTVYGYKVQLQAGLELVVNNQKMAVPYRPNEHLRVTLWGQRLYLVTDFELVVSFGGRKNAVISLPSMYEGLVSGLCGNYDKNRKNDMMLPSGALTQNLNTFGNSWEVKTEDALLRFPRAIPAEEEGQGAELGLRTGLQVSECSPEQLASNSTQACRVLADPQGPFAACHQTVAPEPFQEHCVLDLCSAQDPREQEELRCQVLSGWAAAF

SEQ ID NO: 8045 - protein, 2721 aa, Homo sapiens
MVPPVWTLLLLVGAALFRKEKPPDQKLVVRSSRDNYVLTQCDFEDDAKPLCDWSQVSADDEDWVRASGPSPTGSTGAPGGYPNGEGSYLHMESNSFHRGGVARLLSPDLWEQGPLCVHFAHHMFGLSWGAQLRLLLLSGEEGRRPDVLWKHWNTQRPSWMLTTVTVPAGFTLPTRLMFEGTRGSTAYLDIALDALSIRRGSCNRVCMMQTCSFDIPNDLCDWTWIPTASGAKWTQKKGSSGKPGVGPDGDFSSPGSGCYMLLDPKNARPGQKAVLLSPVSLSSGCLSFSFHYILRGQSPGAALHIYASVLGSIRKHTLFSGQPGPNWQAVSVNYTAVGRIQFAVVGVFGKTPEPAVAVDATSIAPCGEGFPQCDFEDNAHPFCDWVQTSGDGGHWALGHKNGPVHGMGPAGGFPNAGGHYIYLEADEFSQAGQSVRLVSRPFCAPGDICVEFAYHMYGLGEGTMLELLLGSPAGSPPIPLWKRVGSQRPYWQNTSVTVPSGHQQPMQLIFKGIQGSNTASVVAMGFILINPGTCPVKVLPELPPVSPVSSTGPSETTGLTENPTISTKKPTVSIEKPSVTTEKPTVPKEKPTIPTEKPTISTEKPTIPSEKPNMPSEKPTIPSEKPTILTEKPTIPSEKPTIPSEKPTISTEKPTVPTEEPTTPTEETTTSMEEPVIPTEKPSIPTEKPSIPTEKPTISMEETIISTEKPTISPEKPTIPTEKPTIPTEKSTISPEKPTTPTEKPTIPTEKPTISPEKPTTPTEKPTISPEKLTIPTEKPTIPTEKPTIPTEKPTISTEEPTTPTEETTISTEKPSIPMEKPTLPTEETTTSVEETTISTEKLTIPMEKPTISTEKPTIPTEKPTISPEKLTIPTEKLTIPTEKPTIPIEETTISTEKLTIPTEKPTISPEKPTISTEKPTIPTEKPTIPTEETTISTEKLTIPTEKPTISPEKLTIPTEKPTISTEKPTIPTEKLTIPTEKPTIPTEKPTIPTEKLTALRPPHPSPTATGLAALVMSPHAPSTPMTSVILGTTTTSRSSTERCPPNARYESCACPASCKSPRPSCGPLCREGCVCNPGFLFSDNHCIQASSCNCFYNNDYYEPGAEWFSPNCTEHCRCWPGSRVECQISQCGTHTVCQLKNGQYGCHPYAGTATCLVYGDPHYVTFDGRHFGFMGKCTYILAQPCGNSTDPFFRVTAKNEEQGQEGVSCLSKVYVTLPESTVTLLKGRRTLVGGQQVTLPAIPSKGVFLGASGRFVELQTEFGLRVRWDGDQQLYVTVSSTYSGKLCGLCGNYDGNSDNDHLKLDGSPAGDKEELGNSWQTDQDEDQECQKYQVVNSPSCDSSLQSSMSGPGFCGRLVDTHGPFETCLLHVKAASFFDSCMLDMCGFQGLQHLLCTHMSTMTTTCQDAGHAVKPWREPHFCPMACPPNSKYSLCAKPCPDTCHSGFSGMFCSDRCVEACECNPGFVLSGLECIPRSQCGCLHPAGSYFKVGERWYKPGCKELCVCESNNRIRCQPWRCRAQEFCGQQDGIYGCHAQGAATCTASGDPHYLTFDGALHHFMGTCTYVLTRPCWSRSQDSYFVVSATNENRGGILEVSYIKAVHVTVFDLSISLLRGCKVMLNGHRVALPVWLAQGRVTIRLSSNLVLLYTNFGLQVRYDGSHLVEVTVPSSYGGQLCGLCGNYNNNSLDDNLRPDRKLAGDSMQLGAAWKLPESSEPGCFLVGGKPSSCQENSMADAWNKNCAILINPQGPFSQCHQVVPPQSSFASCVHGQCGTKGDTTALCRSLQAYASLCAQAGQAPAWRNRTFCPMRCPPGSSYSPCSSPCPDTCSSINNPRDCPKALPCAESCECQKGHILSGTSCVPLGQCGCTDPAGSYHPVGERWYTENTCTRLCTCSVHNNITCFQSTCKPNQICWALDGLLHCRASGVGVCQLPGESHYVSFDGSNHSIPDACTLVLVKVCHPAMALPFFKISAKHEKEEGGTEAFRLHEVYIDIYDAQVTLQKGHRVLINSKQVTLPAISQIPGVSVKSSSIYSIVNIKIGVQVKFDGNHLLEIEIPTTYYGKVCGMCGNFNDEEEDELMMPSDEVANSDSEFVNSWKDKDIDPSCQSLLVDEQQIPAEQQENPSGNCRAADLRRAREKCEAALRAPVWAQCASRIDLTPFLVDCANTLCEFGGLYQALCQALQAFGATCQSQGLKPPLWRNSSFCPLECPAYSSYTNCLPSCSPSCWDLDGRCEGAKVPSACAEGCICQPGYVLSEDKCVPRSQCGCKDAHGGSIPLGKSWVSSGCTEKCVCTGGAIQCGDFRCPSGSHCQLTSDNSNSNCVSDKSEQCSVYGDPRYLTFDGFSYRLQGRMTYVLIKTVDVLPEGVEPLLVEGRNKMDPPRSSIFLQEVITTVYGYKVQLQAGLELVVNNQKMAVPYRPNEHLRVTLWGQRLYLVTDFELVVSFGGRKNAVISLPSMYEGLVSGLCGNYDKNRKNDMMLPSGALTQNLNTFGNSWEVKTEDALLRFPRAIPAEEEGQGAELGLRTGLQVSECSPEQLASNSTQACRVLADPQGPFAACHQTVAPEPFQEHCVLDLCSAQDPREQEELRCQVLSGYAILCQEAGAALAGWRDRTLCESPCLQNPCQNDGQCREQGATFTCECEVGYGGGLCMEPRDAPPPRKPASNLVGVLLGLLVPVVVVLLAVTRECIYRTRRKREKTQEGDRLARLVDTDTVLDCAC

SEQ ID NO: 8046 - protein, 2866 aa, Homo sapiens
MVPPVWTLLLLVGAALFRKEKPPDQKLVVRSSRDNYVLTQCDFEDDAKPLCDWSQVSADDEDWVRASGPSPTGSTGAPGGYPNGEGSYLHMESNSFHRGGVARLLSPDLWEQGPLCVHFAHHMFGLSWGAQLRLLLLSGEEGRRPDVLWKHWNTQRPSWMLTTVTVPAGFTLPTRLMFEGTRGSTAYLDIALDALSIRRGSCNRVCMMQTCSFDIPNDLCDWTWIPTASGAKWTQKKGSSGKPGVGPDGDFSSPGSGCYMLLDPKNARPGQKAVLLSPVSLSSGCLSFSFHYILRGQSPGAALHIYASVLGSIRKHTLFSGQPGPNWQAVSVNYTAVGRIQFAVVGVFGKTPEPAVAVDATSIAPCGEGFPQCDFEDNAHPFCDWVQTSGDGGHWALGHKNGPVHGMGPAGGFPNAGGHYIYLEADEFSQAGQSVRLVSRPFCAPGDICVEFAYHMYGLGEGTMLELLLGSPAGSPPIPLWKRVGSQRPYWQNTSVTVPSGHQQPMQLIFKGIQGSNTASVVAMGFILINPGTCPVKVLPELPPVSPVSSTGPSETTGLTENPTISTKKPTVSIEKPSVTTEKPTVPKEKPTIPTEKPTISTEKPTIPSEKPNMPSEKPTIPSEKPTILTEKPTIPSEKPTIPSEKPTISTEKPTVPTEEPTTPTEETTTSMEEPVIPTEKPSIPTEKPSIPTEKPTISMEETIISTEKPTISPEKPTIPTEKPTIPTEKSTISPEKPTTPTEKPTIPTEKPTISPEKPTTPTEKPTISPEKLTIPTEKPTIPTEKPTIPTEKPTISTEEPTTPTEETTISTEKPSIPMEKPTLPTEETTTSVEETTISTEKLTIPMEKPTISTEKPTIPTEKPTISPEKLTIPTEKLTIPTEKPTIPIEETTISTEKLTIPTEKPTISPEKPTISTEKPTIPTEKPTIPTEETTISTEKLTIPTEKPTISPEKLTIPTEKPTISTEKPTIPTEKLTIPTEKPTIPTEKPTIPTEKLTALRPPHPSPTATGLAALVMSPHAPSTPMTSVILGTTTTSRSSTERCPPNARYESCACPASCKSPRPSCGPLCREGCVCNPGFLFSDNHCIQASSCNCFYNNDYYEPGAEWFSPNCTEHCRCWPGSRVECQISQCGTHTVCQLKNGQYGCHPYAGTATCLVYGDPHYVTFDGRHFGFMGKCTYILAQPCGNSTDPFFRVTAKNEEQGQEGVSCLSKVYVTLPESTVTLLKGRRTLVGGQQVTLPAIPSKGVFLGASGRFVELQTEFGLRVRWDGDQQLYVTVSSTYSGKLCGLCGNYDGNSDNDHLKLDGSPAGDKEELGNSWQTDQDEDQECQKYQVVNSPSCDSSLQSSMSGPGFCGRLVDTHGPFETCLLHVKAASFFDSCMLDMCGFQGLQHLLCTHMSTMTTTCQDAGHAVKPWREPHFCPMACPPNSKYSLCAKPCPDTCHSGFSGMFCSDRCVEACECNPGFVLSGLECIPRSQCGCLHPAGSYFKVGERWYKPGCKELCVCESNNRIRCQPWRCRAQEFCGQQDGIYGCHAQGAATCTASGDPHYLTFDGALHHFMGTCTYVLTRPCWSRSQDSYFVVSATNENRGGILEVSYIKAVHVTVFDLSISLLRGCKVMLNGHRVALPVWLAQGRVTIRLSSNLVLLYTNFGLQVRYDGSHLVEVTVPSSYGGQLCGLCGNYNNNSLDDNLRPDRKLAGDSMQLGAAWKLPESSEPGCFLVGGKPSSCQENSMADAWNKNCAILINPQGPFSQCHQVVPPQSSFASCVHGQCGTKGDTTALCRSLQAYASLCAQAGQAPAWRNRTFCPMRCPPGSSYSPCSSPCPDTCSSINNPRDCPKALPCAESCECQKGHILSGTSCVPLGQCGCTDPAGSYHPVGERWYTENTCTRLCTCSVHNNITCFQSTCKPNQICWALDGLLHCRASGVGVCQLPGESHYVSFDGSNHSIPDACTLVLVKVCHPAMALPFFKISAKHEKEEGGTEAFRLHEVYIDIYDAQVTLQKGHRVLINSKQVTLPAISQIPGVSVKSSSIYSIVNIKIGVQVKFDGNHLLEIEIPTTYYGKVCGMCGNFNDEEEDELMMPSDEVANSDSEFVNSWKDKDIDPSCQSLLVDEQQIPAEQQENPSGNCRAADLRRAREKCEAALRAPVWAQCASRIDLTPFLVDCANTLCEFGGLYQALCQALQAFGATCQSQGLKPPLWRNSSFCPLECPAYSSYTNCLPSCSPSCWDLDGRCEGAKVPSACAEGCICQPGYVLSEDKCVPRSQCGCKDAHGGSIPLGKSWVSSGCTEKCVCTGGAIQCGDFRCPSGSHCQLTSDNSNSNCVSDKSEQCSVYGDPRYLTFDGFSYRLQGRMTYVLIKTVDVLPEGVEPLLVEGRNKMDPPRSSIFLQEVITTVYGYKVQLQAGLELVVNNQKMAVPYRPNEHLRVTLWGQRLYLVTDFELVVSFGGRKNAVISLPSMYEGLVSGLCGNYDKNRKNDMMLPSGALTQNLNTFGNSWEVKTEDALLRFPRAIPAEEEGQGAELGLRTGLQVSECSPEQLASNSTQACRVLADPQGPFAACHQTVAPEPFQEHCVLDLCSAQDPREQEELRCQVLSGYAILCQEAGAALAGWRDRTLCAMECPAGTIYQSCMTPCPASCANLADPGDCEGPCVEGCADPRLCLQWHPEPPLADCGCTSNGIYYQVRAGSRRPWGAEAPRRARPGMELERLLLALPFLAGQQFLTEDCSQRCTCASSRILLCEPFSCRAGEVCTLGNHTQGCFPESPCLQNPCQNDGQCREQGATFTCECEVGYGGGLCMEPRDAPPPRKPASNLVGVLLGLLVPVVVVLLAVTRECIYRTRRKREKTQEGDRLARLVDTDTVLDCAC

SEQ ID NO: 8047 - protein, 527 aa, Homo sapiens
MTAELREAMALAPWGPVKVKKEEEEEENFPGQASSQQVHSENIKVWAPVQGLQTGLDGSEEEEKGQNISWDMAVVLKATQEAPAASTLGSYSLPGTLAKSEILETHGTMNFLGAETKNLQLLVPKTEICEEAEKPLIISERIQKADPQGPELGEACEKGNMLKRQRIKREKKDFRQVIVNDCHLPESFKEEENQKCKKSGGKYSLNSGAVKNPKTQLGQKPFTCSVCGKGFSQSANLVVHQRIHTGEKPFECHECGKAFIQSANLVVHQRIHTGQKPYVCSKCGKAFTQSSNLTVHQKIHSLEKTFKCNECEKAFSYSSQLARHQKVHITEKCYECNECGKTFTRSSNLIVHQRIHTGEKPFACNDCGKAFTQSANLIVHQRSHTGEKPYECKECGKAFSCFSHLIVHQRIHTAEKPYDCSECGKAFSQLSCLIVHQRIHSGDLPYVCNECGKAFTCSSYLLIHQRIHNGEKPYTCNECGKAFRQRSSLTVHQRTHTGEKPYECEKCGAAFISNSHLMRHHRTHLVE

SEQ ID NO: 8048 - protein, 706 aa, Homo sapiens
MALPSPQVLMGLPALLMGPAQHTSWPCGSAVPTLKSMVTFEDVAVYFSQEEWELLDAAQRHLYHSVMLENLELVTSLGSWHGVEGEGAHPKQNVSVEVLQVRIPNADPSTKKANSCDMCGPFLKDILHLAEHQGTQSEEKPYTCGACGRDFWLNANLHQHQKEHSGGKPFRWYKDRDALMKSSKVHLSENPFTCREGGKVILGSCDLLQLQAVDSGQKPYSNLGQLPEVCTTQKLFECSNCGKAFLKSSTLPNHLRTHSEEIPFTCPTGGNFLEEKSILGNKKFHTGEIPHVCKECGKAFSHSSKLRKHQKFHTEVKYYECIACGKTFNHKLTFVHHQRIHSGERPYECDECGKAFSNRSHLIRHEKVHTGERPFECLKCGRAFSQSSNFLRHQKVHTQVRPYECSQCGKSFSRSSALIQHWRVHTGERPYECSECGRAFNNNSNLAQHQKVHTGERPFECSECGRDFSQSSHLLRHQKVHTGERPFECCDCGKAFSNSSTLIQHQKVHTGQRPYECSECRKSFSRSSSLIQHWRIHTGEKPYECSECGKAFAHSSTLIEHWRVHTKERPYECNECGKFFSQNSILIKHQKVHTGEKPYKCSECGKFFSRKSSLICHWRVHTGERPYECSECGRAFSSNSHLVRHQRVHTQERPYECIQCGKAFSERSTLVRHQKVHTRERTYECSQCGKLFSHLCNLAQHKKIHT

SEQ ID NO: 8049 - protein, 589 aa, Homo sapiens
MCGPFLKDILHLAEHQGTQSEEKPYTCGACGRDFWLNANLHQHQKEHSGGKPFRWYKDRDALMKSSKVHLSENPFTCREGGKVILGSCDLLQLQAVDSGQKPYSNLGQLPEVCTTQKLFECSNCGKAFLKSSTLPNHLRTHSEEIPFTCPTGGNFLEEKSILGNKKFHTGEIPHVCKECGKAFSHSSKLRKHQKFHTEVKYYECIACGKTFNHKLTFVHHQRIHSGERPYECDECGKAFSNRSHLIRHEKVHTGERPFECLKCGRAFSQSSNFLRHQKVHTQVRPYECSQCGKSFSRSSALIQHWRVHTGERPYECSECGRAFNNNSNLAQHQKVHTGERPFECSECGRDFSQSSHLLRHQKVHTGERPFECCDCGKAFSNSSTLIQHQKVHTGQRPYECSECRKSFSRSSSLIQHWRIHTGEKPYECSECGKAFAHSSTLIEHWRVHTKERPYECNECGKFFSQNSILIKHQKVHTGEKPYKCSECGKFFSRKSSLICHWRVHTGERPYECSECGRAFSSNSHLVRHQRVHTQERPYECIQCGKAFSERSTLVRHQKVHTRERTYECSQCGKLFSHLCNLAQHKKIHT

SEQ ID NO: 8050 - protein, 321 aa, Homo sapiens
MERFVRVPYGLYQGYGSTVPLGQPGLSGHKQPDWRQNMGPPTFLARPGLLVPANAPDYCIDPYKRAQLKAILSQMNPSLSPRLCKPNTKEVGVQVSPRVDKAVQCSLGPRTLSSCSPWDGRDPQEPLPACGVTSPATGRRGLIRLRRDGDEAESKALPGPAEASQPQPPSRRSGADRQEEPGQLEESGEKDAPCPQETKSKQVPGDAASEPLRRPNFQFLEPKYGYFHCKDCKTRWESAYVWCISGTNKVYFKQLCCKCQKSFNPYRVEAIQCQTCSKSHCSCPQKKRHIDLRRPHRQELCGRCKDKRFSCGNIYSFKYVM

SEQ ID NO: 8051 - protein, 718 aa, Homo sapiens
MALPQGLLTFRDVAIEFSQEEWKCLDPAQRTLYRDVMLENYRNLVSLDISSKCMMEFSSIGKGNTEVIHTGTLQRLASHHIGECCFQEIEKDIHDFVFQWQEDETNGHEAPMTEIKELTGSTDQYDQRHAGNKPIKYQLGSSFHSHLPELHIFQPEGKIGNQLEKSINNASSVSTSQRISCRPKTHISNNYGNNFFHSSLLTQKQDVHRKEKSFQFNESGKSFNCSSLFKKHQIIHLGEKQYKCDVCGKDFNQKRYLAHHRRCHTGEKPYMCNKCGKVFNKKAYLARHYRRHTGEKPYKCNECGKTFSDKSALLVHKTIHTGEKPYKCNECGKVFNQQSNLARHHRVHTGEKPYQCKECDKVFSRKSYLERHRRIHTGEKPYKCKVCDKAFRHDSHLAQHIVIHTREKPYKCNECGKTFGENSALLVHKTIHTGEKPYKCNECGKVFNQQSNLARHHRLHTGEKPYKCKECDKVFSRKSHLERHRRIHTGEKPYKCKVCDKAFRRDSHLAQHTVIHTGEKPYKCNECGKTFVQNSSLVMHKVIHTGEKRYKCNECGKSFNHKSSLAYHHRLHTGEKPYKCNECGKVFRTQSQLACHHRLHTGEKPYKCEECDKVFNIKSHLEIHRRVHTGEKPYKCRVCDKAFGRDSYLAQHQRVHTGEKPYKCKVCDKAFKCYSHLAQHTRIHTGEKPFKCSECGKAFRAQSTLIHHQAIHGVGKLD

SEQ ID NO: 8052 - protein, 691 aa, Homo sapiens
MMAENNLKMLKIQQCVVANKLPRNRPYVCNICFKHFETPSKLARHYLIHTGQKPFECDVCHKTFRQLVHLERHQLTHSLPFKCSICQRHFKNLKTFVKHQQLHNETYQNNVKQVRRLLEAKQEKSMYGVYNTFTTEERWALHPCSKSDPMYSMKRRKNIHACTICGKMFPSQSKLDRHVLIHTGQRPFKCVLCTKSFRQSTHLKIHQLTHSEERPFQCCFCQKGFKIQSKLLKHKQIHTRNKAFRALLLKKRRTESRPLPNKLNANQGGFENGEIGESEENNPLDVHSIYIVPFQCPKCEKCFESEQILNEHSCFAARSGKIPSRFKRSYNYKTIVKKILAKLKRARSKKLDNFQSEKKVFKKSFLRNCDLISGEQSSEQTQRTFVGSLGKHGTYKTIGNRKKKTLTLPFSWQNMGKNLKGILTTENILSIDNSVNKKDLSICGSSGEEFFNNCEVLQCGFSVPRENIRTRHKICPCDKCEKVFPSISKLKRHYLIHTGQRPFGCNICGKSFRQSAHLKRHEQTHNEKSPYASLCQVEFGNFNNLSNHSGNNVNYNASQQCQAPGVQKYEVSESDQMSGVKAESQDFIPGSTGQPCLPNVLLESEQSNPFCSYSEHQEKNDVFLYRCSVCAKSFRSPSKLERHYLIHAGQKPFECSVCGKTFRQAPHWKRHQLTHFKERPQGKVVALDSVM

SEQ ID NO: 8053 - protein, 488 aa, Homo sapiens
MPPGGGGPMKDCEYSQISTHSSSPMESPHKKKKIAARRKWEVFPGRNKFFCNGRIMMARQTGVFYLTLVLILVTSGLFFAFDCPYLAVKITPAIPAVAGILFFFVMGTLLRTSFSDPGVLPRATPDEAADLERQIDIANGTSSGGYRPPPRTKEVIINGQTVKLKYCFTCKIFRPPRASHCSLCDNCVERFDHHCPWVGNCVGKRNYRFFYMFILSLSFLTVFIFAFVITHVILRSQQTGFLNALKDSPASVLEAVVCFFSVWSIVGLSGFHTYLISSNQTTNEDIKGSWSNKRGKENYNPYSYGNIFTNCCVALCGPISPSLIDRRGYIQPDTPQPAAPSNGITMYGATQSQSDMCDQDQCIQSTKFVLQAAATPLLQSEPSLTSDELHLPGKPGLGTPCASLTLGPPTPPASMPNLAEATLADVMPRKDEHMGHQFLTPDEAPSPPRLLAAGSPLAHSRTMHVLGLASQDSLHEDSVRGLVKLSSV

SEQ ID NO: 8054 - protein, 473 aa, Homo sapiens
MPPGGGGPMKDCEYSQISTHSSSPMESPHKKKKIAARRKWEVFPGRNKFFCNGRIMMARQTGVFYLTLVLILVTSGLFFAFDCPYLAVKITPAIPAVAGILFFFVMGTLLRTSFSDPGVLPRATPDEAADLERQIDIANGTSSGGYRPPPRTKEVIINGQTVKLKYCFTCKIFRPPRASHCSLCDNCVERFDHHCPWVGNCVGKRNYRFFYMFILSLSFLTVFIFAFVITHVILRSQQTGFLNALKDSPASVLEAVVCFFSVWSIVGLSGFHTYLISSNQTTNEDIKGSWSNKRGKENYNPYSYGNIFTNCCVALCGPISPSLIDRRGYIQPDTPQPAAPSNGITMYGATQSQSDMAAATPLLQSEPSLTSDELHLPGKPGLGTPCASLTLGPPTPPASMPNLAEATLADVMPRKDEHMGHQFLTPDEAPSPPRLLAAGSPLAHSRTMHVLGLASQDSLHEDSVRGLVKLSSV

SEQ ID NO: 8055 - protein, 46 aa, Homo sapiens
MVRPHLLKKKILGRVWWLMPVVLALWEAEVGGSLEVRSLRPAWPTW

SEQ ID NO: 8056 - protein, 517 aa, Homo sapiens
MSLGSELFRDVAIVFSQEEWQWLAPAQRDLYRDVMLETYSNLVSLGLAVSKPDVISFLEQGKEPWMVERVVSGGLCPVLESRYDTKELFPKQHVYEVESPQWEIMESLTSYGLECSSFQDDWECRNQFDRQQGNPDRHFHQMIIRHEEMPTFDQHASLTFYQKIHTREKPFGYNKCRKDFWQKELLINHQGIYTNEKPYKCKECGKAFKYGSRLIQHENIHSGKKPYECKECGKAFNSGSNFIQHQRVHTGEKPYECKDCEKAFSRSSQLIEHQRTHTGEKPYQCKECGKAFNRISHLKVHYRIHTGEKPYACKECGKTFSHRSQLIQHQTVHTGRKLYECKECGKAFNQGSTLIRHQRIHTGEKPYECKVCGKAFRVSSQLKQHQRIHTGEKPYQCKVCGRAFKRVSHLTVHYRIHTGEKPYECKECGKAFSHCSQLIHHQVIHTEKKPYEYKECEKTLSHDSTTVQPQRMHNRETHVNIINVEKPSISSYPLLIIREFMLASNHMNGSNGESPLA

SEQ ID NO: 8057 - protein, 423 aa, Homo sapiens
MAAVVLPPTAASQREGHTEGGELVNELLKSWLKGLVTFEDVAVEFTQEEWALLDPAQRTLYRDVMLENCRNLASLGNQVDKPRLISQLEQEDKVMTEERGILSGTCPDVENPFKAKGLTPKLHVFRKEQSRNMKMERNHLGATLNECNQCFKVFSTKSSLTRHRKIHTGERPYGCSECGKSYSSRSYLAVHKRIHNGEKPYECNDCGKTFSSRSYLTVHKRIHNGEKPYECSDCGKTFSNSSYLRPHLRIHTGEKPYKCNQCFREFRTQSIFTRHKRVHTGEGHYVCNQCGKAFGTRSSLSSHYSIHTGEYPYECHDCGRTFRRRSNLTQHIRTHTGEKPYTCNECGKSFTNSFSLTIHRRIHNGEKSYECSDCGKSFNVLSSVKKHMRTHTGKKPYECNYCGKSFTSNSYLSVHTRMHNRQM

SEQ ID NO: 8058 - protein, 430 aa, Homo sapiens
MAAVVLPPTAALSSLFPASQREGHTEGGELVNELLKSWLKGLVTFEDVAVEFTQEEWALLDPAQRTLYRDVMLENCRNLASLGNQVDKPRLISQLEQEDKVMTEERGILSGTCPDVENPFKAKGLTPKLHVFRKEQSRNMKMERNHLGATLNECNQCFKVFSTKSSLTRHRKIHTGERPYGCSECGKSYSSRSYLAVHKRIHNGEKPYECNDCGKTFSSRSYLTVHKRIHNGEKPYECSDCGKTFSNSSYLRPHLRIHTGEKPYKCNQCFREFRTQSIFTRHKRVHTGEGHYVCNQCGKAFGTRSSLSSHYSIHTGEYPYECHDCGRTFRRRSNLTQHIRTHTGEKPYTCNECGKSFTNSFSLTIHRRIHNGEKSYECSDCGKSFNVLSSVKKHMRTHTGKKPYECNYCGKSFTSNSYLSVHTRMHNRQM

SEQ ID NO: 8059 - protein, 936 aa, Homo sapiens
MRPRSGGRPGATGRRRRRLRRRPRGLRCSRLPPPPPLPLLLGLLLAAAGPGAARAKETAFVEVVLFESSPSGDYTTYTTGLTGRFSRAGATLSAEGEIVQMHPLGLCNNNDEEDLYEYGWVGVVKLEQPELDPKPCLTVLGKAKRAVQRGATAVIFDVSENPEAIDQLNQGSEDPLKRPVVYVKGADAIKLMNIVNKQKVARARIQHRPPRQPTEYFDMGIFLAFFVVVSLVCLILLVKIKLKQRRSQNSMNRLAVQALEKMETRKFNSKSKGRREGSCGALDTLSSSSTSDCAICLEKYIDGEELRVIPCTHRFHRKCVDPWLLQHHTCPHCRHNIIEQKGNPSAVCVETSNLSRGRQQRVTLPVHYPGRVHRTNAIPAYPTRTSMDSHGNPVTLLTMDRHGEQSLYSPQTPAYIRSYPPLHLDHSLAAHRCGLEHRAYSPAHPFRRPKLSGRSFSKAACFSQYETMYQHYYFQGLSYPEQEGQSPPSLAPRGPARAFPPSGSGSLLFPTVVHVAPPSHLESGSTSSFSCYHGHRSVCSGYLADCPGSDSSSSSSSGQCHCSSSDSVVDCTEVSNQGVYGSCSTFRSSLSSDYDPFIYRSRSPCRASEAGGSGSSGRGPALCFEGSPPPEELPAVHSHGAGRGEPWPGPASPSGDQVSTCSLEMNYSSNSSLEHRGPNSSTSEVGLEASPGAAPDLRRTWKGGHELPSCACCCEPQPSPAGPSAGAAGSSTLFLGPHLYEGSGPAGGEPQSGSSQGLYGLHPDHLPRTDGVKYEGLPCCFYEEKQVARGGGGGSGCYTEDYSVSVQYTLTEEPPPGCYPGARDLSQRIPIIPEDVDCDLGLPSDCQGTHSLGSWGGTRGPDTPRPHRGLGATREEERALCCQARALLRPGCPPEEAGAVRANFPSALQDTQESSTTATEAAGPRSHSADSSSPGA

SEQ ID NO: 8060 - protein, 836 aa, Homo sapiens
MHPLGLCNNNDEEDLYEYGWVGVVKLEQPELDPKPCLTVLGKAKRAVQRGATAVIFDVSENPEAIDQLNQGSEDPLKRPVVYVKGADAIKLMNIVNKQKVARARIQHRPPRQPTEYFDMGIFLAFFVVVSLVCLILLVKIKLKQRRSQNSMNRLAVQALEKMETRKFNSKSKGRREGSCGALDTLSSSSTSDCAICLEKYIDGEELRVIPCTHRFHRKCVDPWLLQHHTCPHCRHNIIEQKGNPSAVCVETSNLSRGRQQRVTLPVHYPGRVHRTNAIPAYPTRTSMDSHGNPVTLLTMDRHGEQSLYSPQTPAYIRSYPPLHLDHSLAAHRCGLEHRAYSPAHPFRRPKLSGRSFSKAACFSQYETMYQHYYFQGLSYPEQEGQSPPSLAPRGPARAFPPSGSGSLLFPTVVHVAPPSHLESGSTSSFSCYHGHRSVCSGYLADCPGSDSSSSSSSGQCHCSSSDSVVDCTEVSNQGVYGSCSTFRSSLSSDYDPFIYRSRSPCRASEAGGSGSSGRGPALCFEGSPPPEELPAVHSHGAGRGEPWPGPASPSGDQVSTCSLEMNYSSNSSLEHRGPNSSTSEVGLEASPGAAPDLRRTWKGGHELPSCACCCEPQPSPAGPSAGAAGSSTLFLGPHLYEGSGPAGGEPQSGSSQGLYGLHPDHLPRTDGVKYEGLPCCFYEEKQVARGGGGGSGCYTEDYSVSVQYTLTEEPPPGCYPGARDLSQRIPIIPEDVDCDLGLPSDCQGTHSLGSWGGTRGPDTPRPHRGLGATREEERALCCQARALLRPGCPPEEAGAVRANFPSALQDTQESSTTATEAAGPRSHSADSSSPGA

SEQ ID NO: 8061 - protein, 745 aa, Homo sapiens
MACRQRGGSWSPSGWFNAGWSTYRSISLFFALVTSGNSIDVSQLVNPAFPGTVTCDEREITVEFPSSPGTKKWHASVVDPLGLDMPNCTYILDPEKLTLRATYDNCTRRVHGGHQMTIRVMNNSAALRHGAVMYQFFCPAMQVEETQGLSASTICQKDFMSFSLPRVFSGLADDSKGTKVQMGWSIEVGDGARAKTLTLPEAMKEGFSLLIDNHRMTFHVPFNATGVTHYVQGNSHLYMVSLKLTFISPGQKVIFSSQAICAPDPVTCNATHMTLTIPEFPGKLKSVSFENQNIDVSQLHDNGIDLEATNGMKLHFSKTLLKTKLSEKCLLHQFYLASLKLTFLLRPETVSMVIYPECLCESPVSIVTGELCTQDGFMDVEVYSYQTQPALDLGTLRVGNSSCQPVFEAQSQGLVRFHIPLNGCGTRYKFEDDKVVYENEIHALWTDFPPSKISRDSEFRMTVKCSYSRNDMLLNINVESLTPPVASVKLGPFTLILQSYPDNSYQQPYGENEYPLVRFLRQPIYMEVRVLNRDDPNIKLVLDDCWATSTMDPDSFPQWNVVVDGCAYDLDNYQTTFHPVGSSVTHPDHYQRFDMKAFAFVSEAHVLSSLVYFHCSALICNRLSPDSPLCSVTCPVSSRHRRATGATEAEKMTVSLPGPILLLSDDSSFRGVGSSDLKASGSSGEKSRSETGEEVGSRGAMDTKGHKTAGDVGSKAVAAVAAFAGVVATLGFIYYLYEKRTVSNH

SEQ ID NO: 8062 - protein, 736 aa, Homo sapiens
MACRQRGGSWSPSGWFNAGWSTYRSISLFFALVTSGNSIDVSQLVNPAFPGTVTCDEREITVEFPSSPGTKKWHASVVDPLGLDMPNCTYILDPEKLTLRATYDNCTRRVHGGHQMTIRVMNNSAALRHGAVMYQFFCPAMQVEETQGLSASTICQKDFMSFSLPRVFSGLADDSKGTKVQMGWSIEVGDGARAKTLTLPEAMKEGFSLLIDNHRMTFHVPFNATGVTHYVQGNSHLYMVSLKLTFISPGQKVIFSSQAICAPDPVTCNATHMTLTIPEFPGKLKSVSFENQNIDVSQLHDNGIDLEATNGMKLHFSKTLLKTKLSEKCLLHQFYLASLKLTFLLRPETVSMVIYPECLCESPVSIVTGELCTQDGFMDVEVYSYQTQPALDLGTLRVGNSSCQPVFEAQSQGLVRFHIPLNGCGTRYKFEDDKVVYENEIHALWTDFPPSKISRDSEFRNDMLLNINVESLTPPVASVKLGPFTLILQSYPDNSYQQPYGENEYPLVRFLRQPIYMEVRVLNRDDPNIKLVLDDCWATSTMDPDSFPQWNVVVDGCAYDLDNYQTTFHPVGSSVTHPDHYQRFDMKAFAFVSEAHVLSSLVYFHCSALICNRLSPDSPLCSVTCPVSSRHRRATGATEAEKMTVSLPGPILLLSDDSSFRGVGSSDLKASGSSGEKSRSETGEEVGSRGAMDTKGHKTAGDVGSKAVAAVAAFAGVVATLGFIYYLYEKRTVSNH

SEQ ID NO: 8063 - protein, 211 aa, Homo sapiens
MLRQSCSFPVTSLPALGGVCGREGAGAEVPPAACGCEGRDPDTERSCGRSSTGGCSPCSGPGPSSPRTSRGALSPSLGRLFPHLQVVIKLRIQLAPAVHLALPTCSLLTSSPPLEGCCHRLNEEAEVQRGFRPIAVELEFENQPLGAETRLRNGRRAGVKRSEGRGQVRPGQVRSTGPEGGLTRMERKAARLQWDSGSIKMSENEQLWEEP

SEQ ID NO: 8064 - protein, 1043 aa, Homo sapiens
MAMALELQAQASPQPEPEELLIVKLEEDSWGSESKLWEKDRGSVSGPEASRQRFRQFQYRDAAGPHEAFSQLWALCCRWLRPEIRLKEQILELLVLEQFLTILPREVQTWVQARHPESGEEAVALVEDWHRETRTAGQSGLELHTEETRPLKTGEEAQSFQLQPVDPWPEGQSQKKGVKNTCPDLPNHLNAEVAPQPLKESAVLTPRVPTLPKMGSVGDWEVTAESQEALGPGKHAEKELCKDPPGDDCGNSVCLGVPVSKPSNTSEKEQGPEFWGLSLINSGKRSTADYSLDNEPAQALTWRDSRAWEEQYQWDVEDMKVSGVHWGYEETKTFLAILSESPFSEKLRTCHQNRQVYRAIAEQLRARGFLRTLEQCRYRVKNLLRNYRKAKSSHPPGTCPFYEELEALVRARTAIRATDGPGEAVALPRLGYSDAEMDEQEEGGWDPEEMAEDCNGAGLVNVESTQGPRIAGAPALFQSRIAGVHWGYEETKAFLAILSESPFSEKLRTCHQNSQVYRAIAERLCALGFLRTLEQCRYRFKNLLRSYRKAKSSHPPGTCPFYEELDSLMRARAAVRAMGTVREAAGLPRCGQSSAETDAQEAWGEVANEDAVKPSTLCPKAPDMGFEMRHEDEDQISEQDIFEGLPGALSKCPTEAVCQPLDWGEDSENENEDEGQWGNPSQEQWQESSSEEDLEKLIDHQGLYLAEKPYKCDTCMKSFSRSSHFIAHQRIHTGEKPYKCLECGKNFSDRSNLNTHQRIHTGEKPYKCLECGKSFSDHSNLITHQRIHTGEKPYKCGECWKSFNQSSNLLKHQRIHLGGNPDQCSEPGGNFAQSPSFSAHWRNSTEETAPEQPQSISKDLNSPGPHSTNSGEKLYECSECGRSFSKSSALISHQRIHTGEKPYECAECGKSFSKSSTLANHQRTHTGEKPYKCVDCGKCFSERSKLITHQRVHTGEKPYKCLECGKFFRDRSNLITHQRIHTGEKPYKCRECGKCFNQSSSLIIHQRIHTGEKPYKCTECGKDFNNSSHFSAHRRTHAGGKAS

SEQ ID NO: 8065 - protein, 977 aa, Homo sapiens
MAMALELQAQASPQPEPEELLIVKLELLVLEQFLTILPREVQTWVQARHPESGEEAVALVEDWHRETRTAGQSGLELHTEETRPLKTGEEAQSFQLQPVDPWPEGQSQKKGVKNTCPDLPNHLNAEVAPQPLKESAVLTPRVPTLPKMGSVGDWEVTAESQEALGPGKHAEKELCKDPPGDDCGNSVCLGVPVSKPSNTSEKEQGPEFWGLSLINSGKRSTADYSLDNEPAQALTWRDSRAWEEQYQWDVEDMKVSGVHWGYEETKTFLAILSESPFSEKLRTCHQNRQVYRAIAEQLRARGFLRTLEQCRYRVKNLLRNYRKAKSSHPPGTCPFYEELEALVRARTAIRATDGPGEAVALPRLGYSDAEMDEQEEGGWDPEEMAEDCNGAGLVNVESTQGPRIAGAPALFQSRIAGVHWGYEETKAFLAILSESPFSEKLRTCHQNSQVYRAIAERLCALGFLRTLEQCRYRFKNLLRSYRKAKSSHPPGTCPFYEELDSLMRARAAVRAMGTVREAAGLPRCGQSSAETDAQEAWGEVANEDAVKPSTLCPKAPDMGFEMRHEDEDQISEQDIFEGLPGALSKCPTEAVCQPLDWGEDSENENEDEGQWGNPSQEQWQESSSEEDLEKLIDHQGLYLAEKPYKCDTCMKSFSRSSHFIAHQRIHTGEKPYKCLECGKNFSDRSNLNTHQRIHTGEKPYKCLECGKSFSDHSNLITHQRIHTGEKPYKCGECWKSFNQSSNLLKHQRIHLGGNPDQCSEPGGNFAQSPSFSAHWRNSTEETAPEQPQSISKDLNSPGPHSTNSGEKLYECSECGRSFSKSSALISHQRIHTGEKPYECAECGKSFSKSSTLANHQRTHTGEKPYKCVDCGKCFSERSKLITHQRVHTGEKPYKCLECGKFFRDRSNLITHQRIHTGEKPYKCRECGKCFNQSSSLIIHQRIHTGEKPYKCTECGKDFNNSSHFSAHRRTHAGGKAS

SEQ ID NO: 8066 - protein, 1042 aa, Homo sapiens
MAMALELQAQASPQPEPEELLIVKLEEDSWGSESKLWEKDRGSVSGPEASRQRFRQFQYRDAAGPHEAFSQLWALCCRWLRPEIRLKEQILELLVLEQFLTILPREVQTWVQARHPESGEEAVALVEDWHRETRTAGQSGLELHTEETRPLKTGEEAQSFQLQPVDPWPEGQSQKKGVKNTCPDLPNHLNAEVAPQPLKESAVLTPRVPTLPKMGSVGDWEVTAESQEALGPGKHAEKELCKDPPGDDCGNSVCLGVPVSKPSNTSEKEQGPEFWGLSLINSGKRSTADYSLDNEPAQALTWRDSRAWEEQYQWDVEDMKVSGVHWGYEETKTFLAILSESPFSEKLRTCHQNRQVYRAIAEQLRARGFLRTLEQCRYRVKNLLRNYRKAKSSHPPGTCPFYEELEALVRARTAIRATDGPGEAVALPRLGYSDAEMDEQEEGGWDPEEMAEDCNGAGLVNVESTQGPRIAGAPALFQSRIGVHWGYEETKAFLAILSESPFSEKLRTCHQNSQVYRAIAERLCALGFLRTLEQCRYRFKNLLRSYRKAKSSHPPGTCPFYEELDSLMRARAAVRAMGTVREAAGLPRCGQSSAETDAQEAWGEVANEDAVKPSTLCPKAPDMGFEMRHEDEDQISEQDIFEGLPGALSKCPTEAVCQPLDWGEDSENENEDEGQWGNPSQEQWQESSSEEDLEKLIDHQGLYLAEKPYKCDTCMKSFSRSSHFIAHQRIHTGEKPYKCLECGKNFSDRSNLNTHQRIHTGEKPYKCLECGKSFSDHSNLITHQRIHTGEKPYKCGECWKSFNQSSNLLKHQRIHLGGNPDQCSEPGGNFAQSPSFSAHWRNSTEETAPEQPQSISKDLNSPGPHSTNSGEKLYECSECGRSFSKSSALISHQRIHTGEKPYECAECGKSFSKSSTLANHQRTHTGEKPYKCVDCGKCFSERSKLITHQRVHTGEKPYKCLECGKFFRDRSNLITHQRIHTGEKPYKCRECGKCFNQSSSLIIHQRIHTGEKPYKCTECGKDFNNSSHFSAHRRTHAGGKAS

SEQ ID NO: 8067 - protein, 433 aa, Homo sapiens
MAMALELQAQASPQPEPEELLIVKLEEDSWGSESKLWEKDRGSVSGPEASRQRFRQFQYRDAAGPHEAFSQLWALCCRWLRPEIRLKEQILELLVLEQFLTILPREVQTWVQARHPESGEEAVALVEDWHRETRTAGQSGLELHTEETRPLKTGEEAQSFQLQPVDPWPEGQSQKKGVKNTCPDLPNHLNAEVAPQPLKESGVPVSKPSNTSEKEQGPEFWGLSLINSGKRSTADYSLDNEPAQALTWRDSRAWEEQYQWDVEDMKVSGVHWGYEETKTFLAILSESPFSEKLRTCHQNRQVYRAIAEQLRARGFLRTLEQCRYRVKNLLRNYRKAKSSHPPGTCPFYEELEALVRARTAIRATDGPGEAVALPRLGYSDAEMDEQEEGGWDPEEMAEDCNGAGLVNVESTQGPRIAGAPALFQSRIGKNMGV

SEQ ID NO: 8068 - protein, 388 aa, Homo sapiens
MEPSPAAGGLETTRLVSPRDRGGAGGSLRLKSLFTEPSEPLPEESKPVEMPFHHCHRDPLPPPGLTPERLHARRQLYAACAVCFVFMAGEVVGGYLAHSLAIMTDAAHLLADVGSMMGSLFSLWLSTRPATRTMTFGWHRSETLGALASVVSLWMVTGILLYLAFVRLLHSDYHIEGGAMLLTASIAVCANLLMAFVLHQAGPPHSHGSRGAEYAPLEEGPEEPLPLGNTSVRAAFVHVLGDLLQSFGVLAASILIYFKPQYKAADPISTFLFSICALGSTAPTLRDVLRILMEGTPRNVGFEPVRDTLLSVPGVRATHELHLWALTLTYHVASAHLAIDSTADPEAVLAEASSRLYSRFGFSSCTLQVEQYQPEMAQCLRCQEPPQA

SEQ ID NO: 8069 - protein, 415 aa, Homo sapiens
MEQIWLLLLLTIRVLPGSAQFNGYNCDANLHSRFPAERDISVYCGVQAITMKINFCTVLFSGYSETDLALNGRHGDSHCRGFINNNTFPAVVIFIINLSTLEGCGNNLVVSTIPGVSAYGNATSVQVGNISGYIDTPDPPTIISYLPGLLYKFSCSYPLEYLVNNTQLASSSAAISVRENNGTFVSTLNLLLYNDSTYNQQLIIPSIGLPLKTKVFAAVQATNLDGRWNVLMDYCYTTPSGNPNDDIRYDLFLSCDKDPQTTVIENGRSQRGRFSFEVFRFVKHKNQKMSTVFLHCVTKLCRADDCPFLMPICSHRERRDAGRRTTWSPQSSSGSAVLSAGPIITRSDETPTNNSQLGSPSMPPFQLNAITSALISGMVILGVTSFSLLLCSLALLHRKGPTSLVLNGIRNPVFD

SEQ ID NO: 8070 - protein, 431 aa, Homo sapiens
MMLRFSMCRGNDEGFAMEQIWLLLLLTIRVLPGSAQFNGYNCDANLHSRFPAERDISVYCGVQAITMKINFCTVLFSGYSETDLALNGRHGDSHCRGFINNNTFPAVVIFIINLSTLEGCGNNLVVSTIPGVSAYGNATSVQVGNISGYIDTPDPPTIISYLPGLLYKFSCSYPLEYLVNNTQLASSSAAISVRENNGTFVSTLNLLLYNDSTYNQQLIIPSIGLPLKTKVFAAVQATNLDGRWNVLMDYCYTTPSGNPNDDIRYDLFLSCDKDPQTTVIENGRSQRGRFSFEVFRFVKHKNQKMSTVFLHCVTKLCRADDCPFLMPICSHRERRDAGRRTTWSPQSSSGSAVLSAGPIITRSDETPTNNSQLGSPSMPPFQLNAITSALISGMVILGVTSFSLLLCSLALLHRKGPTSLVLNGIRNPVFD

SEQ ID NO: 8071 - protein, 161 aa, Homo sapiens
MDDIYKAAVEQLTEEQKNEFKAAFDIFVLGAEDGCISTKELGKVMRMLGQNPTPEELQEMIDEVDEDGSGTVDFDEFLVMMVRCMKDDSKGKSEEELSDLFRMFDKNADGYIDLDELKIMLQATGETITEDDIEELMKDGDKNNDGRIDYDEFLEFMKGVE

SEQ ID NO: 8072 - protein, 757 aa, Homo sapiens
MAEVGRTGISYPGALLPQGFWAAVEVWLERPQVANKRLCGARLEARWSAALPCAEARGPGTSAGSEQKERGPGPGQGSPGGGPGPRSLSGPEQGTACCELEEAQGQCQQEEAQREAASVPLRDSGHPGHAEGREGDFPAADLDSLWEDFSQSLARGNSELLAFLTSSGAGSQPEAQRELDVVLRTVIPKTSPHCPLTTPRREIVVQDVLNGTITFLPLEEDDEGNLKVKMSNVYQIQLSHSKEEWFISVLIFCPERWHSDGIVYPKPTWLGEELLAKLAKWSVENKKSDFKSTLSLISIMKYSKAYQELKEKYKEMVKVWPEVTDPEKFVYEDVAIAAYLLILWEEERAERRLTARQSFVDLGCGNGLLVHILSSEGHPGRGIDVRRRKIWDMYGPQTQLEEDAITPNDKTLFPDVDWLIGNHSDELTPWIPVIAARSSYNCRFFVLPCCFFDFIGRYSRRQSKKTQYREYLDFIKEVGFTCGFHVDEDCLRIPSTKRVCLVGKSRTYPSSREASVDEKRTQYIKSRRGCPVSPPGWELSPSPRWVAAGSAGHCDGQQALDARVGCVTRAWAAEHGAGPQAEGPWLPGFHPREKAERVRNCAALPRDFIDQVVLQVANLLLGGKQLNTRSSRNGSLKTWNGGESLSLAEVANELDTETLRRLKRECGGLQTLLRNSHQVFQVVNGRVHIRDWREETLWKTKQPEAKQRLLSEACKTRLCWFFMHHPDGCALSTDCCPFAHGPAELRPPRTTPRKKIS

SEQ ID NO: 8073 - protein, 411 aa, Homo sapiens
MCIKFSSVIAKKNERWHSDGIVYPKPTWLGEELLAKLAKWSVENKKSDFKSTLSLISIMKYSKAYQELKEKYKEMVKVWPEVTDPEKFVYEDVAIAAYLLILWEEERAERRLTARQSFVDLGCGNGLLVHILSSEGHPGRGIDVRRRKIWDMYGPQTQLEEDAITPNDKTLFPDVDWLIGNHSDELTPWIPVIAARSSYNCRFFVLPCCFFDFIGRYSRRQSKKTQYREYLDFIKEVGFTCGFHVDEDCLRIPSTKRVCLVGKSRTYPSSREASVDEKRTQYIKSRRGCPVSPPGWELSPSPRWVAAGSAGHCDGQQALDARVGCVTRAWAAEHGAGPQAEGPWLPGFHPREKAERVRNCAALPRDFIDQVVLQVANLLLGGKQLNTRSSRNGSLKTWNGGGKLSTILGRG

SEQ ID NO: 8074 - protein, 365 aa, Homo sapiens
MYGPQTQLEEDAITPNDKTLFPDVDWLIGNHSDELTPWIPVIAARSSYNCRFFVLPCCFFDFIGRYSRRQSKKTQYREYLDFIKEVGFTCGFHVDEDCLRIPSTKRVCLVGKSRTYPSSREASVDEKRTQYIKSRRGCPVSPPGWELSPSPRWVAAGSAGHCDGQQALDARVGCVTRAWAAEHGAGPQAEGPWLPGFHPREKAERVRNCAALPRDFIDQVVLQVANLLLGGKQLNTRSSRNGSLKTWNGGESLSLAEVANELDTETLRRLKRECGGLQTLLRNSHQVFQVVNGRVHIRDWREETLWKTKQPEAKQRLLSEACKTRLCWFFMHHPDGCALSTDCCPFAHGPAELRPPRTTPRKKIS

SEQ ID NO: 8075 - protein, 796 aa, Homo sapiens
MTKDKEPIVKSFHFVCLMIIIVGTRIQFSDGNEFAVDKSKRGLIHVPKDLPLKTKVLDMSQNYIAELQVSDMSFLSELTVLRLSHNRIQLLDLSVFKFNQDLEYLDLSHNQLQKISCHPIVSFRHLDLSFNDFKALPICKEFGNLSQLNFLGLSAMKLQKLDLLPIAHLHLSYILLDLRNYYIKENETESLQILNAKTLHLVFHPTSLFAIQVNISVNTLGCLQLTNIKLNDDNCQVFIKFLSELTRGSTLLNFTLNHIETTWKCLVRVFQFLWPKPVEYLNIYNLTIIESIREEDFTYSKTTLKALTIEHITNQVFLFSQTALYTVFSEMNIMMLTISDTPFIHMLCPHAPSTFKFLNFTQNVFTDSIFEKCSTLVKLETLILQKNGLKDLFKVGLMTKDMPSLEILDVSWNSLESGRHKENCTWVESIVVLNLSSNMLTDSVFRCLPPRIKVLDLHSNKIKSVPKQVVKLEALQELNVAFNSLTDLPGCGSFSSLSVLIIDHNSVSHPSADFFQSCQKMRSIKAGDNPFQCTCELREFVKNIDQVSSEVLEGWPDSYKCDYPESYRGSPLKDFHMSELSCNITLLIVTIGATMLVLAVTVTSLCIYLDLPWYLRMVCQWTQTRRRARNIPLEELQRNLQFHAFISYSEHDSAWVKSELVPYLEKEDIQICLHERNFVPGKSIVENIINCIEKSYKSIFVLSPNFVQSEWCHYELYFAHHNLFHEGSNNLILILLEPIPQNSIPNKYHKLKALMTQRTYLQWPKEKSKRGLFWANIRAAFNMKLTLVTENNDVKS

SEQ ID NO: 8076 - protein, 480 aa, Homo sapiens
MTKDKEPIVKSFHFVCLMIIIVGTRIQFSDGNEFAVDKSKRGLIHVPKDLPLKTKVLDMSQNYIAELQVSDMSFLSELTVLRLSHNRIQLLDLSVFKFNQDLEYLDLSHNQLQKISCHPIVSFRHLDLSFNDFKALPICKEFGNLSQLNFLGLSAMKLQKLDLLPIAHLHLSYILLDLRNYYIKENETESLQILNAKTLHLVFHPTSLFAIQVNISVNTLGCLQLTNIKLNDDNCQVFIKFLSELTRGSTLLNFTLNHIETTWKCLVRVFQFLWPKPVEYLNIYNLTIIESIREEDFTYSKTTLKALTIEHITNQVFLFSQTALYTVFSEMNIMMLTISDTPFIHMLCPHAPSTFKFLNFTQNVFTDSIFEKCSTLVKLETLIFVLSPNFVQSEWCHYELYFAHHNLFHEGSNNLILILLEPIPQNSIPNKYHKLKALMTQRTYLQWPKEKSKRGLFWANIRAAFNMKLTLVTENNDVKS

SEQ ID NO: 8077 - protein, 258 aa, Homo sapiens
MIPLQKDNQEEGVCPICQESLKEAVSTNCGHLFCRVCLTQHVEKASASGVFCCPLCRKPCSEEVLGTGYICPNHQKRVCRFCEESRLLLCVECLVSPEHMSHHELTIENALSHYKERLNRRSRKLRKDIAELQRLKAQQEKKLQALQFQVDHGNHRLEAGPESQHQTREQLGALPQQWLGQLEHMPAEAARILDISRAVTQLRSLVIDLERTAKELDTNTLKNAGDLLNRSAPQKLEVIYPQLEKGVSELLLQPPQKL

SEQ ID NO: 8078 - protein, 229 aa, Homo sapiens
MIPLQKDNQEEGVCPICQESLKEAVSTNCGHLFCRVCLTQHVEKASASGVFCCPLCRKPCSEEVLGTGYICPNHQKRVCRFCEESRLLLCVECLVSPEHMSHHELTIENALSHYKERLNRRSRKLRKDIAELQRLKAQQEKKLQALQQWLGQLEHMPAEAARILDISRAVTQLRSLVIDLERTAKELDTNTLKNAGDLLNRSAPQKLEVIYPQLEKGVSELLLQPPQKL

SEQ ID NO: 8079 - protein, 710 aa, Homo sapiens
MEEMEEELKCPVCGSFYREPIILPCSHNLCQACARNILVQTPESESPQSHRAAGSGVSDYDYLDLDKMSLYSEADSGYGSYGGFASAPTTPCQKSPNGVRVFPPAMPPPATHLSPALAPVPRNSCITCPQCHRSLILDDRGLRGFPKNRVLEGVIDRYQQSKAAALKCQLCEKAPKEATVMCEQCDVFYCDPCRLRCHPPRGPLAKHRLVPPAQGRVSRRLSPRKVSTCTDHELENHSMYCVQCKMPVCYQCLEEGKHSSHEVKALGAMWKLHKSQLSQALNGLSDRAKEAKEFLVQLRNMVQQIQENSVEFEACLVAQCDALIDALNRRKAQLLARVNKEHEHKLKVVRDQISHCTVKLRQTTGLMEYCLEVIKENDPSGFLQISDALIRRVHLTEDQWGKGTLTPRMTTDFDLSLDNSPLLQSIHQLDFVQVKASSPVPATPILQLEECCTHNNSATLSWKQPPLSTVPADGYILELDDGNGGQFREVYVGKETMCTVDGLHFNSTYNARVKAFNKTGVSPYSKTLVLQTSEVAWFAFDPGSAHSDIILSNDNLTVTCSSYDDRVVLGKTGFSKGIHYWELTVDRYDNHPDPAFGVARMDVMKDVMLGKDDKAWAMYVDNNRSWFMHNNSHTNRTEGGITKGATIGVLLDLNRKNLTFFINDEQQGPIAFDNVEGLFFPAVSLNRNVQVTLHTGLPVPDFYSSRASIA

SEQ ID NO: 8080 - protein, 802 aa, Homo sapiens
MEEMEEELKCPVCGSFYREPIILPCSHNLCQACARNILVQTPESESPQSHRAAGSGVSDYDYLDLDKMSLYSEADSGYGSYGGFASAPTTPCQKSPNGVRVFPPAMPPPATHLSPALAPVPRNSCITCPQCHRSLILDDRGLRGFPKNRVLEGVIDRYQQSKAAALKCQLCEKAPKEATVMCEQCDVFYCDPCRLRCHPPRGPLAKHRLVPPAQGRVSRRLSPRKVSTCTDHELENHSMYCVQCKMPVCYQCLEEGKHSSHEVKALGAMWKLHKSQLSQALNGLSDRAKEAKEFLVQLRNMVQQIQENSVEFEACLVAQCDALIDALNRRKAQLLARVNKEHEHKLKVVRDQISHCTVKLRQTTGLMEYCLEVIKENDPSGFLQISDALIRRVHLTEDQWGKGTLTPRMTTDFDLSLDNSPLLQSIHQLDFVQVKVPATPILQLEECCTHNNSATLSWKQPPLSTVPADGYILELDDGNGGQFREVYVGKETMCTVDGLHFNSTYNARVKAFNKTGVSPYSKTLVLQTSEDTDSEEQTLPFPVPSERLPLRRMSPFSSTLNLQPSFPGRSYFDFRSSPHQLSLHSSLQSLNAPGCNFETQSAPYSQLVDIKKLLAVAWFAFDPGSAHSDIILSNDNLTVTCSSYDDRVVLGKTGFSKGIHYWELTVDRYDNHPDPAFGVARMDVMKDVMLGKDDKAWAMYVDNNRSWFMHNNSHTNRTEGGITKGATIGVLLDLNRKNLTFFINDEQQGPIAFDNVEGLFFPAVSLNRNVQVSTLPLRLNSCCWLPVQRLPRAVQSNRREGS

SEQ ID NO: 8081 - protein, 550 aa, Homo sapiens
MEEMEEELKCPVCGSFYREPIILPCSHNLCQACARNILVQTPESESPQSHRAAGSGVSDYDYLDLDKMSLYSEADSGYGSYGGFASAPTTPCQKSPNGVRVFPPAMPPPATHLSPALAPVPRNSCITCPQCHRSLILDDRGLRGFPKNRVLEGVIDRYQQSKAAALKCQLCEKAPKEATVMCEQCDVFYCDPCRLRCHPPRGPLAKHRLVPPAQGRVSRRLSPRKVSTCTDHELENHSMYCVQCKMPVCYQCLEEGKHSSHEVKALGAMWKLHKSQLSQALNGLSDRAKEAKEFLVQLRNMVQQIQENSVEFEACLVAQCDALIDALNRRKAQLLARVNKEHEHKLKVVRDQISHCTVKLRQTTGLMEYCLEVIKENDPSGFLQISDALIRRVHLTEDQWGKGTLTPRMTTDFDLSLDNSPLLQSIHQLDFVQVKASSPVPATPILQLEECCTHNNSATLSWKQPPLSTVPADGYILELDDGNGGQFREVYVGKETMCTVDGLHFNSTYNARVKAFNKTGVSPYSKTLVLQTSEGKALQQYPSERELRGI

SEQ ID NO: 8082 - protein, 498 aa, Homo sapiens
MDFSVKVDIEKEVTCPICLELLTEPLSLDCGHSFCQACITAKIKESVIISRGESSCPVCQTRFQPGNLRPNRHLANIVERVKEVKMSPQEGQKRDVCEHHGKKLQIFCKEDGKVICWVCELSQEHQGHQTFRINEVVKECQEKLQVALQRLIKEDQEAEKLEDDIRQERTAWKNYIQIERQKILKGFNEMRVILDNEEQRELQKLEEGEVNVLDNLAAATDQLVQQRQDASTLISDLQRRLRGSSVEMLQDVIDVMKRSESWTLKKPKSVSKKLKSVFRVPDLSGMLQVLKELTDVQYYWVDVMLNPGSATSNVAISVDQRQVKTVRTCTFKNSNPCDFSAFGVFGCQYFSSGKYYWEVDVSGKIAWILGVHSKISSLNKRKSSGFAFDPSVNYSKVYSRYRPQYGYWVIGLQNTCEYNAFEDSSSSDPKVLTLFMAVPPCRIGVFLDYEAGIVSFFNVTNHGALIYKFSGCRFSRPAYPYFNPWNCLVPMTVCPPSS

SEQ ID NO: 8083 - protein, 494 aa, Homo sapiens
MDFSVKVDIEKEVTCPICLELLTEPLSLDCGHSFCQACITAKIKESVIISRGESSCPVCQTRFQPGNLRPNRHLANIVERVKEVKMSPQEGQKRDVCEHHGKKLQIFCKEDGKVICWVCELSQEHQGHQTFRINEVVKECQEKLQVALQRLIKEDQEAEKLEDDIRQERTAWKIERQKILKGFNEMRVILDNEEQRELQKLEEGEVNVLDNLAAATDQLVQQRQDASTLISDLQRRLRGSSVEMLQDVIDVMKRSESWTLKKPKSVSKKLKSVFRVPDLSGMLQVLKELTDVQYYWVDVMLNPGSATSNVAISVDQRQVKTVRTCTFKNSNPCDFSAFGVFGCQYFSSGKYYWEVDVSGKIAWILGVHSKISSLNKRKSSGFAFDPSVNYSKVYSRYRPQYGYWVIGLQNTCEYNAFEDSSSSDPKVLTLFMAVPPCRIGVFLDYEAGIVSFFNVTNHGALIYKFSGCRFSRPAYPYFNPWNCLVPMTVCPPSS

SEQ ID NO: 8084 - protein, 836 aa, Homo sapiens
MREKGRRQAVRGPAFMFNDRGTSLTAEEERFLDAAEYGNIPVVRKMLEESKTLNVNCVDYMGQNALQLAVGNEHLEVTELLLKKENLARIGDALLLAISKGYVRIVEAILNHPGFAASKRLTLSPCEQELQDDDFYAYDEDGTRFSPDITPIILAAHCQKYEVVHMLLMKGARIERPHDYFCKCGDCMEKQRHDSFSHSRSRINAYKGLASPAYLSLSSEDPVLTALELSNELAKLANIEKEFKNDYRKLSMQCKDFVVGVLDLCRDSEEVEAILNGDLESAEPLEVHRHKASLSRVKLAIKYEVKKFVAHPNCQQQLLTIWYENLSGLREQTIAIKCLVVLVVALGLPFLAIGYWIAPCSRLGKILRSPFMKFVAHAASFIIFLGLLVFNASDRFEGITTLPNITVTDYPKQIFRVKTTQFTWTEMLIMVWVLGMMWSECKELWLEGPREYILQLWNVLDFGMLSIFIAAFTARFLAFLQATKAQQYVDSYVQESDLSEVTLPPEIQYFTYARDKWLPSDPQIISEGLYAIAVVLSFSRIAYILPANESFGPLQISLGRTVKDIFKFMVLFIMVFFAFMIGMFILYSYYLGAKVNAAFTTVEESFKTLFWSIFGLSEVTSVVLKYDHKFIENIGYVLYGIYNVTMVVVLLNMLIAMINSSYQEIEDDSDVEWKFARSKLWLSYFDDGKTLPPPFSLVPSPKSFVYFIMRIVNFPKCRRRRLQKDIEMGMGNSKSRLNLFTQSNSRVFESHSFNSILNQPTRYQQIMKRLIKRYVLKAQVDKENDEVNEGELKEIKQDISSLRYELLEDKSQATEELAILIHKLSEKLNPSMLRCE

SEQ ID NO: 8085 - protein, 921 aa, Homo sapiens
MSTKVRKCKEQARVTFPAPEEEEDEGEDEGAEPQRRRRGWRGVNGGLEPRSAPSQREPHGYCPPPFSHGPDLSMEGSPSLRRMTVMREKGRRQAVRGPAFMFNDRGTSLTAEEERFLDAAEYGNIPVVRKMLEESKTLNVNCVDYMGQNALQLAVGNEHLEVTELLLKKENLARIGDALLLAISKGYVRIVEAILNHPGFAASKRLTLSPCEQELQDDDFYAYDEDGTRFSPDITPIILAAHCQKYEVVHMLLMKGARIERPHDYFCKCGDCMEKQRHDSFSHSRSRINAYKGLASPAYLSLSSEDPVLTALELSNELAKLANIEKEFKNDYRKLSMQCKDFVVGVLDLCRDSEEVEAILNGDLESAEPLEVHRHKASLSRVKLAIKYEVKKFVAHPNCQQQLLTIWYENLSGLREQTIAIKCLVVLVVALGLPFLAIGYWIAPCSRLGKILRSPFMKFVAHAASFIIFLGLLVFNASDRFEGITTLPNITVTDYPKQIFRVKTTQFTWTEMLIMVWVLGMMWSECKELWLEGPREYILQLWNVLDFGMLSIFIAAFTARFLAFLQATKAQQYVDSYVQESDLSEVTLPPEIQYFTYARDKWLPSDPQIISEGLYAIAVVLSFSRIAYILPANESFGPLQISLGRTVKDIFKFMVLFIMVFFAFMIGMFILYSYYLGAKVNAAFTTVEESFKTLFWSIFGLSEVTSVVLKYDHKFIENIGYVLYGIYNVTMVVVLLNMLIAMINSSYQEIEDDSDVEWKFARSKLWLSYFDDGKTLPPPFSLVPSPKSFVYFIMRIVNFPKCRRRRLQKDIEMGMGNSKSRLNLFTQSNSRVFESHSFNSILNQPTRYQQIMKRLIKRYVLKAQVDKENDEVNEGELKEIKQDISSLRYELLEDKSQATEELAILIHKLSEKLNPSMLRCE

SEQ ID NO: 8086 - protein, 848 aa, Homo sapiens
MEGSPSLRRMTVMREKGRRQAVRGPAFMFNDRGTSLTAEEERFLDAAEYGNIPVVRKMLEESKTLNVNCVDYMGQNALQLAVGNEHLEVTELLLKKENLARIGDALLLAISKGYVRIVEAILNHPGFAASKRLTLSPCEQELQDDDFYAYDEDGTRFSPDITPIILAAHCQKYEVVHMLLMKGARIERPHDYFCKCGDCMEKQRHDSFSHSRSRINAYKGLASPAYLSLSSEDPVLTALELSNELAKLANIEKEFKNDYRKLSMQCKDFVVGVLDLCRDSEEVEAILNGDLESAEPLEVHRHKASLSRVKLAIKYEVKKFVAHPNCQQQLLTIWYENLSGLREQTIAIKCLVVLVVALGLPFLAIGYWIAPCSRLGKILRSPFMKFVAHAASFIIFLGLLVFNASDRFEGITTLPNITVTDYPKQIFRVKTTQFTWTEMLIMVWVLGMMWSECKELWLEGPREYILQLWNVLDFGMLSIFIAAFTARFLAFLQATKAQQYVDSYVQESDLSEVTLPPEIQYFTYARDKWLPSDPQIISEGLYAIAVVLSFSRIAYILPANESFGPLQISLGRTVKDIFKFMVLFIMVFFAFMIGMFILYSYYLGAKVNAAFTTVEESFKTLFWSIFGLSEVTSVVLKYDHKFIENIGYVLYGIYNVTMVVVLLNMLIAMINSSYQEIEDDSDVEWKFARSKLWLSYFDDGKTLPPPFSLVPSPKSFVYFIMRIVNFPKCRRRRLQKDIEMGMGNSKSRLNLFTQSNSRVFESHSFNSILNQPTRYQQIMKRLIKRYVLKAQVDKENDEVNEGELKEIKQDISSLRYELLEDKSQATEELAILIHKLSEKLNPSMLRCE

SEQ ID NO: 8087 - protein, 956 aa, Homo sapiens
METQELRGALALLLLCFFTSASQDLQVIDLLTVGESRQMVAVAEKIRTALLTAGDIYLLSTFRLPPKQGGVLFGLYSRQDNTRWLEASVVGKINKVLVRYQREDGKVHAVNLQQAGLADGRTHTVLLRLRGPSRPSPALHLYVDCKLGDQHAGLPALAPIPPAEVDGLEIRTGQKAYLRMQGFVESMKIILGGSMARVGALSECPFQGDESIHSAVTNALHSILGEQTKALVTQLTLFNQILVELRDDIRDQVKEMSLIRNTIMECQVCGFHEQRSHCSPNPCFRGVDCMEVYEYPGYRCGPCPPGLQGNGTHCSDINECAHADPCFPGSSCINTMPGFHCEACPRGYKGTQVSGVGIDYARASKQVCNDIDECNDGNNGGCDPNSICTNTVGSFKCGPCRLGFLGNQSQGCLPARTCHSPAHSPCHIHAHCLFERNGAVSCQCNVGWAGNGNVCGTDTDIDGYPDQALPCMDNNKHCKQDNCLLTPNSGQEDADNDGVGDQCDDDADGDGIKNVEDNCRLFPNKDQQNSDTDSFGDACDNCPNVPNNDQKDTDGNGEGDACDNDVDGDGIPNGLDNCPKVPNPLQTDRDEDGVGDACDSCPEMSNPTQTDADSDLVGDVCDTNEDSDGDGHQDTKDNCPQLPNSSQLDSDNDGLGDECDGDDDNDGIPDYVPPGPDNCRLVPNPNQKDSDGNGVGDVCEDDFDNDAVVDPLDVCPESAEVTLTDFRAYQTVVLDPEGDAQIDPNWVVLNQGMEIVQTMNSDPGLAVGYTAFNGVDFEGTFHVNTVTDDDYAGFLFSYQDSGRFYVVMWKQTEQTYWQATPFRAVAQPGLQLKAVTSVSGPGEHLRNALWHTGHTPDQVRLLWTDPRNVGWRDKTSYRWQLLHRPQVGYIRVKLYEGPQLVADSGVIIDTSMRGGRLGVFCFSQENIIWSNLQYRCNDTVPEDFEPFRRQLLQGRV

SEQ ID NO: 8088 - protein, 836 aa, Homo sapiens
METQELRGALALLLLCFFTSASQDLQVIDLLTVGESRQMVAVAEKIRTALLTAGDIYLLSTFRLPPKQGGVLFGLYSRQDNTRWLEASVVGKINKVTNALHSILGEQTKALVTQLTLFNQILVELRDDIRDQVKEMSLIRNTIMECQVCGFHEQRSHCSPNPCFRGVDCMEVYEYPGYRCGPCPPGLQGNGTHCSDINECAHADPCFPGSSCINTMPGFHCEACPRGYKGTQVSGVGIDYARASKQVCNDIDECNDGNNGGCDPNSICTNTVGSFKCGPCRLGFLGNQSQGCLPARTCHSPAHSPCHIHAHCLFERNGAVSCQCNVGWAGNGNVCGTDTDIDGYPDQALPCMDNNKHCKQDNCLLTPNSGQEDADNDGVGDQCDDDADGDGIKNVEDNCRLFPNKDQQNSDTDSFGDACDNCPNVPNNDQKDTDGNGEGDACDNDVDGDGIPNGLDNCPKVPNPLQTDRDEDGVGDACDSCPEMSNPTQTDADSDLVGDVCDTNEDSDGDGHQDTKDNCPQLPNSSQLDSDNDGLGDECDGDDDNDGIPDYVPPGPDNCRLVPNPNQKDSDGNGVGDVCEDDFDNDAVVDPLDVCPESAEVTLTDFRAYQTVVLDPEGDAQIDPNWVVLNQGMEIVQTMNSDPGLAVGYTAFNGVDFEGTFHVNTVTDDDYAGFLFSYQDSGRFYVVMWKQTEQTYWQATPFRAVAQPGLQLKAVTSVSGPGEHLRNALWHTGHTPDQVRLLWTDPRNVGWRDKTSYRWQLLHRPQVGYIRVKLYEGPQLVADSGVIIDTSMRGGRLGVFCFSQENIIWSNLQYRCNDTVPEDFEPFRRQLLQGRV

SEQ ID NO: 8089 - protein, 305 aa, Homo sapiens
MAREDSVKCLRCLLYALNLLFWLMSISVLAVSAWMRDYLNNVLTLTAETRVEEAVILTYFPVVHPVMIAVCCFLIIVGMLGYCGTVKRNLLLLAWYFGSLLVIFCVELACGVWTYEQELMVPVQWSDMVTLKARMTNYGLPRYRWLTHAWNFFQREFKCCGVVYFTDWLEMTEMDWPPDSCCVREFPGCSKQAHQEDLSDLYQEGCGKKMYSFLRGTKQLQVLRFLGISIGVTQILAMILTITLLWALYYDRREPGTDQMMSLKNDNSQHLSCPSVELLKPSLSRIFEHTSMANSFNTHFEMEEL

SEQ ID NO: 8090 - protein, 192 aa, Homo sapiens
MAHKLLLVPVQWSDMVTLKARMTNYGLPRYRWLTHAWNFFQREFKCCGVVYFTDWLEMTEMDWPPDSCCVREFPGCSKQAHQEDLSDLYQEGCGKKMYSFLRGTKQLQVLRFLGISIGVTQILAMILTITLLWALYYDRREPGTDQMMSLKNDNSQHLSCPSVELLKPSLSRIFEHTSMANSFNTHFEMEEL

SEQ ID NO: 8091 - protein, 355 aa, Homo sapiens
MTGSAADTHRCPHPKGAKGTRSRSSHARPVSLATSGGSEEEDKDGGVLFHVNKSGFPIDSHTWERMWMHVAKVHPKGGEMVGAIRNAAFLAKPSIPQVPNYRLSMTIPDWLQAIQNYMKTLQYNHTGTQFFEIRKMRPLSGLMETAKEMTRESLPIKCLEAVILGIYLTNGQPSIERFPISFKTYFSGNYFHHVVLGIYCNGRYGSLGMSRRAELMDKPLTFRTLSDLIFDFEDSYKKYLHTVKKVKIGLYVPHEPHSFQPIEWKQLVLNVSKMLRADIRKELEKYARDMRMKILKPASAHSPTQVRSRGKSLSPRRRQASPPRRLGRREKSPALPEKKVADLSTLNEVGYQIRI

SEQ ID NO: 8092 - protein, 290 aa, Homo sapiens
MWMHVAKVHPKGGEMVGAIRNAAFLAKPSIPQVPNYRLSMTIPDWLQAIQNYMKTLQYNHTGTQFFEIRKMRPLSGLMETAKEMTRESLPIKCLEAVILGIYLTNGQPSIERFPISFKTYFSGNYFHHVVLGIYCNGRYGSLGMSRRAELMDKPLTFRTLSDLIFDFEDSYKKYLHTVKKVKIGLYVPHEPHSFQPIEWKQLVLNVSKMLRADIRKELEKYARDMRMKILKPASAHSPTQVRSRGKSLSPRRRQASPPRRLGRREKSPALPEKKVADLSTLNEVGYQIRI

SEQ ID NO: 8093 - protein, 156 aa, Homo sapiens
METAKEMTRESLPIKCLEAVILGIYLTNGQPSIERFPISFKTYFSGNYFHHVVLGIYCNGRYGSLGMSRRAELMDKPLTFRTLSDLIFDFEDSYKKYLHTVKKVKIGLYVPHEPHSFQPIEWKQLVLNVSKMLRADIRKELEKYARDMRMKGLCSH

SEQ ID NO: 8094 - protein, 169 aa, Homo sapiens
MTGSAADTHRCPHPKGAKGTRSRSSHARPVSLATSGGSEEEDKDGGVLFHVNKSGFPIDSHTWERMWMHVAKVHPKGGEMVGAIRNAAFLAKPSIPQVPNYRLSMTIPDWLQAIQNYMKTLQYNHTGTQFFEIRKMRPLSGLMETAKEMTRESLPIKCLEAVILGITHS

SEQ ID NO: 8095 - protein, 311 aa, Homo sapiens
MTGSAADTHRCPHPKGAKGTRSRSSHARPVSLATSGGSEEEDKDGGVLFHVNKSGFPIDSHTWERMWMHVAKVHPKGGEMVGAIRNAAFLAKPSIPQVPNYRLSMTIPDWLQAIQNYMKTLHYLTNGQPSIERFPISFKTYFSGNYFHHVVLGIYCNGRYGSLGMSRRAELMDKPLTFRTLSDLIFDFEDSYKKYLHTVKKVKIGLYVPHEPHSFQPIEWKQLVLNVSKMLRADIRKELEKYARDMRMKILKPASAHSPTQVRSRGKSLSPRRRQASPPRRLGRREKSPALPEKKVADLSTLNEVGYQIRI

SEQ ID NO: 8096 - protein, 251 aa, Homo sapiens
MTIPDWLQAIQNYMKTLQYNHTGTQFFEIRKMRPLSGLMETAKEMTRESLPIKCLEAVILGIYLTNGQPSIERFPISFKTYFSGNYFHHVVLGIYCNGRYGSLGMSRRAELMDKPLTFRTLSDLIFDFEDSYKKYLHTVKKVKIGLYVPHEPHSFQPIEWKQLVLNVSKMLRADIRKELEKYARDMRMKILKPASAHSPTQVRSRGKSLSPRRRQASPPRRLGRREKSPALPEKKVADLSTLNEVGYQIRI

SEQ ID NO: 8097 - protein, 474 aa, Homo sapiens
MISFCPDCGKSIQAAFKFCPYCGNSLPVEEHVGSQTFVNPHVSSFQGSKRGLNSSFETSPKKVKWSSTVTSPRLSLFSDGDSSESEDTLSSSERSKGSGSRPPTPKSSPQKTRKSPQVTRGSPQKTSCSPQKTRQSPQTLKRSRVTTSLEALPTGTVLTDKSGRQWKLKSFQTRDNQGILYEAAPTSTLTCDSGPQKQKFSLKLDAKDGRLFNEQNFFQRAAKPLQVNKWKKLYSTPLLAIPTCMGFGVHQDKYRFLVLPSLGRSLQSALDVSPKHVLSERSVLQVACRLLDALEFLHENEYVHGNVTAENIFVDPEDQSQVTLAGYGFAFRYCPSGKHVAYVEGSRSPHEGDLEFISMDLHKGCGPSRRSDLQSLGYCMLKWLYGFLPWTNCLPNTEDIMKQKQKFVDKPGPFVGPCGHWIRPSETLQKYLKVVMALTYEEKPPYAMLRNNLEALLQDLRVSPYDPIGLPMVP

SEQ ID NO: 8098 - protein, 412 aa, Homo sapiens
MISFCPDCGKSIQAAFKFCPYCGNSLPVEEHVGSQTFVNPHVSSFQGSKRGLNSSFETSPKKVKWSSTVTSPRLSLFSDGDSSESEDTLSSSERSKGSGSRPPTPKSSPQKTRKSPQVTRGSPQKTSCSPQKTRQSPQTLKRSRVTTSLEALPTGTVLTDKSGRQWKLKSFQTRDNQGILYEAAPTSTLTCDSGPQKQKFSLKLDAKDGRLFNEQNFFQRAAKPLQVNKWKKLYSTPLLAIPTCMGFGVHQDKYRFLVLPSLGRSLQSALDVSPKHVLSERSVLQVACRLLDALEFLHENEYVHGNVTAENIFVDPEDQSQVTLAGYGFAFRYCPSGKHVAYVEGSRSPHEGDLEFISMDLHKGCGPSRRSDLQSLGYCMLKWLYGFLPWTNCLPNTEDIMKQKQKLPWDSF

SEQ ID NO: 8099 - protein, 424 aa, Homo sapiens
MISFCPDCGKSIQAAFKFCPYCGNSLPVEEHVGSQTFVNPHVSSFQGSGSRPPTPKSSPQKTRKSPQVTRGSPQKTSCSPQKTRQSPQTLKRSRVTTSLEALPTGTVLTDKSGRQWKLKSFQTRDNQGILYEAAPTSTLTCDSGPQKQKFSLKLDAKDGRLFNEQNFFQRAAKPLQVNKWKKLYSTPLLAIPTCMGFGVHQDKYRFLVLPSLGRSLQSALDVSPKHVLSERSVLQVACRLLDALEFLHENEYVHGNVTAENIFVDPEDQSQVTLAGYGFAFRYCPSGKHVAYVEGSRSPHEGDLEFISMDLHKGCGPSRRSDLQSLGYCMLKWLYGFLPWTNCLPNTEDIMKQKQKFVDKPGPFVGPCGHWIRPSETLQKYLKVVMALTYEEKPPYAMLRNNLEALLQDLRVSPYDPIGLPMVP

SEQ ID NO: 8100 - protein, 280 aa, Homo sapiens
MDLLKISHTKLHLLEDLSIKNKQRMSNLAQFDSDFYQSNFTIDNQEQSGNDSNAYGNLYGSRKQQAGEQPQPASFVPSEMLMSSGYAGQFFQPASNSDYYSQSPYIDSFDEEPPLLEELGIHFDHIWQKTLTVLNPMKPVDGSIMNETDLTGPILFCVALGATLLLAGKVQFGYVYGMSAIGCLVIHALLNLMSSSGVSYGCVASVLGYCLLPMVILSGCAMFFSLQGIFGIMSSLVIIGWCSLSASKIFIAALHMEGQQLLVAYPCAILYGLFALLTIF

SEQ ID NO: 8101 - protein, 208 aa, Homo sapiens
MDLLKISHTKLHLLEDLSIKNKQRMSNLAQFDSDFYQSNFTIDNQEQSGNDSNAYGNLYGSRKQQAGEQPQPASFVPSEMLMSSGYAGQFFQPASNSDYYSQSPYIDSFDEEPPLLEELGIHFDHIWQKTLTVLNPMKPVDGSIMNETDLTGPILFCVALGATLLLVMCHRKHQILMLVLSSAGFEAICINIRETVSPYIVNFLSERE

SEQ ID NO: 8102 - protein, 68 aa, Homo sapiens
MDLLKISHTKLHLLEDLSIKNKQRMSNLAQFDSDFYQSNFTIDNQEQSGNDSNAYGNLYGSRKTWNPF

SEQ ID NO: 8103 - protein, 132 aa, Homo sapiens
MDLLKISHTKLHLLEDLSIKNKQRMSNLAQFDSDFYQSNFTIDNQEQSGNDSNAYGNLYGSRKQQAGEQPQPASFVPSEMLMSSGYAGQFFQPASNSDYYSQSPYIDSFDEEPPLLEDKNLESILITYGKKL

SEQ ID NO: 8104 - protein, 143 aa, Homo sapiens
MSFSPYSTMITVCVCFNSRVQLTVPSFTAWLRSRYSKALFMVLRRAAQEKDKGVCQGWHCVKKWACKGRIPGQPLQPQPLGPYLRSLSQHPATQTPRPQARASSRYLELHRSQNRGGSEFKFWFCYCLIACCRDSISSSGKWE

SEQ ID NO: 8105 - protein, 165 aa, Homo sapiens
MVTKWWGQDPPVQLRSQLMLWIMELILWKFQSSVVGSSVVTWKISDVAGPHGDHSCSLQHLEQIIGSVSNYPRYTGSRSCDRGENPVSLSKRIKCTWMLGASGFPPRCPSGRDHSRDHPGKSQVPALELANQLAAWGLWSSVVKSWGFRAGETEAPISALSSAHA

SEQ ID NO: 8106 - protein, 396 aa, Homo sapiens
MGERKGVNKYYPPDFNPEKHGSLNRYHNSHPLRERARKLSQGILIIRFEMPYNIWCDGCKNHIGMGVRYNAEKKKVGNYYTTPIYRFRMKCHLCVNYIEMQTDPANCDYVIVSGAQRKEERWDMADNEQVLTTEHEKKQKLETDAMFRLEHGEADRSTLKKALPTLSHIQEAQSAWKDDFALNSMLRRRFREKKKAIQEEEERDQALQAKASLTIPLVPETEDDRKLAALLKFHTLDSYEDKQKLKRTEIISRSWFPSAPGSASSSKVSGVLKKLAQSRRTALATSPITVGDLGIVRRRSRDVPESPQHAADTPKSGEPRVPEEAAQDRPMSPGDCPPETTETPKCSSPRGQEGSRQDKPLSPAGSSQEAADTPDTRHPCSLGSSLVADYSDSESE

SEQ ID NO: 8107 - protein, 350 aa, Homo sapiens
MATTAAPAGGARNGAGPEWGGFEENIQGGGSAVIDMENMDDTSGSSFEDMGELHQRLREEEVDADAADAAAAEEEDGEFLGMKGFKGQLSRQVADQMWQAGKRQASRAFSLYANIDILRPYFDVEPAQVRSRLLESMIPIKMVNFPQKIAGELYGPLMLVFTLVAILLHGMKTSDTIIREGTLMGTAIGTCFGYWLGVSSFIYFLAYLCNAQITMLQMLALLGYGLFGHCIVLFITYNIHLHALFYLFWLLVGGLSTLRMVAVLVSRTVGPTQRLLLCGTLAALHMLFLLYLHFAYHKVVEGILDTLEGPNIPPIQRVPRDIPAMLPAARLPTTVLNATAKAVAVTLQSH

SEQ ID NO: 8108 - protein, 1195 aa, Homo sapiens
MTVMSLSRDLKDDFHSDTVLSILNEQRIRGILCDVTIIVEDTKFKAHSNVLAASSLYFKNIFWSHTICISSHVLELDDLKAEVFTEILNYIYSSTVVVKRQETVTDLAAAGKKLGISFLEDLTDRNFSNSPGPYVFCITEKGVVKEEKNEKRHEEPAITNGPRITNAFSIIETENSNNMFSPLDLRASFKKVSDSMRTASLCLERTDVCHEAEPVRTLAEHSYAVSSVAEAYRSQPVREHDGSSPGNTGKENCEALAAKPKTCRKPKTFSIPQDSDSATENIPPPPVSNLEVNQERSPQPAAVLTRSKSPNNEGDVHFSREDENQSSDVPGPPAAEVPPLVYNCSCCSKAFDSSTLLSAHMQLHKPTQEPLVCKYCNKQFTTLNRLDRHEQICMRSSHMPIPGGNQRFLENYPTIGQNGGSFTGPEPLLSENRIGEFSSTGSTLPDTDHMVKFVNGQMLYSCVVCKRSYVTLSSLRRHANVHSWRRTYPCHYCNKVFALAEYRTRHEIWHTGERRYQCIFCLETFMTYYILKNHQKSFHAIDHRLSISKKTANGGLKPSVYPYKLYRLLPMKCKRAPYKSYRNSSYENARENSQMNESAPGTYVVQNPHSSELPTLNFQDTVNTLTNSPAIPLETSACQDIPTSANVQNAEGTKWGEEALKMDLDNNFYSTEVSVSSTENAVSSDLRAGDVPVLSLSNSSENAASVISYSGSAPSVIVHSSQFSSVIMHSNAIAAMTSSNHRAFSDPAVSQSLKDDSKPEPDKVGRFASRPKSIKEKKKTTSHTRGEIPEESNYVADPGGSLSKTTNIAEETSKIETYIAKPALPGTSTNSNVAPLCQITVKIGNEAIVKRHILGSKLFYKRGRRPKYQMQEEPLPQGNDPEPSGDSPLGLCQSECMEMSEVFDDASDQDSTDKPWRPYYNYKPKKKSRQLKKMRKVNWRKEHGNRSPSHKCKYPAELDCAVGKAPQDKPFEEEETKEMPKLQCELCDGDKAVGAGNQGRPHRHLTSRPYACELCAKQFQSPSTLKMHMRCHTGEKPYQCKTCGRCFSVQGNLQKHERIHLGLKEFVCQYCNKAFTLNETLKIHERIHTGEKRYHCQFCFQRFLYLSTKRNHEQRHIREHNGKGYACFQCPKICKTAAALGMHQKKHLFKSPSQQEKIGDVCHENSNPLENQHFIGSEDNDQKDNIQTGVENVVL

SEQ ID NO: 8109 - protein, 221 aa, Homo sapiens
MMRWNFSPEDLSSIFRNNSTLPKITVKNVDIEFTIPTAVTIEVEPSPVQQDNPPISSEQADFSLAQPDSPSLPLESPEESESSAQQEATAQTPNPPKEVEPSPVQQEFPAEPTEPAKEVEPSATQQEASGHPLKSTKEVNPPPKQEIPAQPSEPPEKVELSPVLQQAPTQLLEPLKKVECSPVQQAVPAQSSEPSIVVEPSPVQQIAHLCLQSSLRKWNPL

SEQ ID NO: 8110 - protein, 299 aa, Homo sapiens
MMLIPTHHFRNIERKPEYLQPEKCVPPPYPGPVGTMWFIRDGCGIACAIVTWFLVLYAEFVVLFVMLIPSRDYVYSIINGIVFNLLAFLALASHCRAMLTDPGAVPKGNATKEFIESLQLKPGQVVYKCPKCCSIKPDRAHHCSVCKRCIRKMDHHCPWVNNCVGENNQKYFVLFTMYIALISLHALIMVGFHFLHCFEEDWTKCSSFSPPTTVILLILLCFEGLLFLIFTSVMFGTQVHSICTDETGIEQLKKEERRWAKKTKWMNMKAVFGHPFSLGWASPFATPDQGKADPYQYVV

SEQ ID NO: 8111 - protein, 327 aa, Homo sapiens
MMLIPTHHFRNIERKPEYLQPEKCVPPPYPGPVGTMWFIRDGCGIACAIVTWFLVLYAEFVVLFVMLIPSRDYVYSIINGIVFNLLAFLALASHCRAMLTDPGAVPKGNATKEFIESLQLKPGQVVYKCPKCCSIKPDRAHHCSVCKRCIRKMDHHCPWVNNCVGENNQKYFVLFTMYIALISLHALIMVGFHFLHCFEEDWTTYGLNREEMAETGISLHEKMQPLNFSSTECSSFSPPTTVILLILLCFEGLLFLIFTSVMFGTQVHSICTDETGIEQLKKEERRWAKKTKWMNMKAVFGHPFSLGWASPFATPDQGKADPYQYVV

SEQ ID NO: 8112 - protein, 801 aa, Homo sapiens
MDEDEFELQPQEPNSFFDGIGADATHMDGDQIVVEIQEAVFVSNIVDSDITVHNFVPDDPDSVVIQDVVEDVVIEEDVQCSDILEEADVSENVIIPEQVLDSDVTEEVSLPHCTVPDDVLASDITSTSMSMPEHVLTSESMHVCDIGHVEHMVHDSVVEAEIITDPLTSDIVSEEVLVADCAPEAVIDASGISVDQQDNDKASCEDYLMISLDDAGKIEHDGSTGVTIDAESEMDPCKVDSTCPEVIKVYIFKADPGEDDLGGTVDIVESEPENDHGVELLDQNSSIRVPREKMVYMTVNDSQQEDEDLNVAEIADEVYMEVIVGEEDAAVAAAAAAVHEQQIDEDEMKTFVPIAWAAAYGNNSDGIENRNGTASALLHIDESAGLGRLAKQKPKKKRRPDSRQYQTAIIIGPDGHPLTVYPCMICGKKFKSRGFLKRHMKNHPEHLAKKKYHCTDCDYTTNKKISLHNHLESHKLTSKAEKAIECDECGKHFSHAGALFTHKMVHKEKGANKMHKCKFCEYETAEQGLLNRHLLAVHSKNFPHICVECGKGFRHPSELRKHMRIHTGEKPYQCQYCEYRSADSSNLKTHIKTKHSKEMPFKCDICLLTFSDTKEVQQHTLVHQESKTHQCLHCDHKSSNSSDLKRHVISVHTKDYPHKCEMCEKGFHRPSELKKHVAVHKGKKMHQCRHCDFKIADPFVLSRHILSVHTKDLPFRCKRCRKGFRQQNELKKHMKTHSGRKVYQCEYCEYSTTDASGFKRHVISIHTKDYPHRCEYCKKGFRRPSEKNQHIMRHHKEVGLP

SEQ ID NO: 8113 - protein, 610 aa, Homo sapiens
MDEDEFELQPQEPNSFFDGIVDDAGKIEHDGSTGVTIDAESEMDPCKVDSTCPEVIKVYIFKADPGEDDLGGTVDIVESEPENDHGVELLDQNSSIRVPREKMVYMTVNDSQQEDEDLNVAEIADEVYMEVIVGEEDAAVAAAAAAVHEQQIDEDEMKTFVPIAWAAAYGNNSDGIENRNGTASALLHIDESAGLGRLAKQKPKKKRRPDSRQYQTAIIIGPDGHPLTVYPCMICGKKFKSRGFLKRHMKNHPEHLAKKKYHCTDCDYTTNKKISLHNHLESHKLTSKAEKAIECDECGKHFSHAGALFTHKMVHKEKGANKMHKCKFCEYETAEQGLLNRHLLAVHSKNFPHICVECGKGFRHPSELRKHMRIHTGEKPYQCQYCEYRSADSSNLKTHIKTKHSKEMPFKCDICLLTFSDTKEVQQHTLVHQESKTHQCLHCDHKSSNSSDLKRHVISVHTKDYPHKCEMCEKGFHRPSELKKHVAVHKGKKMHQCRHCDFKIADPFVLSRHILSVHTKDLPFRCKRCRKGFRQQNELKKHMKTHSGRKVYQCEYCEYSTTDASGFKRHVISIHTKDYPHRCEYCKKGFRRPSEKNQHIMRHHKEVGLP

SEQ ID NO: 8114 - protein, 724 aa, Homo sapiens
MDGDQIVVEIQEAVFVSNIVDSDITVHNFVPDDPDSVVIQDVVEDVVIEEDVQCSDILEEADVSENVIIPEQVLDSDVTEEVSLPHCTVPDDVLASDITSTSMSMPEHVLTSESMHVCDIGHVEHMVHDSVVEAEIITDPLTSDIVSEEVLVADCAPEAVIDASGISVDQQDNDKASCEDYLMISLDDAGKIEHDGSTGVTIDAESEMDPCKVDSTCPEVIKVYIFKADPGEDDLGGTVDIVESEPENDHGVELLDQNSSIRVPREKMVYMTVNDSQQEDEDLSNNSDGIENRNGTASALLHIDESAGLGRLAKQKPKKKRRPDSRQYQTAIIIGPDGHPLTVYPCMICGKKFKSRGFLKRHMKNHPEHLAKKKYHCTDCDYTTNKKISLHNHLESHKLTSKAEKAIECDECGKHFSHAGALFTHKMVHKEKGANKMHKCKFCEYETAEQGLLNRHLLAVHSKNFPHICVECGKGFRHPSELRKHMRIHTGEKPYQCQYCEYRSADSSNLKTHIKTKHSKEMPFKCDICLLTFSDTKEVQQHTLVHQESKTHQCLHCDHKSSNSSDLKRHVISVHTKDYPHKCEMCEKGFHRPSELKKHVAVHKGKKMHQCRHCDFKIADPFVLSRHILSVHTKDLPFRCKRCRKGFRQQNELKKHMKTHSGRKVYQCEYCEYSTTDASGFKRHVISIHTKDYPHRCEYCKKGFRRPSEKNQHIMRHHKEVGLP

SEQ ID NO: 8115 - protein, 692 aa, Homo sapiens
MRACAGSTREAGSGAQDLSTLLCLEESMEEQDEKPPEPPKACAQDSFLPQEIIIKVEGEDTGSLTIPSQEGVNFKIVTVDFTREEQGTWNPAQRTLDRDVILENHRDLVSWDLATAVGKKDSTSKQRIFDEEPANGVKIERFTRDDPWLSSCEEVDDCKDQLEKQQEKQEILLQEVAFTQRKAVIHERVCKSDETGEKSGLNSSLFSSPVIPIRNHFHKHVSHAKKWHLNAAVNSHQKINENETLYENNECGKPPQSIHLIQFTRTQTKDKCYGFSDRIQSFCHGTPLHIHEKIHGGGKTFDFKECGQVLNPKISHNEQQRIPFEESQYKCSETSHSSSLTQNMRNNSEEKPFECNQCGKSFSWSSHLVAHQRTHTGEKPYECSECGKSFSRSSHLVSHQRTHTGEKPYRCNQCGKSFSQSYVLVVHQRTHTGEKPYECNQCGKSFRQSYKLIAHQRTHTGEKPYECNQCGKSFIQSYKLIAHQRIHTGEKPYECNQCGKSFSQSYKLVAHQRTHTGEKPFECNQCGKSFSWSSQLVAHQRTHTGEKPYECSECGKSFNRSSHLVMHQRIHTGEKPYECNQCGKSFSQSYVLVVHQRTHTGEKPYECSQCGKSFRQSSCLTQHQRTHTGEKPFECNQCGKTFSLSARLIVHQRTHTGEKPFTCIQCGKAFINSYKLIRHQATHTEEKLYECN

SEQ ID NO: 8116 - protein, 665 aa, Homo sapiens
MEEQDEKPPEPPKACAQDSFLPQEIIIKVEGEDTGSLTIPSQEGVNFKIVTVDFTREEQGTWNPAQRTLDRDVILENHRDLVSWDLATAVGKKDSTSKQRIFDEEPANGVKIERFTRDDPWLSSCEEVDDCKDQLEKQQEKQEILLQEVAFTQRKAVIHERVCKSDETGEKSGLNSSLFSSPVIPIRNHFHKHVSHAKKWHLNAAVNSHQKINENETLYENNECGKPPQSIHLIQFTRTQTKDKCYGFSDRIQSFCHGTPLHIHEKIHGGGKTFDFKECGQVLNPKISHNEQQRIPFEESQYKCSETSHSSSLTQNMRNNSEEKPFECNQCGKSFSWSSHLVAHQRTHTGEKPYECSECGKSFSRSSHLVSHQRTHTGEKPYRCNQCGKSFSQSYVLVVHQRTHTGEKPYECNQCGKSFRQSYKLIAHQRTHTGEKPYECNQCGKSFIQSYKLIAHQRIHTGEKPYECNQCGKSFSQSYKLVAHQRTHTGEKPFECNQCGKSFSWSSQLVAHQRTHTGEKPYECSECGKSFNRSSHLVMHQRIHTGEKPYECNQCGKSFSQSYVLVVHQRTHTGEKPYECSQCGKSFRQSSCLTQHQRTHTGEKPFECNQCGKTFSLSARLIVHQRTHTGEKPFTCIQCGKAFINSYKLIRHQATHTEEKLYECN

SEQ ID NO: 8117 - protein, 667 aa, Homo sapiens
MRACAGSTREAGSGAQDLSTLLCLEESMEEQDEKPPEPPKACAQEGVNFKIVTVDFTREEQGTWNPAQRTLDRDVILENHRDLVSWDLATAVGKKDSTSKQRIFDEEPANGVKIERFTRDDPWLSSCEEVDDCKDQLEKQQEKQEILLQEVAFTQRKAVIHERVCKSDETGEKSGLNSSLFSSPVIPIRNHFHKHVSHAKKWHLNAAVNSHQKINENETLYENNECGKPPQSIHLIQFTRTQTKDKCYGFSDRIQSFCHGTPLHIHEKIHGGGKTFDFKECGQVLNPKISHNEQQRIPFEESQYKCSETSHSSSLTQNMRNNSEEKPFECNQCGKSFSWSSHLVAHQRTHTGEKPYECSECGKSFSRSSHLVSHQRTHTGEKPYRCNQCGKSFSQSYVLVVHQRTHTGEKPYECNQCGKSFRQSYKLIAHQRTHTGEKPYECNQCGKSFIQSYKLIAHQRIHTGEKPYECNQCGKSFSQSYKLVAHQRTHTGEKPFECNQCGKSFSWSSQLVAHQRTHTGEKPYECSECGKSFNRSSHLVMHQRIHTGEKPYECNQCGKSFSQSYVLVVHQRTHTGEKPYECSQCGKSFRQSSCLTQHQRTHTGEKPFECNQCGKTFSLSARLIVHQRTHTGEKPFTCIQCGKAFINSYKLIRHQATHTEEKLYECN

SEQ ID NO: 8118 - protein, 691 aa, Homo sapiens
MRRVYAGSWKRCAAQDLSTLLCLEESMEEQDEKPPEPPKACAQDSFLPQEIIIKVEGEDTGSLTIPSQEGVNFKIVTVDFTREEQGTWNPAQRTLDRDVILENHRDLVSWDLATAVGKKDSTSKQRIFDEEPANGVKIERFTRDDPWLSSCEEVDDCKDQLEKQQEKQEILLQEVAFTQRKAVIHERVCKSDETGEKSGLNSSLFSSPVIPIRNHFHKHVSHAKKWHLNAAVNSHQKINENETLYENNECGKPPQSIHLIQFTRTQTKDKCYGFSDRIQSFCHGTPLHIHEKIHGGGKTFDFKECGQVLNPKISHNEQQRIPFEESQYKCSETSHSSSLTQNMRNNSEEKPFECNQCGKSFSWSSHLVAHQRTHTGEKPYECSECGKSFSRSSHLVSHQRTHTGEKPYRCNQCGKSFSQSYVLVVHQRTHTGEKPYECNQCGKSFRQSYKLIAHQRTHTGEKPYECNQCGKSFIQSYKLIAHQRIHTGEKPYECNQCGKSFSQSYKLVAHQRTHTGEKPFECNQCGKSFSWSSQLVAHQRTHTGEKPYECSECGKSFNRSSHLVMHQRIHTGEKPYECNQCGKSFSQSYVLVVHQRTHTGEKPYECSQCGKSFRQSSCLTQHQRTHTGEKPFECNQCGKTFSLSARLIVHQRTHTGEKPFTCIQCGKAFINSYKLIRHQATHTEEKLYECN

SEQ ID NO: 8119 - protein, 670 aa, Homo sapiens
MTKFQEMVTFKDVAVVFTREELGLLDLAQRKLYQDVMLENFRNLLSVGYQPFKLDVILQLGKEDKLRMMETEIQGDGCSGHKNQNEIDTLQEVRLRFLSYEDLICWQIWEQFTSKLTSNQDLIINLQGKRSKLLKQGDSPCQVWTGESSQVSEDENYVIKLQGESSNSIKNQELPLRTTWDFWRKMYLREPQNYQSRCQQIDVKNKLCKCDHCVRQRIAHQHDDHGVHKREKAFSHNNCGKDCVKESSQHSIIQSGEQTSDENGKGLSVGSNLELHQQLHLRDKPHVNVEYGKGIGYSSGLPRHQCFHIGEKCYRNGDSGEGFSQGSHLQPHQRVSTGENLYRCQVYARSSNQNSCLPSHELTHPGEKLCTCGRCGKGFHHSLDFDIHCVDSAGERACKCDVYDKGFSQTSQLQAHQRGHSRDKTYKWEVSDRIFNRNSGLHQRVHTGEKPYKCEVCDKGFSKASNLQAHQRIHTGEKPYKCDVCDKNFSRNSHLQAHQRVHTGEKPYKCDTCGKDFSQISHLQAHQRVHKGEKPYKCETCGKGFSQSSHLQDHQQVHTGENPYKCDVCGKGFSWSSHLQAHQRVHTGEKPYKCEECRKGFIWNSYLHVHQRIHTGEKPYKCGMCGKSFSQTSHLQAHQRVHTGEKPYKCFVCGKGFSKSSLSSDSSESP

SEQ ID NO: 8120 - protein, 550 aa, Homo sapiens
MPLQGSVSFKDVTVDFTQEEWQQLDPAQKALYRDVMLENYCHFVSVGFHMAKPDMIRKLEQGEELWTQRIFPSYSYLEEDGKTEDVLVKFKEYQDRHSRPLIFINHKKLIKERSNIYGKTFTLGKNRISKTILCEYKPDGKVLKNISELVIRNISPIKEKFGDSTGWEKSLLNTKHEKIHPAVNLHKQTERVLSGKQELIQHQKVQAPEQPFDHNECEKSFLMKGMLFTHTRAHRGERTFEYNKDGIAFIEKSSLSVHPSNLMEKKPSAYNKYGKFLCRKPVFIMPQRPQTEEKPFHCPYCGNNFRRKSYLIEHQRIHTGEKPYVCNQCGKAFRQKTALTLHEKTHIEGKPFICIDCGKSFRQKATLTRHHKTHTGEKAYECPQCGSAFRKKSYLIDHQRTHTGEKPYQCNECGKAFIQKTTLTVHQRTHTGEKPYICNECGKSFCQKTTLTLHQRIHTGEKPYICNECGKSFRQKAILTVHHRIHTGEKSNGCPQCGKAFSRKSNLIRHQKTHTGEKPYECKQCGKFFSCKSNLIVHQKTHKVETTGIQ

SEQ ID NO: 8121 - protein, 549 aa, Homo sapiens
MSQGSVSFKDVTVDFTQEEWQQLDPAQKALYRDVMLENYCHFVSVGFHMAKPDMIRKLEQGEELWTQRIFPSYSYLEEDGKTEDVLVKFKEYQDRHSRPLIFINHKKLIKERSNIYGKTFTLGKNRISKTILCEYKPDGKVLKNISELVIRNISPIKEKFGDSTGWEKSLLNTKHEKIHPAVNLHKQTERVLSGKQELIQHQKVQAPEQPFDHNECEKSFLMKGMLFTHTRAHRGERTFEYNKDGIAFIEKSSLSVHPSNLMEKKPSAYNKYGKFLCRKPVFIMPQRPQTEEKPFHCPYCGNNFRRKSYLIEHQRIHTGEKPYVCNQCGKAFRQKTALTLHEKTHIEGKPFICIDCGKSFRQKATLTRHHKTHTGEKAYECPQCGSAFRKKSYLIDHQRTHTGEKPYQCNECGKAFIQKTTLTVHQRTHTGEKPYICNECGKSFCQKTTLTLHQRIHTGEKPYICNECGKSFRQKAILTVHHRIHTGEKSNGCPQCGKAFSRKSNLIRHQKTHTGEKPYECKQCGKFFSCKSNLIVHQKTHKVETTGIQ

SEQ ID NO: 8122 - protein, 549 aa, Homo sapiens
MPLQGSVSFKDVTVDFTQEEWQQLDPAQKALYRDVMLENYCHFVSVGFHMAKPDMIRKLEQGEELWTQRIFPSYSYLEDGKTEDVLVKFKEYQDRHSRPLIFINHKKLIKERSNIYGKTFTLGKNRISKTILCEYKPDGKVLKNISELVIRNISPIKEKFGDSTGWEKSLLNTKHEKIHPAVNLHKQTERVLSGKQELIQHQKVQAPEQPFDHNECEKSFLMKGMLFTHTRAHRGERTFEYNKDGIAFIEKSSLSVHPSNLMEKKPSAYNKYGKFLCRKPVFIMPQRPQTEEKPFHCPYCGNNFRRKSYLIEHQRIHTGEKPYVCNQCGKAFRQKTALTLHEKTHIEGKPFICIDCGKSFRQKATLTRHHKTHTGEKAYECPQCGSAFRKKSYLIDHQRTHTGEKPYQCNECGKAFIQKTTLTVHQRTHTGEKPYICNECGKSFCQKTTLTLHQRIHTGEKPYICNECGKSFRQKAILTVHHRIHTGEKSNGCPQCGKAFSRKSNLIRHQKTHTGEKPYECKQCGKFFSCKSNLIVHQKTHKVETTGIQ

SEQ ID NO: 8123 - protein, 217 aa, Homo sapiens
MSGGLAPSKSTVYVSNLPFSLTNNDLYRIFSKYGKVVKVTIMKDKDTRKSKGVAFILFLDKDSAQNCTRAINNKQLFGRVIKASIAIDNGRAAEFIRRRNYFDKSKCYECGESGHLSYACPKNMLGEREPPKKKEKKKKKKAPEPEEEIEEVEESEDEGEDPALDSLSQAIAFQQAKIEEEQKKWKPSSGVPSTSDDSRRPRIKKSTYFSDEEELSD

SEQ ID NO: 8124 - protein, 426 aa, Homo sapiens
MPPKKQAQAGGSKKAEQKKKEKIIEDKTFGLKNKKGAKQQKFIKAVTHQVKFGQQNPRQVAQSEAEKKLKKDDKKKELQELNELFKPVVAAQKISKGADPKSVVCAFFKQGQCTKGDKCKFSHDLTLERKCEKRSVYIDARDEELEKDTMDNWDEKKLEEVVNKKHGEAEKKKPKTQIVCKHFLEAIENNKYGWFWVCPGGGDICMYRHALPPGFVLKKDKKKEEKEDEISLEDLIERERSALGPNVTKITLESFLAWKKRKRQEKIDKLEQDMERRKADFKAGKALVISGREVFEFRPELVNDDDEEADDTRYTQGTGGDEVDDSVSVNDIDLSLYIPRDVDETGITVASLERFSTYTSDKDENKLSEASGGRAENGERSDLEEDNEREGTENGAIDAVPVDENLFTGEDLDELEEELNTLDLEE

SEQ ID NO: 8125 - protein, 162 aa, Homo sapiens
MYRHALPPGFVLKKDKKKEEKEDEISLEDLIERERSALGPNVTKITLESFLAWKKRKRQEKIDKLEQDMERRKADFKAGKALVISGREVFEFRPELVNDDDEEADDTRYTQGTGGDEVRGSFVPHLLMLIERNNRKYHNMVKSHQHQSHSAWVQILTPTMGN

SEQ ID NO: 8126 - protein, 626 aa, Homo sapiens
MNVEVVKVMPQDLVTFKDVAIDFSQEEWQWMNPAQKRLYRSMMLENYQSLVSLGLCISKPYVISLLEQGREPWEMTSEMTRSPFSDWESIYVTQELPLKQFMYDDACMEGITSYGLECSTFEENWKWEDLFEKQMGSHEMFSKKEIITHKETITKETEFKYTKFGKCIHLENIEESIYNHTSDKKSFSKNSMVIKHKKVYVGKKLFKCNECDKTFTHSSSLTVHFRIHTGEKPYACEECGKAFKQRQHLAQHHRTHTGEKLFECKECRKAFKQSEHLIQHQRIHTGEKPYKCKECRKAFRQPAHLAQHQRIHTGEKPYECKECGKAFSDGSSFARHQRCHTGKRPYECIECGKAFRYNTSFIRHWRSYHTGEKPFNCIDCGKAFSVHIGLILHRRIHTGEKPYKCGVCGKTFSSGSSRTVHQRIHTGEKPYECDICGKDFSHHASLTQHQRVHSGEKPYECKECGKAFRQNVHLVSHLRIHTGEKPYECKECGKAFRISSQLATHQRIHTGEKPYECIECGNAFKQRSHLAQHQKTHTGEKPYECNECGKAFSQTSNLTQHQRIHTGEKPYKCTECGKAFSDSSSCAQHQRLHTGQRPYQCFECGKAFRRKLSLICHQRSHTGEEP

SEQ ID NO: 8127 - protein, 247 aa, Homo sapiens
MNVEVVKVMPQDLVTFKDVAIDFSQEEWQWMNPAQKRLYRSMMLENYQSLVSLGLCISKPYVISLLEQGREPWEMTSEMTRSPFSEFILVKNHMHVRNVEKPSSKGNTLLNITEHILERNSLNVKNVGKPSNKVNTLFSIKEFILEKNHINVRNAEKPSDSLHTLLSIREFILERNPMNVKNVAKPSVMARLLLDIRDVTLAKDPMNVLSVGRLLGITHLLFVTGGVIILERSLLIALIVGKPSVFT

SEQ ID NO: 8128 - protein, 126 aa, Homo sapiens
MGLLTFRDVAIEFSREEWEHLDSDQKLLYGDVMLENYGNLVSLGLAVSKPDLITFLEQRKEPWNVKSAETVAIQPDIFSHDTQGLLRKKLIEASFQKVILDGYGSCGPQNLNLRKEWESEGKIILW

SEQ ID NO: 8129 - protein, 178 aa, Homo sapiens
MVNVPDIFSHDTQGLLRKKLIEASFQKVILDGYGSCGPQNLNLRKEWESEGKCEGHNGYYDGHTKCKTTTYNKNLTVTGGQKHEKTQFMSVAFSKPCVSVSKCQHQFLKLTFSFKGNLDNPNSDLVHVSNNHLNQLKYRTGVNVQSNISEKERFKNEEVISKYDQFDGSLLKVCFTNK

SEQ ID NO: 8130 - protein, 105 aa, Homo sapiens
MWLSTSPYRKGSQCGEAFSQIPGHNLNKKTPPGVKPPESHVCGEVGVGYPSTERHIRDRLGRKPCEYQECRQKAYTCKPCGNAFRFHHSFHIHERPHSGENLYEC

SEQ ID NO: 8131 - protein, 729 aa, Homo sapiens
MAAPDLAHGGHVSRDSVCLHEEQTQAAGMVAGWLINCYQDAVTFDDVAVDFTQEEWTLLDPSQRDLYRDVMLENYENLASVEWRLKTKGPALRQDRSWFRASNETQTARSHNGGQLCDRTQCGEAFSEHSGLSTHVRTQNTGDSCVSNHYERDFFIPCQKTLFKIGEQFSVLGQCGKAFSSTPNVVSQQACTRDRSLDYSSCGEVFLNQSYLQARAGSHNGEETWKWKPCGKALTHSMGCATPVEMHAVRNPHVCRECGKAFRYTAYLTGRVQVHPGEKPCELEECGKASPVSSSLTQHVRIHAAEKPCECKECGKAFTGLSGLSKHVQTDPGQKPYECKDCGKACGGFYLLNEHGKTHTREKPFACVVCGKYFRNSSCLNNHVRIHTGIKPYTCSYCGKAFTVRCGLTRHVRTHTGEKPYTCKDCGKAFCTSSGLTEHVRTHTGEKPYECKDCGKSFTVSSSLTEHARIHTGEKPYECKQCGKAFTGRSGLTKHMRTHTGEKPYECKDCGKAYNRVYLLNEHVKTHTEEKPFICTVCRKSFRNSSCLNKHIQIHTGIKPYECKDCGKTFTVSSSLTEHIRTHTGEKPYECKVCGKAFTTSSHLIVHIRTHTGEKPYICKECGKAFASSSHLIEHRRTHTGEKPYICNECGKAFRASSHLHKHGRIHTGQKPYKCKECGKAYNRFYLLKEHLKTYTEEQVFVCKDCGKSFKNSSCLNHHTQIHTDEKPF

SEQ ID NO: 8132 - protein, 687 aa, Homo sapiens
MLENYENLASVGHHLFQPSVIYWLEQEEELRAGRRAVLQEWRLKTKGPALRQDRSWFRASNETQTARSHNGGQLCDRTQCGEAFSEHSGLSTHVRTQNTGDSCVSNHYERDFFIPCQKTLFKIGEQFSVLGQCGKAFSSTPNVVSQQACTRDRSLDYSSCGEVFLNQSYLQARAGSHNGEETWKWKPCGKALTHSMGCATPVEMHAVRNPHVCRECGKAFRYTAYLTGRVQVHPGEKPCELEECGKASPVSSSLTQHVRIHAAEKPCECKECGKAFTGLSGLSKHVQTDPGQKPYECKDCGKACGGFYLLNEHGKTHTREKPFACVVCGKYFRNSSCLNNHVRIHTGIKPYTCSYCGKAFTVRCGLTRHVRTHTGEKPYTCKDCGKAFCTSSGLTEHVRTHTGEKPYECKDCGKSFTVSSSLTEHARIHTGEKPYECKQCGKAFTGRSGLTKHMRTHTGEKPYECKDCGKAYNRVYLLNEHVKTHTEEKPFICTVCRKSFRNSSCLNKHIQIHTGIKPYECKDCGKTFTVSSSLTEHIRTHTGEKPYECKVCGKAFTTSSHLIVHIRTHTGEKPYICKECGKAFASSSHLIEHRRTHTGEKPYICNECGKAFRASSHLHKHGRIHTGQKPYKCKECGKAYNRFYLLKEHLKTYTEEQVFVCKDCGKSFKNSSCLNHHTQIHTDEKPF

SEQ ID NO: 8133 - protein, 168 aa, Homo sapiens
MGWRFPSPSPRQASPVAPLLAAPTAVRSCSHCSGQREAISSHPLQLETPELGVCLPWHWEGWRQVRKITPSLPQPPGSQVPLEVTFHVRATLPHFRGGETKARRAREEGKLPSLGNAPAPRRRSVAWPAAEGSCAAPESSPPASEASLPAPESSLLVAGSGDLCADSF

SEQ ID NO: 8134 - protein, 535 aa, Homo sapiens
MLCDEKAQKRRKRKAKESGMALPQGHLTFRDVAIEFSQAEWKCLDPAQRALYKDVMLENYRNLVSLGISLPDLNINSMLEQRREPWSGESEVKIAKNSDGRECIKGVNTGSSYALGSNAEDKPIKKQLGVSFHLHLSELELFPDERVINGCNQVENFINHSSSVSCLQEMSSSVKTPIFNRNDFDDSSFLPQEQKVHLREKPYECNEHSKVFRVSSSLTKHQVIHTVEKPYKCNSCGKVFSRNSHLAEHCRIHTGEKPYKCNVCGKVFSYNSNFARHQRIHTREKPYECNECGKVFSNNSYLARHQRIHAEEKPYKCNECGKGFSHKSSLANHWRIYTGEKPYKCDECGKAFYRIALLVRHQKIHTGEKPYKCNECGKVFIQNSHLAQHWRIHTGEKPYKCNECGKVFNQLSNLARHRRIHTGEKPYKCNECGKAFSEYSGLSAHLVIHTGEKPYKCSECGKAFRHKLSLTNHQRIHTGERPYKCNECGKVFNRIAHLARHRKIHTGEKPYKCNECGKAFSRISYLAQHWTIHMG

SEQ ID NO: 8135 - protein, 458 aa, Homo sapiens
MLEQRREPWSGESEVKIAKNSDGRECIKGVNTGSSYALGSNAEDKPIKKQLGVSFHLHLSELELFPDERVINGCNQVENFINHSSSVSCLQEMSSSVKTPIFNRNDFDDSSFLPQEQKVHLREKPYECNEHSKVFRVSSSLTKHQVIHTVEKPYKCNSCGKVFSRNSHLAEHCRIHTGEKPYKCNVCGKVFSYNSNFARHQRIHTREKPYECNECGKVFSNNSYLARHQRIHAEEKPYKCNECGKGFSHKSSLANHWRIYTGEKPYKCDECGKAFYRIALLVRHQKIHTGEKPYKCNECGKVFIQNSHLAQHWRIHTGEKPYKCNECGKVFNQLSNLARHRRIHTGEKPYKCNECGKAFSEYSGLSAHLVIHTGEKPYKCSECGKAFRHKLSLTNHQRIHTGERPYKCNECGKVFNRIAHLARHRKIHTGEKPYKCNECGKAFSRISYLAQHWTIHMG

SEQ ID NO: 8136 - protein, 366 aa, Homo sapiens
MSSSVKTPIFNRNDFDDSSFLPQEQKVHLREKPYECNEHSKVFRVSSSLTKHQVIHTVEKPYKCNSCGKVFSRNSHLAEHCRIHTGEKPYKCNVCGKVFSYNSNFARHQRIHTREKPYECNECGKVFSNNSYLARHQRIHAEEKPYKCNECGKGFSHKSSLANHWRIYTGEKPYKCDECGKAFYRIALLVRHQKIHTGEKPYKCNECGKVFIQNSHLAQHWRIHTGEKPYKCNECGKVFNQLSNLARHRRIHTGEKPYKCNECGKAFSEYSGLSAHLVIHTGEKPYKCSECGKAFRHKLSLTNHQRIHTGERPYKCNECGKVFNRIAHLARHRKIHTGEKPYKCNECGKAFSRISYLAQHWTIHMG

SEQ ID NO: 8137 - protein, 568 aa, Homo sapiens
MRRSVLVRNPGHKGLRPVYEELDSDSEDLDPNPEDLDPVSEDPEPDPEDLNTVPEDVDPSYEDLEPVSEDLDPDAEAPGSEPQDPDPMSSSFDLDPDVIGPVPLILDPNSDTLSPGDPKVDPISSGLTATPQVLATSPAVLPAPASPPRPFSCPDCGRAFRRSSGLSQHRRTHSGEKPYRCPDCGKSFSHGATLAQHRGIHTGARPYQCAACGKAFGWRSTLLKHRSSHSGEKPHHCPVCGKAFGHGSLLAQHLRTHGGPRPHKCPVCAKGFGQGSALLKHLRTHTGERPYPCPQCGKAFGQSSALLQHQRTHTAERPYRCPHCGKAFGQSSNLQHHLRIHTGERPYACPHCSKAFGQSSALLQHLHVHSGERPYRCQLCGKAFGQASSLTKHKRVHEGAAAAAAAAAAAAAAAAAGLGLGPGLSPASMMRPGQVSLLGPDAVSVLGSGLGLSPGTSSGRNPDPGSGPGTLPDPSSKPLPGSRSTPSPTPVESSDPKAGHDAGPDLVPSPDLDPVPSPDPDPVPSPDPNPVSCPDPCSPTRGTVSPALPTGESPEWVQEQGALLGPDG

SEQ ID NO: 8138 - protein, 499 aa, Homo sapiens
MKRHEMAAKPPAMCSHFAKDLRPEQYIKNSFQQVILRRYGKCGYQKGCKSVDEHKLHKGGHKGLNRCVTTTQSKIVQCDKYVKVFHKYSNAKRHKIRHTGKNPFKCKECGKSFCMLSQLTQHEIIHTGEKPYKCEECGKAFKKSSNLTNHKIIHTGEKPYKCEECGKAFNQSSTLTRHKIIHTGEKLYKCEECGKAFNRSSNLTKHKIVHTGEKPYKCEECGKAFKQSSNLTNHKKIHTGEKPYKCGECGKAFTLSSHLTTHKRIHTGEKPYKCEECGKAFSVFSTLTKHKIIHTEEKPYKCEECGKAFNRSSHLTNHKVIHTGEKPYKCEECGKAFTKSSTLTYHKVIHTGKKPYKCEECGKAFSIFSILTKHKVIHTEDKPYKCEECGKTFNYSSNFTNHKKIHTGEKPYKCEECGKSFILSSHLTTHKIIHTGEKPYKCKECGKAFNQSSTLMKHKIIHTGEKPYKCEECGKAFNQSPNLTKHKRIHTKEKPYKCK

SEQ ID NO: 8139 - protein, 462 aa, Homo sapiens
MLCDEEAQKRKAKESGMALPQGRLTFMDVAIEFSQEEWKSLDPGQRALYRDVMLENYRNLVFLGICLPDLSIISMLKQRREPLILQSQVKIVKNTDGRECVRSVNTGRSCVLGSNAENKPIKNQLGLTLEAHLSELQLFQAGRKIYRSNQVEKFTNHRSSVSPLQKISSSFTTHIFNKYRNDLIDFPLLPQEEKAYIRGKSYEYECSEDGEVFRVRASLTNHQVIHTAEKPYKCTECGKVFSRNSHLVEHWRIHTGQKPYKCSECDKVFNRNSNLARHQRIHTGEKPHKCNECGKAFRECSGLTTHLVIHTGEKPYKCNECGKNFRHKFSLTNHQRSHTAEKPYKCNECGKVFSLLSYLARHQIIHSTEKPYKCNECGRAFHKRPGLMAHLLIHTGEKPYKCNECDKVFGRKLYLTNHQRIHTGERPYKCNACGKVFNQNPHLSRHRKIHAGENSLRTLQME

SEQ ID NO: 8140 - protein, 419 aa, Homo sapiens
MLCDEEAQKRKAKESGMALPQGRLTFMDVAIEFSQEEWKSLDPGQRALYRDVMLENYRNLVFLGRSCVLGSNAENKPIKNQLGLTLEAHLSELQLFQAGRKIYRSNQVEKFTNHRSSVSPLQKISSSFTTHIFNKYRNDLIDFPLLPQEEKAYIRGKSYEYECSEDGEVFRVRASLTNHQVIHTAEKPYKCTECGKVFSRNSHLVEHWRIHTGQKPYKCSECDKVFNRNSNLARHQRIHTGEKPHKCNECGKAFRECSGLTTHLVIHTGEKPYKCNECGKNFRHKFSLTNHQRSHTAEKPYKCNECGKVFSLLSYLARHQIIHSTEKPYKCNECGRAFHKRPGLMAHLLIHTGEKPYKCNECDKVFGRKLYLTNHQRIHTGERPYKCNACGKVFNQNPHLSRHRKIHAGENSLRTLQME

SEQ ID NO: 8141 - protein, 792 aa, Homo sapiens
MAAINPWASWGALTDQSWGMTAVDPWASWALCPQYPAWHVEGSLEEGRRATGLPAAQVQEPVTFKDVAVDFTQEEWGQLDLVQRTLYRDVMLETYGHLLSVGNQIAKPEVISLLEQGEEPWSVEQACPQRTCPEWVRNLESKALIPAQSIFEEEQSHGMKLERYIWDDPWFSRLEVLGCKDQLEMYHMNQSTAMRQMVFMQKQVLSQRSSEFCGLGAEFSQNLNFVPSQRVSQIEHFYKPDTHAQSWRCDSAIMYADKVTCENNDYDKTVYQSIQPIYPARIQTGDNLFKCTDAVKSFNHIIHFGDHKGIHTGEKLYEYKECHQIFNQSPSFNEHPRLHVGENQYNYKEYENIFYFSSFMEHQKIGTVEKAYKYNEWEKVFGYDSFLTQHTSTYTAEKPYDYNECGTSFIWSSYLIQHKKTHTGEKPYECDKCGKVFRNRSALTKHERTHTGIKPYECNKCGKAFSWNSHLIVHKRIHTGEKPYVCNECGKSFNWNSHLIGHQRTHTGEKPFECTECGKSFSWSSHLIAHMRMHTGEKPFKCDECEKAFRDYSALSKHERTHSGAKPYKCTECGKSFSWSSHLIAHQRTHTGEKPYNCQECGKAFRERSALTKHEIIHSGIKPYECNKCGKSCSQMAHLVRHQRTHTGEKPYECNKCGKSFSQSCHLVAHRRIHTGEKPYKCNQCERSFNCSSHLIAHRRTHTGEKPYRCNECGKAFNESSSLIVHLRNHTGEKPYKCNHCEKAFCKNSSLIIHQRMHSGEKRFICSECGKAFSGHSALLQHQRNHSEEKLN

SEQ ID NO: 8142 - protein, 560 aa, Homo sapiens
MGQPAPYAEGPIQGGDAGELCKCDFLVSISIPQTRSDIPAGARRSSMGPRSLDTCWGRGPERHVHRLECNGVIFTHRNLCLPGGKTKTENEEKTAQLNISKESESHRLIVEGLLMDVPQHPDFKDRLEKSQLHDTGNKTKIGDCTDLTVQDHESSTTEREEIARKLEESSVSTHLITKQGFAKEQVFYKCGECGSYYNPHSDFHLHQRVHTNEKPYTCKECGKTFRYNSKLSRHQKIHTGEKPYSCEECGQAFSQNSHLLQHQKLHGGQRPYECTDCGKTFSYNSKLIRHQRIHTGEKPFKCKECGKAFSCSYDCIIHERIHNGEKPYECKECGKSLSSNSVLIQHQRIHTGEKPYECKECGKAFHRSSVFLQHQRFHTGEQLYKCNECWKTFSCSSRFIVHQRIHNGEKPYECQECGKTFSQKITLVQHQRVHTGEKPYECKECGKAFRWNASFIQHQKWHTRKKLINGTGLSAVKPYCPCAILSPLPPQHTCSALAPPGPPLSSSHAVVLPPSVPFFLLLPSSEKANPSPVQIAHFFQDLAFPGKSSLQSPNPLSHSL

SEQ ID NO: 8143 - protein, 532 aa, Homo sapiens
MKPGVISHAPDSVVPAAFPFPKPDLIFQLEQGEAAWGPDPWTLAGGEALRGMCTGGKTKTENEEKTAQLNISKESESHRLIVEGLLMDVPQHPDFKDRLEKSQLHDTGNKTKIGDCTDLTVQDHESSTTEREEIARKLEESSVSTHLITKQGFAKEQVFYKCGECGSYYNPHSDFHLHQRVHTNEKPYTCKECGKTFRYNSKLSRHQKIHTGEKPYSCEECGQAFSQNSHLLQHQKLHGGQRPYECTDCGKTFSYNSKLIRHQRIHTGEKPFKCKECGKAFSCSYDCIIHERIHNGEKPYECKECGKSLSSNSVLIQHQRIHTGEKPYECKECGKAFHRSSVFLQHQRFHTGEQLYKCNECWKTFSCSSRFIVHQRIHNGEKPYECQECGKTFSQKITLVQHQRVHTGEKPYECKECGKAFRWNASFIQHQKWHTRKKLINGTGLSAVKPYCPCAILSPLPPQHTCSALAPPGPPLSSSHAVVLPPSVPFFLLLPSSEKANPSPVQIAHFFQDLAFPGKSSLQSPNPLSHSL

SEQ ID NO: 8144 - protein, 576 aa, Homo sapiens
MLQTVWFQGLGRNLLFQEPVTFEDVAVYFTQNEWASLHPTQRALYREVMLENYANVTSLSAFPFPKPDLIFQLEQGEAAWGPDPWTLAGGEALRGMCTGGKTKTENEEKTAQLNISKESESHRLIVEGLLMDVPQHPDFKDRLEKSQLHDTGNKTKIGDCTDLTVQDHESSTTEREEIARKLEESSVSTHLITKQGFAKEQVFYKCGECGSYYNPHSDFHLHQRVHTNEKPYTCKECGKTFRYNSKLSRHQKIHTGEKPYSCEECGQAFSQNSHLLQHQKLHGGQRPYECTDCGKTFSYNSKLIRHQRIHTGEKPFKCKECGKAFSCSYDCIIHERIHNGEKPYECKECGKSLSSNSVLIQHQRIHTGEKPYECKECGKAFHRSSVFLQHQRFHTGEQLYKCNECWKTFSCSSRFIVHQRIHNGEKPYECQECGKTFSQKITLVQHQRVHTGEKPYECKECGKAFRWNASFIQHQKWHTRKKLINGTGLSAVKPYCPCAILSPLPPQHTCSALAPPGPPLSSSHAVVLPPSVPFFLLLPSSEKANPSPVQIAHFFQDLAFPGKSSLQSPNPLSHSL

SEQ ID NO: 8145 - protein, 616 aa, Homo sapiens
MLQTVWFQGLGRNLLFQEPVTFEDVAVYFTQNEWASLHPTQRALYREVMLENYANVTSLYPTAGGFPLDTERTEKVPGALSSFLPSSSSLELILALLPMSAFPFPKPDLIFQLEQGEAAWGPDPWTLAGGEALRGMCTGGKTKTENEEKTAQLNISKESESHRLIVEGLLMDVPQHPDFKDRLEKSQLHDTGNKTKIGDCTDLTVQDHESSTTEREEIARKLEESSVSTHLITKQGFAKEQVFYKCGECGSYYNPHSDFHLHQRVHTNEKPYTCKECGKTFRYNSKLSRHQKIHTGEKPYSCEECGQAFSQNSHLLQHQKLHGGQRPYECTDCGKTFSYNSKLIRHQRIHTGEKPFKCKECGKAFSCSYDCIIHERIHNGEKPYECKECGKSLSSNSVLIQHQRIHTGEKPYECKECGKAFHRSSVFLQHQRFHTGEQLYKCNECWKTFSCSSRFIVHQRIHNGEKPYECQECGKTFSQKITLVQHQRVHTGEKPYECKECGKAFRWNASFIQHQKWHTRKKLINGTGLSAVKPYCPCAILSPLPPQHTCSALAPPGPPLSSSHAVVLPPSVPFFLLLPSSEKANPSPVQIAHFFQDLAFPGKSSLQSPNPLSHSL

SEQ ID NO: 8146 - protein, 444 aa, Homo sapiens
MGPLQFRDVAIEFSLEEWHCLDAAQRNLYRDVMLENYRNLIFLGIVVSKPNLITCLEQGKKPLTMKRHEMIAKPPVMYSHFAQDLWSEQSIKDSFQKVILRRYEKCRHDNLQLKKGCESVDECPVHKRGYNGLKQCLATTQRKIFQCDEYVKFLHKFSNSNKHKIRDTGKKSFKCIEYGKTFNQSSTRTTYKKIDAGEKRYKCEECGKAYKQSSHLTTHKKIHTGEKPYKCEECGKAYKQSCNLTTHKIIHTGEKPYRCRECGKAFNHPATLFSHKKIHTGEKPYKCDKCGKAFISSSTLTKHEIIHTGEKPYKCEECGKAFNRSSNLTKHKRIHTGDVPYKCDECGKTFTWYSSLSKHKRAHTGEKPYKCEECGKAFTAFSTLTEHKIIHTGEKPYKCEECGKAFNWSSALNKHKKIHIRQKPCIVKNVENLLNVPQPLISIR

SEQ ID NO: 8147 - protein, 412 aa, Homo sapiens
MGPLQFRDVAIEFSLEEWHCLDAAQRNLYRDVMLENYRNLIFLVMYSHFAQDLWSEQSIKDSFQKVILRRYEKCRHDNLQLKKGCESVDECPVHKRGYNGLKQCLATTQRKIFQCDEYVKFLHKFSNSNKHKIRDTGKKSFKCIEYGKTFNQSSTRTTYKKIDAGEKRYKCEECGKAYKQSSHLTTHKKIHTGEKPYKCEECGKAYKQSCNLTTHKIIHTGEKPYRCRECGKAFNHPATLFSHKKIHTGEKPYKCDKCGKAFISSSTLTKHEIIHTGEKPYKCEECGKAFNRSSNLTKHKRIHTGDVPYKCDECGKTFTWYSSLSKHKRAHTGEKPYKCEECGKAFTAFSTLTEHKIIHTGEKPYKCEECGKAFNWSSALNKHKKIHIRQKPCIVKNVENLLNVPQPLISIR

SEQ ID NO: 8148 - protein, 807 aa, Homo sapiens
MKEWKSKMEISEEKKSARAASEKLQRQITQECELVETSNSEDRLLKHWVSPLKDAMRHLPSQESGIREMHIIPQKAIVGEIGHGCNEGEKILSAGESSHRYEVSGQNFKQKSGLTEHQKIHNINKTYECKECEKTFNRSSNLIIHQRIHTGNKPYVCNECGKDSNQSSNLIIHQRIHTGKKPYICHECGKDFNQSSNLVRHKQIHSGGNPYECKECGKAFKGSSNLVLHQRIHSRGKPYLCNKCGKAFSQSTDLIIHHRIHTGEKPYECYDCGQMFSQSSHLVPHQRIHTGEKPLKCNECEKAFRQHSHLTEHQRLHSGEKPYECHRCGKTFSGRTAFLKHQRLHAGEKIEECEKTFSKDEELREEQRIHQEEKAYWCNQCGRNFQGTSDLIRHQVTHTGEKPYECKECGKTFNQSSDLLRHHRIHSGEKPCVCSKCGKSFRGSSDLIRHHRVHTGEKPYECSECGKAFSQRSHLVTHQKIHTGEKPYQCTECGKAFRRRSLLIQHRRIHSGEKPYECKECGKLFIWRTAFLKHQSLHTGEKLECEKTFSQDEELRGEQKIHQEAKAYWCNQCGRAFQGSSDLIRHQVTHTREKPYECKECGKTFNQSSDLLRHHRIHSGEKPYVCNKCGKSFRGSSDLIKHHRIHTGEKPYECSECGKAFSQRSHLATHQKIHTGEKPYQCSECGNAFRRRSLLIQHRRLHSGEKPYECKECGKLFMWHTAFLKHQRLHAGEKLEECEKTFSKDEELRKEQRTHQEKKVYWCNQCSRTFQGSSDLIRHQVTHTREKPYECKECGKTQSELRPSETS

SEQ ID NO: 8149 - protein, 811 aa, Homo sapiens
MLLPTTIQPQTARKSQLPRGNSCLVGLHIASPQLLRVQPLVRTEPQSCFLSDLCQPPAQGFVQRPLPALQVVPAKRVPAPKAPDEQGSMLTPLSASDPLAVTSLSSSSAHPFISNLHTRHTEKLKKSLKVKTRSGRVSRPPKYKAKDYKFIKTEDLADGHLSDSDDYSELCVEEDEDQRERHALFDLSSCSLRPKSFKCQTCEKSYIGKGGLARHFKLNPGHGQLDPEMVLSEKASGSTLRGCTEERTLSLTSLGLSMPADPCEGGARSCLVTESARGGLQNGQSVDVEETLPSEPENGALLRSERYQGPRRRACSETLAESRTAVLQQRRAAQLPGGPAAAGEQRASPSKARLKEFLQQCDREDLVELALPQLAQVVTVYEFLLMKVEKDHLAKPFFPAIYKEFEELHKMVKKMCQDYLSSSGLCSQETLEINNDKVAESLGITEFLRKKEIHPDNLGPKHLSRDMDGEQLEGASSEKREREAAEEGLASVKRPRREALSNDTTESLAANSRGREKPRPLHALAAGFSPPVNVTVSPRSEESHTTTVSGGNGSVFQAGPQLQALANLEARRGSIGAALSSRDVSGLPVYAQSGEPRRLTQAQVAAFPGENALEHSSDQDTWDSLRSPGFCSPLSSGGGAESLPPGGPGHAEAGHLGKVCDFHLNHQQPSPTSVLPTEVAAPPLEKILSVDSVAVDCAYRTVPKPGPQPGPHGSLLTEGCLRSLSGDLNRFPCGMEVHSGQRELESVVAVGEAMAFEISNGSHELLSQGQKQIFIQTSDGLILSPPGTIVSQEEDIVTVTDAEGRACGWAR

SEQ ID NO: 8150 - protein, 813 aa, Homo sapiens
MLLPTTIQPQTARKSQLPRGNSCLVGLHIASPQLLRVQPLVRTEPQSCFLSDLCQPPAQGFVQRPLPALQVVPAKRVPAPKAPDEQGSMLTPLSASDPLAVTSLSSSSAHPFISNLHTRHTEKLKKSLKVKTRSGRVSRPPKYKAKDYKFIKTEDLADGHLSDSDDYSELCVEEDEDQRERHALFDLSSCSLRPKSFKCQTCEKSYIGKGGLARHFKLNPGHGQLDPEMVLSEKASGSTLRGCTEERTLSLTSLGLSMPADPCEGGARSCLVTESARGGLQNGQSVDVEETLPSEPENGALLRSERYQGPRRRACSETLAESRTAVLQQRRAAQLPGGPAAAGEQRASPSKARLKEFLQQCDREDLVELALPQLAQVVTVYEFLLMKVEKDHLAKPFFPAIYKEFEELHKMVKKMCQDYLSSSGLCSQETLEINNDKVAESLGITEFLRKKEIHPDNLGPKHLSRDMDGEQLEGASSEKREREAAEEGLASVKRPRREALSNDTTESLAANSRGREKPRPLHALAAGEGFSPPVNVTVSPRSEESHTTTVSGGNGSVFQAGPQLQALANLEARRGSIGAALSSRDVSGLPVYAQSGEPRRLTQAQVAAFPGENALEHSSDQDTWDSLRSPGFCSPLSSGGGAESLPPGGPGHAEAGHLGKVCDFHLNHQQPSPTSVLPTEVAAPPLEKILSVDSVAVDCAYRTVPKPGPQPGPHGSLLTEGCLRSLSGDLNRFPCGMEVHSGQRELESVVAVGEAMAFEISNGSHELLSQGQKQIFIQTSDGLILSPPGTIVSQEEDIVTVTDAEGRACGWAR

SEQ ID NO: 8151 - protein, 927 aa, Homo sapiens
MADAEPEAGGGSEDGGGGGGPAPPGQSGSVARVAPLGPEQLRQVLEQVTKAQPPPPPPPFVLRDAARRLRDAAQQAALQRGRGTEPPRLPRLLPPQQLEAICVKVTSGETKGQERPMLLPTTIQPQTARKSQLPRGNSCLVGLHIASPQLLRVQPLVRTEPQSCFLSDLCQPPAQGFVQRPLPALQVVPAKRVPAPKAPDEQGSMLTPLSASDPLAVTSLSSSSAHPFISNLHTRHTEKLKKSLKVKTRSGRVSRPPKYKAKDYKFIKTEDLADGHLSDSDDYSELCVEEDEDQRERHALFDLSSCSLRPKSFKCQTCEKSYIGKGGLARHFKLNPGHGQLDPEMVLSEKASGSTLRGCTEERTLSLTSLGLSMPADPCEGGARSCLVTESARGGLQNGQSVDVEETLPSEPENGALLRSERYQGPRRRACSETLAESRTAVLQQRRAAQLPGGPAAAGEQRASPSKARLKEFLQQCDREDLVELALPQLAQVVTVYEFLLMKVEKDHLAKPFFPAIYKEFEELHKMVKKMCQDYLSSSGLCSQETLEINNDKVAESLGITEFLRKKEIHPDNLGPKHLSRDMDGEQLEGASSEKREREAAEEGLASVKRPRREALSNDTTESLAANSRGREKPRPLHALAAGFSPPVNVTVSPRSEESHTTTVSGGNGSVFQAGPQLQALANLEARRGSIGAALSSRDVSGLPVYAQSGEPRRLTQAQVAAFPGENALEHSSDQDTWDSLRSPGFCSPLSSGGGAESLPPGGPGHAEAGHLGKVCDFHLNHQQPSPTSVLPTEVAAPPLEKILSVDSVAVDCAYRTVPKPGPQPGPHGSLLTEGCLRSLSGDLNRFPCGMEVHSGQRELESVVAVGEAMAFEISNGSHELLSQGQKQIFIQTSDGLILSPPGTIVSQEEDIVTVTDAEGRACGWAR

SEQ ID NO: 8152 - protein, 536 aa, Homo sapiens
MGPLQFRDVAIEFSLEEWHCLDTAQRNLYRNVMLENYRNLVFLGIVVSKPDLITCLEQGKKPLTMKKHEMVANPSVTCSHFARDLWPEQSIKDSFQKVTLRRYENYGHDNLQFKKGCESVDECKVHKRGYNGLNQYLTTTQSKIFQCDKYVKVIHKFSNSNRHKIRHTGKKPFKCIECGKAFNQSSTLTTHKKIHTGEKPFKCEECGKAFNWSSHLTTHKRIHTGEKRYKCEDCGKAFSRFSYLTAHKIIHSGEKPYKCEECGKAFKRSSNLTTHKIIHTGEKPYKCEECGKAFKRSSILTAHKIIHSGEKPYKCEECGKAFKHPSVLTTHKRIHTGEKPYKCEECGRAFKYFSSLTTHKIIHSGEKPYKCEECGKAFNWSSHLTTHKRIHTGEKPYKCEECGEAFKYSSSLTTHKIIHTGQQPFKCEECGKAFKCFSILTTHKRIHTGEKPYKCEECGKAFNSSSHLTAHKRIHTGEKPYKCERCGKAFKRSFILTRHKRIHTGEKPYKCEECGKGFKCPSTLTTHKVIHTGEKL

SEQ ID NO: 8153 - protein, 778 aa, Homo sapiens
MNLTEDCMVFEDVAIYFSQEEWGILNDAQRHLHSNVMLENFALLSSVGCWHGAKDEEVPSKQCVSVRVLQVTIPKPALSTLKAQPCKMCSSILKDILHLAEHDGTHPEQGLYTCAAEHDLHQKEQIREKLTRSDEWRPSFVNHSAHVGERNFTCTQGGKDFTASSDLLQQQVLNSGWKLYRDTQDGEAFQGEQNDFNSSQGGKDFCHQHGLFEHQKTHNGERPYEFSECGELFRYNSNLIKYQQNHAGERPYEGTEYGKTFIRKSNLVQHQKIHSEGFLSKRSDPIEHQEILSRPTPYECTQCGKAFLTQAHLVGHQKTHTGEQPYECNKCGKFFMYNSKLIRHQKVHTGERRYECSECGKLFMDSFTLGRHQRVHTGERPFECSICGKFFSHRSTLNMHQRVHAGKRLYKCSECGKAFSLKHNVVQHLKIHTGERPYECTECEKAFVRKSHLVQHQKIHTDAFSKRSDLIQHKRIDIRPRPYTCSECGKAFLTQAHLVGHQKIHTGERPYECTQCAKAFVRKSHLVQHEKIHTDAFSKRSDLIQHKRIDLRPRPYVCSECGKAFLTQAHLDGHQKIQTGERRYECNECGKFFLDSYKLVIHQRIHTGEKPYKCSKCGKFFRYRCTLSRHQKVHTGERPYECSECGKFFRDSYKLIIHQRVHTGEKPYECSNCGKFLRYRSTFIKHHKVCTGEKPHECSKCRELFRTKSSLIIHQQSHTGESPFKLRECGKDFNKCNTGQRQKTHTGERSYECGESSKVFKYNSSLIKHQIIHTGKRP

SEQ ID NO: 8154 - protein, 544 aa, Homo sapiens
MTFEDVAVYFSQEEWGLLDTAQRALYRHVMLENFTLVTSLGLSTSRPRVVIQLERGEEPWVPSGKDMTLARNTYGRLNSGSWSLTEDRDVSGEWPRAFPDTPPGMTTSVFPVADACHSVKSLQRQPGASPSQERKPTGVSVIYWERLLLGSRSDQASISLRLTSPLRPPKSSRPREKTFTEYRVPGRQPRTPERQKPCAQEVPGRAFGNASDLKAASGGRDRRMGAAWQEPHRLLGGQEPSTWDELGEALHAGEKSFECRACSKVFVKSSDLLKHLRTHTGERPYECTQCGKAFSQTSHLTQHQRIHSGETPYACPVCGKAFRHSSSLVRHQRIHTAEKSFRCSECGKAFSHGSNLSQHRKIHAGGRPYACAQCGRRFCRNSHLIQHERTHTGEKPFVCALCGAAFSQGSSLFLHQRVHTGEKPFACAQCGRSFSRSSNLTQHQLLHTGERPFRCVDCGKGFAKGAVLLSHRRIHTGEKPFVCTQCGRAFRERPALLHHQRIHTTEKTNAAAPDCTPGPGFLQGHHRKVRRGGKPSPVLKPAKV

SEQ ID NO: 8155 - protein, 534 aa, Homo sapiens
MGVPTAVSATPVRADASSKPQPLLQSQPHLFFFPKLLSRLLGSPLPVHSAGPGPLLTRMPQATTVSLRLGSWSLTEDRDVSGEWPRAFPDTPPGMTTSVFPVADACHSVKSLQRQPGASPSQERKPTGVSVIYWERLLLGSRSDQASISLRLTSPLRPPKSSRPREKTFTEYRVPGRQPRTPERQKPCAQEVPGRAFGNASDLKAASGGRDRRMGAAWQEPHRLLGGQEPSTWDELGEALHAGEKSFECRACSKVFVKSSDLLKHLRTHTGERPYECTQCGKAFSQTSHLTQHQRIHSGETPYACPVCGKAFRHSSSLVRHQRIHTAEKSFRCSECGKAFSHGSNLSQHRKIHAGGRPYACAQCGRRFCRNSHLIQHERTHTGEKPFVCALCGAAFSQGSSLFLHQRVHTGEKPFACAQCGRSFSRSSNLTQHQLLHTGERPFRCVDCGKGFAKGAVLLSHRRIHTGEKPFVCTQCGRAFRERPALLHHQRIHTTEKTNAAAPDCTPGPGFLQGHHRKVRRGGKPSPVLKPAKV

SEQ ID NO: 8156 - protein, 407 aa, Homo sapiens
MAAAALRFPVQGTVTFEDVAVKFTQEEWNLLSEAQRCLYRDVTLENLALMSSLGCWCGVEDEAAPSKQSIYIQRETQVRTPMAGVSPKKAHPCEMCGPILGDILHVADHQGTHHKQKLHRCEAWGNKLYDSGNFHQHQNEHIGEKPYRGSVEEALFAKRCKLHVSGESSVFSESGKDFLLRSGLLQQEATHTGKSNSKTECVSLFHGGKSHYSCGGCMKHFSTKDILSQHERLLPTEEPSVWCECGKSSSKYDSFSNHQGVHTREKPYTCGICGKLFNSKSHLLVHQRIHTGEKPYECEVCQKFFRHKYHLIAHQRVHTGERPYECSDCGKSFTHSSTFRVHKRVHTGQKPYECSECGKSFAESSSLTKHRRVHTGEKPYGCSECEKKFRQISSLRHHQRVHKRKGL

SEQ ID NO: 8157 - protein, 197 aa, Homo sapiens
MLVLPSPCPQPLAFSSVETMEGPPRRTCRSPEPGPSSSIGSPQASSPPRPNHYLLIDTQGVPYTVLVDEESQREPGASGAPGQKKCYSCPVCSRVFEYMSYLQRHSITHSEVKPFECDICGKAFKRASHLARHHSIHLAGGGRPHGCPLCPRRFRDAGELAQHSRVHSGERPFQCPHCPRRFMEQNTLQKHTRWKHP

SEQ ID NO: 8158 - protein, 585 aa, Homo sapiens
MIKTQESLTLEDVAVEFSWEEWQLLDTAQKNLYRDVMVENYNHLVSLGYQTSKPDVLSKLAHGQEPWTTDAKIQNKNCPGIGKVDSHLQEHSPNQRLLKSVQQCNGQNTLRNIVHLSKTHFPIVQNHDTFDLYRKNLKSSLSLINQKRRHGINNPVEFIGGEKTLLHGKHERTHTKTRFSENAKCIHTKFQVFKHQRTQKIEKPHACIECEQTFLRKSQLIYHENICIQENPGSGQCEKLSRSVLFTKHLKTNTTDKICIPNEYRKGSTVKSSLITHQQTHTEEKSYMCSECGKGFTMKRYLIAHQRTHSGEKPYVCKECGKGFTVKSNLIVHQRTHTGEKPYICSECGKGFTMKRYLVVHQRTHTGEKPYMCSECGKGFTVKSNLIVHQRSHTGEKSYICSECGKGFTVKRTLVIHQRTHTGEKSYICNECGKGFTTKRTLIIHQRTHTGEKPYECNECGKAFSQKICLIQHERCHTGKTPFVCTECGKSYSHKYGLITHQRIHTGEKPYECNECGKAFTTKSVLNVHQRTHTGERPYGCSDCEKAFSHLSNLVKHKKMHTREMGRISQVENSCNGESQLLPYK

SEQ ID NO: 8159 - protein, 198 aa, Homo sapiens
MIKTQESLTLEDVAVEFSWEEWQLLDTAQKNLYRDVMVENYNHLVSLGYQTSKPDVLSKLAHGQEPWTTDAKIQNKNCPGIGKVDSHLQEHSPNQRLLKSVQQCNGQNTLRNIVHLSKTHFPIVQNHDTFDLYRKNLKSSLSLINQKRRHGINNPVEFIGETGSLERPRQADHLRSEVQDQPGQRGETLCLLKIHTKN

SEQ ID NO: 8160 - protein, 1349 aa, Homo sapiens
MACYLVISSRHLSNGHYRGIKGVFRGPLCKNGSPSPDFAEKKSTAKALEDVKANFYCELCDKQYHKHQEFDNHINSYDHAHKQRLKELKQREFARNVASKSWKDEKKQEKALKRLHQLAELRQQSECVSGNGPAYKAPRVAIEKQLQQGIFPIKNGRKVSCMKSALLLKGKNLPRIISDKQRSTMPNRHQLQSDRRCLFGNQVLQTSSDLSNANHRTGVSFTFSKKVHLKLESSASVFSENTEETHDCNKSPIYKTKQTADKCKCCRFANKDTHLTKEKEVNISPSHLESVLHNTISINSKILQDKHDSIDETLEDSIGIHASFSKSNIHLSDVDFTPTSREKETRNTLKNTLENCVNHPCQANASFSPPNIYNHSDARISECLDEFSSLEPSEQKSTVHLNPNSRIENREKSLDKTERVSKNVQRLVKEACTHNVASKPLPFLHVQSKDGHTTLQWPTELLLFTKTEPCISYGCNPLYFDFKLSRNTKEDHNLEDLKTELGKKPLELKTKRESQVSGLTEDQQKLIQEDYQYPKPKTMIANPDWEKFQRKYNLDYSDSEPNKSEYTFSANDLEMKNPKVPLYLNTSLKDCAGKNNSSENKLKEASRAHWQGCRKAVLNDIDEDLSFPSYISRFKKHKLIPCSPHLEFEDERQFNCKSSPCTVGGHSDHGKDFSVILKSNHISMTSKVSGCGNQRYKRYSPQSCLSRYSSSLDTSPSSMSSLRSTCSSHRFNGNSRGNLLCFHKREHHSVERHKRKCLKHNCFYLSDDITKSSQMQSEPQKERNCKLWESFKNEKYSKRRYCHCRERQKLGKNQQQFSGLKSTRIIYCDSNSQISCTGSSKKPPNCQGTQHDRLDSYSIEKMYYLNKSKRNQESLGSPHICDLGKVRPMKCNSGNISCLLKNCSSGPSETTESNTAEGERTPLTAKILLERVQAKKCQEQSSNVEISSNSCKSELEAPSQVPCTIQLAPSGCNRQALPLSEKIQYASESRNDQDSAIPRTTEKDKSKSSHTNNFTILADTDCDNHLSKGIIHLVTESQSLNIKRDATTKEQSKPLISEIQPFIQSCDPVPNEFPGAFPSNKYTGVTDSTETQEDQINLDLQDVSMHINHVEGNINSYYDRTMQKPDKVEDGLEMCHKSISPPLIQQPITFSPDEIDKYKILQLQAQQHMQKQLLSKHLRVLPAAGPTAFSPASTVQTVPVHQHTSITTIHHTFLQHFAVSASLSSHSSHLPIAHLHPLSQAHFSPISFSTLTPTIIPAHPTFLAGHPLHLVAATPFHPSHITLQPLPPTAFIPTLFGPHLNPATTSIIHLNPLIQPVFQGQDFCHHSCSSQMQQLNEVKEALNVSTHLN

SEQ ID NO: 8161 - protein, 461 aa, Homo sapiens
MGTIHLFRKPQRSFFGKLLREFRLVAADRRSWKILLFGVINLICTGFLLMWCSSTNSIALTAYTYLTIFDLFSLMTCLISYWVTLRKPSPVYSFGFERLEVLAVFASTVLAQLGALFILKESAERFLEQPEIHTGRLLVGTFVALCFNLFTMLSIRNKPFAYVSEAASTSWLQEHVADLSRSLCGIIPGLSSIFLPRMNPFVLIDLAGAFALCITYMLIEINNYFAVDTASAIAIALMTFGTMYPMSVYSGKVLLQTTPPHVIGQLDKLIREVSTLDGVLEVRNEHFWTLGFGSLAGSVHVRIRRDANEQMVLAHVTNRLYTLVSTLTVQIFKDDWIRPALLSGPVAANVLNFSDHHVIPMPLLKGTDDLNPVTSTPAKPSSPPPEFSFNTPGKNVNPVILLNTQTRPYGFGLNHGHTPYSSMLNQGLGVPGIGATQGLRTGFTNIPSRYGTNNRIGQPRP

SEQ ID NO: 8162 - protein, 501 aa, Homo sapiens
MGTIHLFRKPQRSFFGKLLREFRLVAADRRSWKILLFGVINLICTGFLLMWCSSTNSIALTAYTYLTIFDLFRDGVSPFWLGWSQTPDLKWSTHLGLPKCWDNRRELPCLSNSLMTCLISYWVTLRKPSPVYSFGFERLEVLAVFASTVLAQLGALFILKESAERFLEQPEIHTGRLLVGTFVALCFNLFTMLSIRNKPFAYVSEAASTSWLQEHVADLSRSLCGIIPGLSSIFLPRMNPFVLIDLAGAFALCITYMLIEINNYFAVDTASAIAIALMTFGTMYPMSVYSGKVLLQTTPPHVIGQLDKLIREVSTLDGVLEVRNEHFWTLGFGSLAGSVHVRIRRDANEQMVLAHVTNRLYTLVSTLTVQIFKDDWIRPALLSGPVAANVLNFSDHHVIPMPLLKGTDDLNPVTSTPAKPSSPPPEFSFNTPGKNVNPVILLNTQTRPYGFGLNHGHTPYSSMLNQGLGVPGIGATQGLRTGFTNIPSRYGTNNRIGQPRP

SEQ ID NO: 8163 - protein, 432 aa, Homo sapiens
MSWKILLFGVINLICTGFLLMWCSSTNSIALTAYTYLTIFDLFSLMTCLISYWVTLRKPSPVYSFGFERLEVLAVFASTVLAQLGALFILKESAERFLEQPEIHTGRLLVGTFVALCFNLFTMLSIRNKPFAYVSEAASTSWLQEHVADLSRSLCGIIPGLSSIFLPRMNPFVLIDLAGAFALCITYMLIEINNYFAVDTASAIAIALMTFGTMYPMSVYSGKVLLQTTPPHVIGQLDKLIREVSTLDGVLEVRNEHFWTLGFGSLAGSVHVRIRRDANEQMVLAHVTNRLYTLVSTLTVQIFKDDWIRPALLSGPVAANVLNFSDHHVIPMPLLKGTDDLNPVTSTPAKPSSPPPEFSFNTPGKNVNPVILLNTQTRPYGFGLNHGHTPYSSMLNQGLGVPGIGATQGLRTGFTNIPSRYGTNNRIGQPRP

SEQ ID NO: 8164 - protein, 438 aa, Homo sapiens
MGTIHLFRKPQRSFFGKLLREFRLVAADRRSWKILLFGVINLICTGFLLMWCSSTNSIALTAYTYLTIFDLFSLMTCLISYWVTLRKPSPVYSFGFERLEVLAVFASTVLAQLGALFILKESAERFLEQPEIHTGRLLVGTFVALCFNLFTMLSIRNKPFAYVSEAASTSWLQEHVADLSRSLCGIIPGLSSIFLPRMNPFVLIDLAGAFALCITYMLIEINNYFAVDTASAIAIALMTFGTMYPMSVYSGKVLLQTTPPHVIGQLDKLIREAGSVHVRIRRDANEQMVLAHVTNRLYTLVSTLTVQIFKDDWIRPALLSGPVAANVLNFSDHHVIPMPLLKGTDDLNPVTSTPAKPSSPPPEFSFNTPGKNVNPVILLNTQTRPYGFGLNHGHTPYSSMLNQGLGVPGIGATQGLRTGFTNIPSRYGTNNRIGQPRP

SEQ ID NO: 8165 - protein, 575 aa, Homo sapiens
MDPEDEGVAGVMSVGPPAARLQEPVTFRDVAVDFTQEEWGQLDPTQRILYRDVMLETFGHLLSIGPELPKPEVISQLEQGTELWVAERGTTQGCHPAWEPRSESQASRKEEGLPEEEPSHVTGREGFPTDAPYPTTLGKDRECQSQSLALKEQNNLKQLEFGLKEAPVQDQGYKTLRLRENCVLSSSPNPFPEISRGEYLYTYDSQITDSEHNSSLVSQQTGSPGKQPGENSDCHRDSSQAIPITELTKSQVQDKPYKCTDCGKSFNHNAHLTVHKRIHTGERPYMCKECGKAFSQNSSLVQHERIHTGDKPYKCAECGKSFCHSTHLTVHRRIHTGEKPYECQDCGRAFNQNSSLGRHKRTHTGEKPYTCSVCGKSFSRTTCLFLHLRTHTEERPYECNHCGKGFRHSSSLAQHQRKHAGEKPFECRQRLIFEQTPALTKHEWTEALGCDPPLSQDERTHRSDRPFKCNQCGKCFIQSSHLIRHQITHTREEQPHGRSRRREQSSSRNSHLVQHQHPNSRKSSAGGAKAGQPESRALALFDIQKIMQEKNPVHVIGVEEPSVGASMLFDIREST

SEQ ID NO: 8166 - protein, 323 aa, Homo sapiens
MEAKEKQHLLDARPAIRSYTGSLWQEGAGWIPLPRPGLDLQAIELAAQSNHHCHAQKGPDSHCDPKKGKAQRQLYVASAICLLFMIGEVVEILGALVSVLSIWVVTGVLVYLAVERLISGDYEIDGGTMLITSGCAVAVNIIMGLTLHQSGHGHSHGTTNQQEENPSVRAAFIHVIGDFMQSMGVLVAAYILYFKPEYKYVDPICTFVFSILVLGTTLTILRDVILVLMEGTPKGVDFTAVRDLLLSVEGVEALHSLHIWALTVAQPVLSVHIAIAQNTDAQAVLKTASSRLQGKFHFHTVTIQIEDYSEDMKDCQACQGPSD

SEQ ID NO: 8167 - protein, 372 aa, Homo sapiens
MEAKEKQHLLDARPAIRSYTGSLWQEGAGWIPLPRPGLDLQAIELAAQSNHHCHAQKGPDSHCDPKKGKAQRQLYVASAICLLFMIGEVVGGYLAHSLAVMTDAAHLLTDFASMLISLFSLWMSSRPATKTMNFGWQRAEILGALVSVLSIWVVTGVLVYLAVERLISGDYEIDGGTMLITSGCAVAVNIIMGLTLHQSGHGHSHGTTNQQEENPSVRAAFIHVIGDFMQSMGVLVAAYILYFKPEYKYVDPICTFVFSILVLGTTLTILRDVILVLMEGTPKGVDFTAVRDLLLSVEGVEALHSLHIWALTVAQPVLSVHIAIAQNTDAQAVLKTASSRLQGKFHFHTVTIQIEDYSEDMKDCQACQGPSD

SEQ ID NO: 8168 - protein, 163 aa, Homo sapiens
MRVPPAGTWALRPIWTEMGTPLRGSQAPGRIVLLLLVITPQWRWIPSKTPNVAPRSNQRCNPGGYLSGGVSLCASHSQPAALPNLGRLQKKLLQTRCKGRRMCPKAGDQTGGAFCMCDVSGGGGECVSGSGGGGESGRKTGTTSAMKDPRVLKCKLRVTNDLH

SEQ ID NO: 8169 - protein, 424 aa, Homo sapiens
MDSGPLWDANPTPRGTLSAPNATTPWLGRDEELAKVEIGVLATVLVLATGGNLAVLLTLGQLGRKRSRMHLFVLHLALTDLAVALFQVLPQLLWDITYRFQGPDLLCRAVKYLQVLSMFASTYMLLAMTLDRYLAVCHPLRSLQQPGQSTYLLIAAPWLLAAIFSLPQVFIFSLREVIQGSGVLDCWADFGFPWGPRAYLTWTTLAIFVLPVTMLTACYSLICHEICKNLKVKTQAWRVGGGGWRTWDRPSPSTLAATTRGLPSRVSSINTISRAKIRTVKMTFVIVLAYIACWAPFFSVQMWSVWDKNAPDEDSTNVAFTISMLLGNLNSCCNPWIYMGFNSHLLPRPLRHLACCGGPQPRMRRRLSDGSLSSRHTTLLTRSSCPATLSLSLSLTLSGRPRPEESPRDLELADGEGTAETIIF

SEQ ID NO: 8170 - protein, 508 aa, Homo sapiens
MLWFQGAIPAAIATAKRSGAVFVVFVAGDDEQSTQMAASWEDDKVTEASSNSFVAIKIDTKSEACLQFSQIYPVVCVPSSFFIGDSGIPLEVIAGSVSADELVTRIHKVRQMHLLKSETSVANGSQSESSVSTPSASFEPNNTCENSQSRNAELCEIPPTSDTKSDTATGGESAGHATSSQEPSGCSDQRPAEDLNIRVERLTKKLEERREEKRKEEEQREIKKEIERRKTGKEMLDYKRKQEEELTKRMLEERNREKAEDRAARERIKQQIALDRAERAARFAKTKEEVEAAKAAALLAKQAEMEVKRESYARERSTVARIQFRLPDGSSFTNQFPSDAPLEEARQFAAQTVGNTYGNFSLATMFPRREFTKEDYKKKLLDLELAPSASVVLLPAGRPTASIVHSSSGDIWTLLGTVLYPFLAIWRLISNFLFSNPPPTQTSVRVTSSEPPNPASSSKSEKREPVRKRVLEKRGDDFKKEGKIYRLRTQDDGEDENNTWNGNSTQQM

SEQ ID NO: 8171 - protein, 1356 aa, Homo sapiens
MQSKVLLAVALWLCVETRAASVGLPSVSLDLPRLSIQKDILTIKANTTLQITCRGQRDLDWLWPNNQSGSEQRVEVTECSDGLFCKTLTIPKVIGNDTGAYKCFYRETDLASVIYVYVQDYRSPFIASVSDQHGVVYITENKNKTVVIPCLGSISNLNVSLCARYPEKRFVPDGNRISWDSKKGFTIPSYMISYAGMVFCEAKINDESYQSIMYIVVVVGYRIYDVVLSPSHGIELSVGEKLVLNCTARTELNVGIDFNWEYPSSKHQHKKLVNRDLKTQSGSEMKKFLSTLTIDGVTRSDQGLYTCAASSGLMTKKNSTFVRVHEKPFVAFGSGMESLVEATVGERVRIPAKYLGYPPPEIKWYKNGIPLESNHTIKAGHVLTIMEVSERDTGNYTVILTNPISKEKQSHVVSLVVYVPPQIGEKSLISPVDSYQYGTTQTLTCTVYAIPPPHHIHWYWQLEEECANEPSQAVSVTNPYPCEEWRSVEDFQGGNKIEVNKNQFALIEGKNKTVSTLVIQAANVSALYKCEAVNKVGRGERVISFHVTRGPEITLQPDMQPTEQESVSLWCTADRSTFENLTWYKLGPQPLPIHVGELPTPVCKNLDTLWKLNATMFSNSTNDILIMELKNASLQDQGDYVCLAQDRKTKKRHCVVRQLTVLERVAPTITGNLENQTTSIGESIEVSCTASGNPPPQIMWFKDNETLVEDSGIVLKDGNRNLTIRRVRKEDEGLYTCQACSVLGCAKVEAFFIIEGAQEKTNLEIIILVGTAVIAMFFWLLLVIILRTVKRANGGELKTGYLSIVMDPDELPLDEHCERLPYDASKWEFPRDRLKLGKPLGRGAFGQVIEADAFGIDKTATCRTVAVKMLKEGATHSEHRALMSELKILIHIGHHLNVVNLLGACTKPGGPLMVIVEFCKFGNLSTYLRSKRNEFVPYKTKGARFRQGKDYVGAIPVDLKRRLDSITSSQSSASSGFVEEKSLSDVEEEEAPEDLYKDFLTLEHLICYSFQVAKGMEFLASRKCIHRDLAARNILLSEKNVVKICDFGLARDIYKDPDYVRKGDARLPLKWMAPETIFDRVYTIQSDVWSFGVLLWEIFSLGASPYPGVKIDEEFCRRLKEGTRMRAPDYTTPEMYQTMLDCWHGEPSQRPTFSELVEHLGNLLQANAQQDGKDYIVLPISETLSMEEDSGLSLPTSPVSCMEEEEVCDPKFHYDNTAGISQYLQNSKRKSRPVSVKTFEDIPLEEPEVKVIPDDNQTDSGMVLASEELKTLEDRTKLSPSFGGMVPSKSRESVASEGSNQTSGYQSGYHSDDTDTTVYSSEEAELLKLIEIGVQTGSTAQILQPDSGTTLSSPPV

SEQ ID NO: 8172 - protein, 678 aa, Homo sapiens
MQSKVLLAVALWLCVETRAASVGLPSVSLDLPRLSIQKDILTIKANTTLQITCRGQRDLDWLWPNNQSGSEQRVEVTECSDGLFCKTLTIPKVIGNDTGAYKCFYRETDLASVIYVYVQDYRSPFIASVSDQHGVVYITENKNKTVVIPCLGSISNLNVSLCARYPEKRFVPDGNRISWDSKKGFTIPSYMISYAGMVFCEAKINDESYQSIMYIVVVVGYRIYDVVLSPSHGIELSVGEKLVLNCTARTELNVGIDFNWEYPSSKHQHKKLVNRDLKTQSGSEMKKFLSTLTIDGVTRSDQGLYTCAASSGLMTKKNSTFVRVHEKPFVAFGSGMESLVEATVGERVRIPAKYLGYPPPEIKWYKNGIPLESNHTIKAGHVLTIMEVSERDTGNYTVILTNPISKEKQSHVVSLVVYVPPQIGEKSLISPVDSYQYGTTQTLTCTVYAIPPPHHIHWYWQLEEECANEPSQAVSVTNPYPCEEWRSVEDFQGGNKIEVNKNQFALIEGKNKTVSTLVIQAANVSALYKCEAVNKVGRGERVISFHVTRGPEITLQPDMQPTEQESVSLWCTADRSTFENLTWYKLGPQPLPIHVGELPTPVCKNLDTLWKLNATMFSNSTNDILIMELKNASLQDQGDYVCLAQDRKTKKRHCVVRQLTVLGRETILDHCAEAVGMP

SEQ ID NO: 8173 - protein, 712 aa, Homo sapiens
MQSKVLLAVALWLCVETRAASVGLPSVSLDLPRLSIQKDILTIKANTTLQITCRGQRDLDWLWPNNQSGSEQRVEVTECSDGLFCKTLTIPKVIGNDTGAYKCFYRETDLASVIYVYVQDYRSPFIASVSDQHGVVYITENKNKTVVIPCLGSISNLNVSLCARYPEKRFVPDGNRISWDSKKGFTIPSYMISYAGMVFCEAKINDESYQSIMYIVVVVGYRIYDVVLSPSHGIELSVGEKLVLNCTARTELNVGIDFNWEYPSSKHQHKKLVNRDLKTQSGSEMKKFLSTLTIDGVTRSDQGLYTCAASSGLMTKKNSTFVRVHEKPFVAFGSGMESLVEATVGERVRIPAKYLGYPPPEIKWYKNGIPLESNHTIKAGHVLTIMEVSERDTGNYTVILTNPISKEKQSHVVSLVVYVPPQIGEKSLISPVDSYQYGTTQTLTCTVYAIPPPHHIHWYWQLEEECANEPSQAVSVTNPYPCEEWRSVEDFQGGNKIEVNKNQFALIEGKNKTVSTLVIQAANVSALYKCEAVNKVGRGERVISFHVTRGPEITLQPDMQPTEQESVSLWCTADRSTFENLTWYKLGPQPLPIHVGELPTPVCKNLDTLWKLNATMFSNSTNDILIMELKNASLQDQGDYVCLAQDRKTKKRHCVVRQLTVLERVAPTITGNLENQTTSIGESIEVSCTASGNPPPQIMWFKDNETLVEDSE

SEQ ID NO: 8174 - protein, 174 aa, Homo sapiens
MGLLSQRKWTLSGSQQTGCVALTVPSFPWVASRMHYGRKQVSWIIFLKIGAGCQVHVGHDCSTLRRQQGAPWSFASSFRPAASPLAPPSPGVSGLFPPHERWSGGSQTRCGKCVKMQILGSTLKLFRHPPSQVTRLWGRHHLKTPAPFLQSPGIQLNPGKVPASLLRLATWKPL

SEQ ID NO: 8175 - protein, 109 aa, Homo sapiens
MGLLSQRKWTLSGSQQTGCVALTVPSFPWVASRMHYGRKQVSWIIFLKIGAGCQVHVGHDCSTLRRQQGAPWSFASSFRPAASPLAPPSPGVSAAALWLCLFCALRVLG

SEQ ID NO: 8176 - protein, 181 aa, Homo sapiens
MIFMQILEPQEVPSFLMICQRRSPAMHRTCTDHAPLAIAQVWLWVSLAKAGSNRRGPGRAEGTFFSLLAALHAAQHFPNLPTAPGGASQSNIVSPELTPKPTTALKHAECLLDLNSHSLYRKPRPKAAVYLNLSLPLKSVHRLSLKKSFGFGKRDFENNSVFIVDSGGTCAGLLPGYIGWC

SEQ ID NO: 8177 - protein, 903 aa, Homo sapiens
MLREEAAQKRKGKESGMALPQGRLTFRDVAIEFSLAEWKFLNPAQRALYREVMLENYRNLEAVDISSKHMMKEVLSTGQGNREVIHTGTLQRHQSYHIGDFCFQEIEKEIHNIEFQCQEDERNGHEAPTTKIKKLTGSTDQHDHRHAGNKPIKDQLGSSFYSHLPELHIFQIKGEIANQLEKSTSDASSVSTSQRISCRPQIHISNNYGNNPLNSSLLPQKQEVHMREKSFPCNESGKAFNCSSLLRKHQIPHLGDKQYKCDVCGKLFNHKQYLACHRRCHTGEKPYKCKECGKSFSYKSSLTCHHRLHTGVKPYKCNECGKVFRQNSALVIHKAIHTGEKPYKCNECGKAFNQQSHLSRHQRLHTGVKPYKCKICEKAFACHSYLANHTRIHSGEKTYKCNECGKAFNHQSSLARHHILHTGEKPYKCEECDKVFSQKSTLERHKRIHTGEKPYKCKVCDTAFTCNSQLARHRRIHTGEKTYKCNECRKTFSRRSSLLCHRRLHSGEKPYKCNQCGNTFRHRASLVYHRRLHTLEKSYKCTVCNKVFMRNSVLAVHTRIHTAKKPYKCNECGKAFNQQSHLSRHRRLHTGEKPYKCEACDKVFGQKSALESHKRIHTGEKPYRCQVCDTAFTWNSQLARHTRIHTGEKTYKCNECGKTFSYKSSLVWHRRLHGGEKSYKCKVCDKAFVCRSYVAKHTRIHSGMKPYKCNECSKTFSNRSSLVCHRRIHSGEKPYKCSECSKTFSQKATLLCHRRLHSGEKPYKCNDCGNTFRHWSSLVYHRRLHTGEKSYKCTVCDKAFVRNSYLARHIRIHTAEKPYKCNECGKAFNEQSHLSRHHRIHTGEKPYKCEACDKVFSRKSHLKRHRIIHTGEKPYKCNECGKAFSDRSTLIHHQAIHGIGKFD

SEQ ID NO: 8178 - protein, 834 aa, Homo sapiens
MMKEVLSTGQGNREVIHTGTLQRHQSYHIGDFCFQEIEKEIHNIEFQCQEDERNGHEAPTTKIKKLTGSTDQHDHRHAGNKPIKDQLGSSFYSHLPELHIFQIKGEIANQLEKSTSDASSVSTSQRISCRPQIHISNNYGNNPLNSSLLPQKQEVHMREKSFPCNESGKAFNCSSLLRKHQIPHLGDKQYKCDVCGKLFNHKQYLACHRRCHTGEKPYKCKECGKSFSYKSSLTCHHRLHTGVKPYKCNECGKVFRQNSALVIHKAIHTGEKPYKCNECGKAFNQQSHLSRHQRLHTGVKPYKCKICEKAFACHSYLANHTRIHSGEKTYKCNECGKAFNHQSSLARHHILHTGEKPYKCEECDKVFSQKSTLERHKRIHTGEKPYKCKVCDTAFTCNSQLARHRRIHTGEKTYKCNECRKTFSRRSSLLCHRRLHSGEKPYKCNQCGNTFRHRASLVYHRRLHTLEKSYKCTVCNKVFMRNSVLAVHTRIHTAKKPYKCNECGKAFNQQSHLSRHRRLHTGEKPYKCEACDKVFGQKSALESHKRIHTGEKPYRCQVCDTAFTWNSQLARHTRIHTGEKTYKCNECGKTFSYKSSLVWHRRLHGGEKSYKCKVCDKAFVCRSYVAKHTRIHSGMKPYKCNECSKTFSNRSSLVCHRRIHSGEKPYKCSECSKTFSQKATLLCHRRLHSGEKPYKCNDCGNTFRHWSSLVYHRRLHTGEKSYKCTVCDKAFVRNSYLARHIRIHTAEKPYKCNECGKAFNEQSHLSRHHRIHTGEKPYKCEACDKVFSRKSHLKRHRIIHTGEKPYKCNECGKAFSDRSTLIHHQAIHGIGKFD

SEQ ID NO: 8179 - protein, 474 aa, Homo sapiens
MELLTFRDVAIEFSPEEWKCLDPDQQNLYRDVMLENYRNLVSLGVAISNPDLVTCLEQRKEPYNVKIHKIVARPPAMCSHFTQDHWPVQGIEDSFHKLILRRYEKCGHDNLQLRKGCKSLNECKLQKGGYNEFNECLSTTQSKILQCKASVKVVSKFSNSNKRKTRHTGEKHFKECGKSFQKFSHLTQHKVIHAGEKPYTCEECGKAFKWSLIFNEHKRIHTGEKPFTCEECGSIFTTSSHFAKHKIIHTGEKPYKCEECGKAFNRFTTLTKHKRIHAGEKPITCEECRKIFTSSSNFAKHKRIHTGEKPYKCEECGKAFNRSTTLTKHKRIHTGEKPYTCEECGKAFRQSSKLNEHKKVHTGERPYKCDECGKAFGRSRVLNEHKKIHTGEKPYKCEECGKAFRRSTDRSQHKKIHSADKPYKCKECDKAFKQFSLLSQHKKIHTVDKPYKCKDCDKAFKRFSHLNKHKKIHT

SEQ ID NO: 8180 - protein, 124 aa, Homo sapiens
MYVSISFLLGLSHLVLCCLLTFIVNFYLPPESIDFEFMAHNWSKGRSPSSTLGLSWFKAGFRFSDGWSMFYSFGLPGVALPGSPPRSHLLPGTQILIRSFQPCESAKHSARLSSLLTTTSYSVS

SEQ ID NO: 8181 - protein, 522 aa, Homo sapiens
METDLAEMPEKGVLSSQDSPHFQEKSTEEGEVAALRLTARSQAAAAAAAPGSRSLRGVHVPPPLHPAPAREEIKSTCSLKACFSLSLTLTYYRTAFLLSTENEGNLHFQCPSDVETRPQSKDSTSVQDFSKAESCKVAIIDRLTRNSVYDSNLEAALECENWLEKQQGNQERHLREMFTHMNSLSEETDHEHDVYWKSFNQKSVLITEDRVPKGSYAFHTLEKSLKQKSNLMKKQRTYKEKKPHKCNDCGELFTCHSVHIQHQRVHTGEKPYTCNECGKSFSHRANLTKHQRTHTRILFECRECKKTFTESSSLATHQRIHVGERPYECNECGKGFNRSTHLVQHQLIHTGVRPYECNECDKAFIHSSALIKHQRTHTGEKPYKCQECGKAFSHCSSLTKHQRVHTGEKPYECSECGKTFSQSTHLVQHQRIHTGEKPYECSECGKTFSQSSNFAKHQRIHIGKKPYKCSECGKAFIHSSALIQHQRTHTGEKPFRCNECGKSFKCSSSLIRHQRVHTEEQP

SEQ ID NO: 8182 - protein, 407 aa, Homo sapiens
MNKSQGSVSFTDVTVDFTQEEWEQLDPSQRILYMDVMLENYSNLLSVEVWKADDQMERDHRNPDEQARQFLILKNQTPIEERGDLFGKALNLNTDFVSLRQVPYKYDLYEKTLKYNSDLLNSNRSYAGKQTDECNEFGKALLYLKQEKTHSGVEYSEYNKSGKALSHKAAIFKHQKIKNLVQPFICTYCDKAFSFKSLLISHKRIHTGEKPYECNVCKKTFSHKANLIKHQRIHTGEKPFECPECGKAFTHQSNLIVHQRAHMEKKPYECSECGKTFAQKFELTTHQRIHTGERPYECNECAKTFFKKSNLIIHQKIHTGEKRYECSECGKSFIQNSQLIIHMRTHTGEKPYECTECGKTFSQRSTLRLHLRIHTGEKPYECSECGKAFSRKSRLSVHQRVHIGEKP

SEQ ID NO: 8183 - protein, 352 aa, Homo sapiens
MERDHRNPDEQARQFLILKNQTPIEERGDLFGKALNLNTDFVSLRQVPYKYDLYEKTLKYNSDLLNSNRSYAGKQTDECNEFGKALLYLKQEKTHSGVEYSEYNKSGKALSHKAAIFKHQKIKNLVQPFICTYCDKAFSFKSLLISHKRIHTGEKPYECNVCKKTFSHKANLIKHQRIHTGEKPFECPECGKAFTHQSNLIVHQRAHMEKKPYECSECGKTFAQKFELTTHQRIHTGERPYECNECAKTFFKKSNLIIHQKIHTGEKRYECSECGKSFIQNSQLIIHMRTHTGEKPYECTECGKTFSQRSTLRLHLRIHTGEKPYECSECGKAFSRKSRLSVHQRVHIGEKP

SEQ ID NO: 8184 - protein, 207 aa, Homo sapiens
MNVARFLVEKHTLHVIIDFILSKVSNQQSNLAQHQRVYTGEKPYKCNEWGKALSGKSSLFYHQAIHGVGKLCKCNDCHKVFSNATTIANHWRIHNEDRSYKCNKCGKIFRHRSYLAVYQRTHTGEKPYKYHDCGKVFSQASSYAKHRRIHTGEKPHKCDDCGKVLTSRSHLIRHQRIHTGQKSYKCLKCGKVFSLWALHAEHQKIHF

SEQ ID NO: 8185 - protein, 697 aa, Homo sapiens
MNKSLGPVSFKDVAVDFTQEEWQQLDPEQKITYRDVMLENYSNLVSVGYHIIKPDVISKLEQGEEPWIVEGEFLLQSYPDEVWQTDDLIERIQEEENKPSRQTVFIETLIEERGNVPGKTFDVETNPVPSRKIAYKNSLCDSCEKCLTSVSEYISSDGSYARMKADECSGCGKSLLHIKLEKTHPGDQAYEFNQNGEPYTLNEESLYQKIRILEKPFEYIECQKAFQKDTVFVNHMEEKPYKWNGSEIAFLQMSDLTVHQTSHMEMKPYECSECGKSFCKKSKFIIHQRTHTGEKPYECNQCGKSFCQKGTLTVHQRTHTGEKPYECNECGKNFYQKLHLIQHQRTHSGEKPYECSYCGKSFCQKTHLTQHQRTHSGERPYVCHDCGKTFSQKSALNDHQKIHTGVKLYKCSECGKCFCRKSTLTTHLRTHTGEKPYECNECGKFFSRLSYLTVHYRTHSGEKPYECNECGKTFYLNSALMRHQRVHTGEKPYECNECGKLFSQLSYLTIHHRTHSGVKPYECSECGKTFYQNSALCRHRRIHKGEKPYECYICGKFFSQMSYLTIHHRIHSGEKPYECSECGKTFCQNSALNRHQRTHTGEKAYECYECGKCFSQMSYLTIHHRIHSGEKPFECNECGKAFSRMSYLTVHYRTHSGEKPYECTECGKKFYHKSAFNSHQRIHRRGNMNVIDVGRLL

SEQ ID NO: 8186 - protein, 501 aa, Homo sapiens
MNKSLGPVSFKDVAVDFTQEEWQQLDPEQKITYRDVMLENYSNLVSVGYHIIKPDVISKLEQGEEPWIVEGEFLLQSYPDEVWQTDDLIERIQEEENKPSRQTVFIETLIEERGNVPGKTFDVETNPVPSRKIAYKNSLCDSCEKCLTSVSEYISSDGSYARMKADECSGCGKSLLHIKLEKTHPGDQAYEFNQNGEPYTLNEESLYQKIRILEKPFEYIECQKAFQKDTVFVNHMEEKPYKWNGSEIAFLQMSDLTVHQTSHMEMKPYECSECGKSFCKKSKFIIHQRTHTGEKPYECNQCGKSFCQKGTLTVHQRTHTGEKPYECNECGKNFYQKLHLIQHQRTHSGEKPYECSYCGKSFCQKTHLTQHQRTHSGERPYVCHDCGKTFSQKSALNDHQKIHTGVKLYKCSECGKCFCRKSTLTTHLRTHTGEKPYECNECGKFFSRLSYLTVHYRTHSGEKPYECTECGKKFYHKSAFNSHQRIHRRGNMNVIDVGRLL

SEQ ID NO: 8187 - protein, 462 aa, Homo sapiens
MEEKPYKWNGSEIAFLQMSDLTVHQTSHMEMKPYECSECGKSFCKKSKFIIHQRTHTGEKPYECNQCGKSFCQKGTLTVHQRTHTGEKPYECNECGKNFYQKLHLIQHQRTHSGEKPYECSYCGKSFCQKTHLTQHQRTHSGERPYVCHDCGKTFSQKSALNDHQKIHTGVKLYKCSECGKCFCRKSTLTTHLRTHTGEKPYECNECGKFFSRLSYLTVHYRTHSGEKPYECNECGKTFYLNSALMRHQRVHTGEKPYECNECGKLFSQLSYLTIHHRTHSGVKPYECSECGKTFYQNSALCRHRRIHKGEKPYECYICGKFFSQMSYLTIHHRIHSGEKPYECSECGKTFCQNSALNRHQRTHTGEKAYECYECGKCFSQMSYLTIHHRIHSGEKPFECNECGKAFSRMSYLTVHYRTHSGEKPYECTECGKKFYHKSAFNSHQRIHRRGNMNVIDVGRLL

SEQ ID NO: 8188 - protein, 623 aa, Homo sapiens
MLENYSNLVSVGYHIIKPDVISKLEQGEEPWIVEGEFLLQSYPDEVWQTDDLIERIQEEENKPSRQTVFIETLIEEREYISSDGSYARMKADECSGCGKSLLHIKLEKTHPGDQAYEFNQNGEPYTLNEESLYQKIRILEKPFEYIECQKAFQKDTVFVNHMEEKPYKWNGSEIAFLQMSDLTVHQTSHMEMKPYECSECGKSFCKKSKFIIHQRTHTGEKPYECNQCGKSFCQKGTLTVHQRTHTGEKPYECNECGKNFYQKLHLIQHQRTHSGEKPYECSYCGKSFCQKTHLTQHQRTHSGERPYVCHDCGKTFSQKSALNDHQKIHTGVKLYKCSECGKCFCRKSTLTTHLRTHTGEKPYECNECGKFFSRLSYLTVHYRTHSGEKPYECNECGKTFYLNSALMRHQRVHTGEKPYECNECGKLFSQLSYLTIHHRTHSGVKPYECSECGKTFYQNSALCRHRRIHKGEKPYECYICGKFFSQMSYLTIHHRIHSGEKPYECSECGKTFCQNSALNRHQRTHTGEKAYECYECGKCFSQMSYLTIHHRIHSGEKPFECNECGKAFSRMSYLTVHYRTHSGEKPYECTECGKKFYHKSAFNSHQRIHRRGNMNVIDVGRLL

SEQ ID NO: 8189 - protein, 659 aa, Homo sapiens
MNKSLGPVSFKDVAVDFTQEEWQQLDPEQKITYRDVMLENYSNLVSVGYHIIKPDVISKLEQGEEPWIVEGEFLLQSYPDEVWQTDDLIERIQEEENKPSRQTVFIETLIEEREYISSDGSYARMKADECSGCGKSLLHIKLEKTHPGDQAYEFNQNGEPYTLNEESLYQKIRILEKPFEYIECQKAFQKDTVFVNHMEEKPYKWNGSEIAFLQMSDLTVHQTSHMEMKPYECSECGKSFCKKSKFIIHQRTHTGEKPYECNQCGKSFCQKGTLTVHQRTHTGEKPYECNECGKNFYQKLHLIQHQRTHSGEKPYECSYCGKSFCQKTHLTQHQRTHSGERPYVCHDCGKTFSQKSALNDHQKIHTGVKLYKCSECGKCFCRKSTLTTHLRTHTGEKPYECNECGKFFSRLSYLTVHYRTHSGEKPYECNECGKTFYLNSALMRHQRVHTGEKPYECNECGKLFSQLSYLTIHHRTHSGVKPYECSECGKTFYQNSALCRHRRIHKGEKPYECYICGKFFSQMSYLTIHHRIHSGEKPYECSECGKTFCQNSALNRHQRTHTGEKAYECYECGKCFSQMSYLTIHHRIHSGEKPFECNECGKAFSRMSYLTVHYRTHSGEKPYECTECGKKFYHKSAFNSHQRIHRRGNMNVIDVGRLL

SEQ ID NO: 8190 - protein, 671 aa, Homo sapiens
MASVALEDVAVNFTREEWALLGPCQKNLYKDVMQETIRNLDCVVMKWKDQNIEDQYRYPRKNLRCRMLERFVESKDGTQCGETSSQIQDSIVTKNTLPGVGPCESSMRGEKVMGHSSLNCYIRVGAGHKPHEYHECGEKPDTHKQRGKAFSYHNSFQTHERLHTGKKPYDCKECGKSFSSLGNLQRHMAVQRGDGPYKCKLCGKAFFWPSLLHMHERTHTGEKPYECKQCSKAFSFYSSYLRHERTHTGEKPYECKQCSKAFPFYSSYLRHERTHTGEKPYKCKQCSKAFPDSSSCLIHERTHTGEKPYTCKQCGKAFSVSGSLQRHETTHSAEKPYACQQCGKAFHHLGSFQRHMIRHTGNGPHKCKICGKGFDCPSSLQSHERTHTGEKPYECKQCGKALSHRSSFRSHMIMHTGDGPHKCKVCGKAFVYPSVFQRHERTHTAEKPYKCKQCGKAYRISSSLRRHETTHTGEKPYKCKLGKACIDFCSFQNHKTTHTGEKPYECKECGKAFSRFRYLSRHKRTHTGEKPYECKTCRKAFGHYDNLKVHERIHSGEKPYECKECGKAFSWLTCFLRHERIHMREKSYECPQCGKAFTHSRFLQGHEKTHTGENPYECKECGKAFASLSSLHRHKKTHWKKTHTGENPYECKECGKAFASLSSLHRHKKTH

SEQ ID NO: 8191 - protein, 534 aa, Homo sapiens
MLQQLLITLPTEASTWVKLRHPKAATERVALWEDVTKMFKAEALLSQDADETQGESLESRVTLGSLTAESQELLTFKDVSVDFTQEEWGQLAPAHRNLYREVMLENYGNLVSVGCQLSKPGVISQLEKGEEPWLMERDISGVPSSDLKSKTKTKESALQNDISWEELHCGLMMERFTKGSSMYSTLGRISKCNKLESQQENQRMGKGQIPLMCKKTFTQERGQESNRFEKRINVKSEVMPGPIGLPRKRDRKYDTPGKRSRYNIDLVNHSRSYTKMKTFECNICEKIFKQLIHLTEHMRIHTGEKPFRCKECGKAFSQSSSLIPHQRIHTGEKPYECKECGKTFRHPSSLTQHVRIHTGEKPYECRVCEKAFSQSIGLIQHLRTHVREKPFTCKDCGKAFFQIRHLRQHEIIHTGVKPYICNVCSKTFSHSTYLTQHQRTHTGERPYKCKECGKAFSQRIHLSIHQRVHTGVKPYECSHCGKAFRHDSSFAKHQRIHTGEKPYDCNECGKAFSCSSSLIRHCKTHLRNTFSNVV

SEQ ID NO: 8192 - protein, 432 aa, Homo sapiens
MLENYGNLVSVGCQLSKPGVISQLEKGEEPWLMERDISGVPSSDLKSKTKTKESALQNDISWEELHCGLMMERFTKGSSMYSTLGRISKCNKLESQQENQRMGKGQIPLMCKKTFTQERGQESNRFEKRINVKSEVMPGPIGLPRKRDRKYDTPGKRSRYNIDLVNHSRSYTKMKTFECNICEKIFKQLIHLTEHMRIHTGEKPFRCKECGKAFSQSSSLIPHQRIHTGEKPYECKECGKTFRHPSSLTQHVRIHTGEKPYECRVCEKAFSQSIGLIQHLRTHVREKPFTCKDCGKAFFQIRHLRQHEIIHTGVKPYICNVCSKTFSHSTYLTQHQRTHTGERPYKCKECGKAFSQRIHLSIHQRVHTGVKPYECSHCGKAFRHDSSFAKHQRIHTGEKPYDCNECGKAFSCSSSLIRHCKTHLRNTFSNVV

SEQ ID NO: 8193 - protein, 422 aa, Homo sapiens
MAETKDAAQMLVTFKDVAVTFTREEWRQLDLAQRTLYREVMLETCGLLVSLGHRVPKPELVHLLEHGQELWIVKRGLSHATCAGDRAQVHTREPTTYPPVLSERAFLRGSLTLESSTSSDSRLGRARDEEGLLEMQKGKVTPETDLHKETHLGKVSLEGEGLGTDDGLHSRALQEWLSADVLHECDSQQPGKDALIHAGTNPYKCKQCGKGFNRKWYLVRHQRVHTGMKPYECNACGKAFSQSSTLIRHYLIHTGEKPYKCLECGKAFKRRSYLMQHHPIHTGEKPYECSQCRKAFTHRSTFIRHNRTHTGEKPFECKECEKAFSNRAHLIQHYIIHTGEKPYDCMACGKAFRCSSELIQHQRIHTGEKPYECTQCGKAFHRSTYLIQHSVIHTGEMPYKCIECGKAFKRRSHLLQHQRVHT

SEQ ID NO: 8194 - protein, 390 aa, Homo sapiens
MAETKDAAQMLVTFKDVAVTFTREEWRQLDLAQRTLYREVMLETCGLLVSLGDRAQVHTREPTTYPPVLSERAFLRGSLTLESSTSSDSRLGRARDEEGLLEMQKGKVTPETDLHKETHLGKVSLEGEGLGTDDGLHSRALQEWLSADVLHECDSQQPGKDALIHAGTNPYKCKQCGKGFNRKWYLVRHQRVHTGMKPYECNACGKAFSQSSTLIRHYLIHTGEKPYKCLECGKAFKRRSYLMQHHPIHTGEKPYECSQCRKAFTHRSTFIRHNRTHTGEKPFECKECEKAFSNRAHLIQHYIIHTGEKPYDCMACGKAFRCSSELIQHQRIHTGEKPYECTQCGKAFHRSTYLIQHSVIHTGEMPYKCIECGKAFKRRSHLLQHQRVHT

SEQ ID NO: 8195 - protein, 310 aa, Homo sapiens
MKGQQKTAETEEGTVQIQEGAVATGEDPTSVAIASIQSAATFPDPNVKYVFRTENGGQVMYRVIQVSEGQLDGQTEGTGAISGYPATQSMTQAVIQGAFTSDDAVDTEGTAAETHYTYFPSTAVGDGAGGTTSGSTAAVVTTQGSEALLGQATPPGTGQFFVMMSPQEVLQGGSQRSIAPRTHPYSPKSEAPRTTRDEKRRAQHNEVERRRRDKINNWIVQLSKIIPDCSMESTKSGQSKGGILSKACDYIQELRQSNHRLSEELQGLDQLQLDNDVLRQQVEDLKNKNLLLRAQLRHHGLEVVIKNDSN

SEQ ID NO: 8196 - protein, 251 aa, Homo sapiens
MYRVIQVSEGQLDGQTEGTGAISGYPATQSMTQAVIQGAFTSDDAVDTEGTAAETHYTYFPSTAVGDGAGGTTSGSTAAVVTTQGSEALLGQATPPGTGQFFVMMSPQEVLQGGSQRSIAPRTHPYSPKSEAPRTTRDEKRRAQHNEVERRRRDKINNWIVQLSKIIPDCSMESTKSGQSKGGILSKACDYIQELRQSNHRLSEELQGLDQLQLDNDVLRQQVEDLKNKNLLLRAQLRHHGLEVVIKNDSN

SEQ ID NO: 8197 - protein, 470 aa, Homo sapiens
MMAAMATARVRMGPRCAQALWRMPWLPVFLSLAAAAAAAAAEQQVPLVLWSSDRDLWAPAADTHEGHITSDLQLSTYLDPALELGPRNVLLFLQDKLSIEDFTAYGGVFGNKQDSAFSNLENALDLAPSSLVLPAVDWYAVSTLTTYLQEKLGASPLHVDLATLRELKLNASLPALLLIRLPYTASSGLMAPREVLTGNDEVIGQVLSTLKSEDVPYTAALTAVRPSRVARDVAVVAGGLGRQLLQKQPVSPVIHPPVSYNDTAPRILFWAQNFSVAYKDQWEDLTPLTFGVQELNLTGSFWNDSFARLSLTYERLFGTTVTFKFILANRLYPVSARHWFTMERLEVHSNGSVAYFNASQVTGPSIYSFHCEYVSSLSKKGSLLVARTQPSPWQMMLQDFQIQAFNVMGEQFSYASDCASFFSPGIWMGLLTSLFMLFIFTYGLHMILSLKTMDRFDDHKGPTISLTQIV

SEQ ID NO: 8198 - protein, 3184 aa, Homo sapiens
MEAEDLSKAEDRNEDPGSKNEGQLAAVQPDVPHGGQSSSPTALWDMLERKFLEYQQLTHKSPIERQKSLLSLLPLFLKAWEHSVGIICFPSLQRLAEDVSDQLAQQLQKALVGKPAEQARLAAGQLLWWKGDVDQDGYLLLKSVYVLTGTDSETLGRVAESGLPALLLQCLYLFFVFPLDKDELLESDLQVQKMFVQMLLNICSDSQGLEGLLSGSELQSLLIATTCLREHSCCFWKEPTFCVLRAISKAQNLSIIQYLQATDCVRLSLQNLSRLTDTLPAPEVSEAVSLILGFVKDSYPVSSALFLEFENSEGYPLLLKVLLRYDGLTQSEVDPHLEELLGLVVWLTTCGRSELKVFDSITYPQLEGFKFHHEASGVTVKNLQAFQVLQNVFHKASDSVLCIQVLSVIRTMWAWNARNFFLLEWTLQPISQFVEIMPLKPAPVQEHFFQLLEALVFELHYVPHEILRKVQHLIKESPGPSCTLMALQSILSIAGGDPLFTDIFRDSGLLGLLLAQLRKQAKIMRKSGNKVSTPGVQDPERELTCVMLRIVVTLLKGSVRNAVVLKDHGMVPFIKIFLDDECYREASLSILEQLSAINAEEYMSIIVGALCSSTQGELQLKLDLLKSLLRILVTPKGRAAFRVSSGFNGLLSLLSDLEGSLQEPPLQAWGAVSPRQTLELVLYTLCAVSAALHWDPVNGYFFRRNGLFEKLAEDLCLLGCFGALEEEGNLLRSWVDTKARPFADLLGTAFSSSGSLPPRIQSCLQILGFLDSMASGTLHLRGDLKESLRTKQGPVVDVQKGETGSDPQRNFKQWPDLEERMDEGDAAIMHPGVVCIMVRLLPRLYHEDHPQLSEEIQCSLASHIQSLVKSEKNRQVMCEAGLLGTLMASCHRALVTSGSPLHSRLIRIFEKLASQAIEPDVLRQFLGLGIPSSLSATTKILDSSHTHRGNPGCSGSQTAQGLAEGPWPAAPDAGLHPGVTQAPQPLGESQDSTTALQTALSLISMTSPRNLQPQRAALAPSFVEFDMSVEGYGCLFIPTLSTVMGTSTEYSVSGGIGTGATRPFPPPGGLTFSCWFLISRHGAATEGHPLRFLTLVRHLARTEQPFVCFSVSLCPDDLSLVVSTEEKEFQPLDVMEPEDDSEPSAGCQLQVRCGQLLACGQWHHLAVVVTKEMKRHCTVSTCLDGQVIGSAKMLYIQALPGPFLSMDPSAFVDVYGYIATPRVWKQKSSLIWRLGPTYLFEEAISMETLEVINKLGPRYCGNFQAVHVQGEDLDSEATPFVAEERVSFGLHIASSSITSVADIRNAYNEVDSRLIAKEMNISSRDNAMPVFLLRNCAGHLSGSLRTIGAVAVGQLGVRVFHSSPAASSLDFIGGPAILLGLISLATDDHTMYAAVKVLHSVLTSNAMCDFLMQHICGYQIMAFLLRKKASLLNHRIFQLILSVAGTVELGFRSSAITNTGVFQHILCNFELWMNTADNLELSLFSHLLEILQSPREGPRNAEAAHQAQLIPKLIFLFNEPSLIPSKISTIIGILACQLRGHFSTQDLLRIGLFVVYTLKPSSVNERQICMDGALDPSLPAGSQTSGKTIWLRNQLLEMLLSVISSPQLHLSSESKEEMFLKLGPDWFLLLLQGHLHASTTVLALKLLLYFLASPSLRTRFRDGLCAGSWVERSTEGVDIVMDNLKSQSPLPEQSPCLLPGFRVLNDFLAHHVHIPEVYLIVSTFFLQTPLTELMDGPKDSLDAMLQWLLQRHHQEEVLQAGLCTEGALLLLEMLKATMSQPLAGSEDGAWAQTFPASVLQFLSLVHRTYPQDPAWRAPEFLQTLAIAAFPLGAQKGVGAESTRNTSSPEAAAEGDSTVEGLQAPTKAHPARRKLREFTQLLLRELLLGASSPKQWLPLEVLLEASPDHATSQQKRDFQSEVLLSAMELFHMTSGGDAAMFRDGKEPQPSAEAAAAPSLANISCFTQKLVEKLYSGMFSADPRHILLFILEHIMVVIETASSQRDTVLSTLYSSLNKVILYCLSKPQQSLSECLGLLSILGFLQEHWDVVFATYNSNISFLLCLMHCLLLLNERSYPEGFGLEPKPRMSTYHQVFLSPNEDVKEKREDLPSLSDVQHNIQKTVQTLWQQLVAQRQQTLEDAFKIDLSVKPGEREVKIEEVTPLWEETMLKAWQHYLASEKKSLASRSNVAHHSKVTLWSGSLSSAMKLMPGRQAKDPECKTEDFVSCIENYRRRGQELYASLYKDHVQRRKCGNIKAANAWARIQEQLFGELGLWSQGEETKPCSPWELDWREGPARMRKRIKRLSPLEALSSGRHKESQDKNDHISQTNAENQDELTLREAEGEPDEVGVDCTQLTFFPALHESLHSEDFLELCRERQVILQELLDKEKVTQKFSLVIVQGHLVSEGVLLFGHQHFYICENFTLSPTGDVYCTRHCLSNISDPFIFNLCSKDRSTDHYSCQCHSYADMRELRQARFLLQDIALEIFFHNGYSKFLVFYNNDRSKAFKSFCSFQPSLKGKATSEDTLSLRRYPGSDRIMLQKWQKRDISNFEYLMYLNTAAGRTCNDYMQYPVFPWVLADYTSETLNLANPKIFRDLSKPMGAQTKERKLKFIQRFKEVEKTEGDMTVQCHYYTHYSSAIIVASYLVRMPPFTQAFCALQGGSFDVADRMFHSVKSTWESASRENMSDVRELTPEFFYLPEFLTNCNGVEFGCMQDGTVLGDVQLPPWADGDPRKFISLHRKALESDFVSANLHHWIDLIFGYKQQGPAAVDAVNIFHPYFYGDRMDLSSITDPLIKSTILGFVSNFGQVPKQLFTKPHPARTAAGKPLPGKDVSTPVSLPGHPQPFFYSLQSLRPSQVTVKDMYLFSLGSESPKGAIGHIVSTEKTILAVERNKVLLPPLWNRTFSWGFDDFSCCLGSYGSDKVLMTFENLAAWGRCLCAVCPSPTTIVTSGTSTVVCVWELSMTKGRPRGLRLRQALYGHTQAVTCLAASVTFSLLVSGSQDCTCILWDLDHLTHVTRLPAHREGISAITISDVSGTIVSCAGAHLSLWNVNGQPLASITTAWGPEGAITCCCLMEGPAWDTSQIIITGSQDGMVRVWKTEDVKMSVPGRPAGEEPPAQPPSPRGHKWEKNLALSRELDVSIALTGKPSKTSPAVTALAVSRNHTKLLVGDERGRIFCWSADG

SEQ ID NO: 8199 - protein, 654 aa, Homo sapiens
MEAEDLSKAEDRNEDPGSKNEGQLAAVQPDVPHGGQSSSPTALWDMLERKFLEYQQLTHKSPIERQKSLLSLLPLFLKAWEHSVGIICFPSLQRLAEDVSDQLAQQLQKALVGKPAEQARLAAGQLLWWKGDVDQDGYLLLKSVYVLTGTDSETLGRVAESGLPALLLQCLYLFFVFPLDKDELLESDLQVQKMFVQMLLNICSDSQGLEGLLSGSELQSLLIATTCLREHSCCFWKEPTFCVLRAISKAQNLSIIQYLQATDCVRLSLQNLSRLTDTLPAPEVSEAVSLILGFVKDSYPVSSALFLEFENSEGYPLLLKVLLRYDGLTQSEVDPHLEELLGLVVWLTTCGRSELKVFDSITYPQLEGFKFHHEASGVTVKNLQAFQVLQNVFHKASDSVLCIQVLSVIRTMWAWNARNFFLLEWTLQPISQFVEIMPLKPAPVQEHFFQLLEALVFELHYVPHEILRKVQHLIKESPGPSCTLMALQSILSIAGGDPLFTDIFRDSGLLGLLLAQLRKQAKIMRKSGNKVSTPGVQDPERELTCVMLRIVVTLLKGSVRNAVVLKDHGMVPFIKIFLDDECYREASLSILEQLSAINAEEYMSIIVGALCSSTQGELQLKLDLLKVISSPPLRLASLWICTKRSTFAQAFVFM

SEQ ID NO: 8200 - protein, 1042 aa, Homo sapiens
MEAEDLSKAEDRNEDPGSKNEGQLAAVQPDVPHGGQSSSPTALWDMLERKFLEYQQLTHKSPIERQKSLLSLLPLFLKAWEHSVGIICFPSLQRLAEDVSDQLAQQLQKALVGKPAEQARLAAGQLLWWKGDVDQDGYLLLKSVYVLTGTDSETLGRVAESGLPALLLQCLYLFFVFPLDKDELLESDLQVQKMFVQMLLNICSDSQGLEGLLSGSELQSLLIATTCLREHSCCFWKEPTFCVLRAISKAQNLSIIQYLQATDCVRLSLQNLSRLTDTLPAPEVSEAVSLILGFVKDSYPVSSALFLEFENSEGYPLLLKVLLRYDGLTQSEVDPHLEELLGLVVWLTTCGRSELKVFDSITYPQLEGFKFHHEASGVTVKNLQAFQVLQNVFHKASDSVLCIQVLSVIRTMWAWNARNFFLLEWTLQPISQFVEIMPLKPAPVQEHFFQLLEALVFELHYVPHEILRKVQHLIKESPGPSCTLMALQSILSIAGGDPLFTDIFRDSGLLGLLLAQLRKQAKIMRKSGNKVSTPGVQDPERELTCVMLRIVVTLLKGSVRNAVVLKDHGMVPFIKIFLDDECYREASLSILEQLSAINAEEYMSIIVGALCSSTQGELQLKLDLLKSLLRILVTPKGRAAFRVSSGFNGLLSLLSDLEGSLQEPPLQAWGAVSPRQTLELVLYTLCAVSAALHWDPVNGYFFRRNGLFEKLAEDLCLLGCFGALEEEGNLLRSWVDTKARPFADLLGTAFSSSGSLPPRIQSCLQILGFLDSMASGTLHLRGDLKESLRTKQGPVVDVQKGETGSDPQRNFKQWPDLEERMDEGDAAIMHPGVVCIMVRLLPRLYHEDHPQLSEEIQCSLASHIQSLVKSEKNRQVMCEAGLLGTLMASCHRALVTSGSPLHSRLIRIFEKLASQAIEPDVLRQFLGLGIPSSLSATTKILDSSHTHRGNPGCSGSQTAQGLAEGPWPAAPDAGLHPGVTQAPQPLGESQDSTTALQTALSLISMTFPACWKPNIWKDNLAQKPVAGDAAQCNIFPPASSVL

SEQ ID NO: 8201 - protein, 3176 aa, Homo sapiens
MEAEDLSKAEDRNEDPGSKNEGQLAAVQPDVPHGGQSSSPTALWDMLERKFLEYQQLTHKSPIERQKSLLSLLPLFLKAWEHSVGIICFPSLQRLAEDVSDQLAQQLQKALVGKPAEQARLAAGQLLWWKGDVDQDGYLLLKSVYVLTGTDSETLGRVAESGLPALLLQCLYLFFVFPLDKDELLESDLQVQKMFVQMLLNICSDSQGLEGLLSGSELQSLLIATTCLREHSCCFWKEPTFCVLRAISKAQNLSIIQYLQATDCVRLSLQNLSRLTDTLPAPEVSEAVSLILGFVKDSYPVSSALFLEFENSEGYPLLLKVLLRYDGLTQSEVDPHLEELLGLVVWLTTCGRSELKVFDSITYPQLEGFKFHHEASGVTVKNLQAFQVLQNVFHKASDSVLCIQVLSVIRTMWAWNARNFFLLEWTLQPISQFVEIMPLKPAPVQEHFFQLLEALVFELHYVPHEILRKVQHLIKESPGPSCTLMALQSILSIAGGDPLFTDIFRDSGLLGLLLAQLRKQAKIMRKSGNKVSTPGVQDPERELTCVMLRIVVTLLKGSVRNAVVLKDHGMVPFIKIFLDDECYREASLSILEQLSAINAEEYMSIIVGALCSSTQGELQLKLDLLKSLLRILVTPKGRAAFRVSSGFNGLLSLLSDLEGSLQEPPLQAWGAVSPRQTLELVLYTLCAVSAALHWDPVNGYFFRRNGLFEKLAEDLCLLGCFGALEEEGNLLRSWVDTKARPFADLLGTAFSSSGSLPPRIQSCLQILGFLDSMASGTLHLRGDLKESLRTKQGPVVDVQKGETGSDPQRNFKQWPDLEERMDEGDAAIMHPGVVCIMVRLLPRLYHEDHPQLSEEIQCSLASHIQSLVKSEKNRQVMCEAGLLGTLMASCHRALVTSGSPLHSRLIRIFEKLASQAIEPDVLRQFLGLGIPSSLSATTKILDSSHTHRGNPGCSGSQTAQGLAEGPWPAAPDAGLHPGVTQAPQPLGESQDSTTALQTALSLISMTSPRNLQPQRAALAPSFVEFDMSVEGYGCLFIPTLSTVMGTSTEYSVSGGIGTGATRPFPPPGGLTFSCWFLISRHGAATEGHPLRFLTLVRHLARTEQPFVCFSVSLCPDDLSLVVSTEEKEFQPLDVMEPEDDSEPSAGCQLQVRCGQLLACGQWHHLAVVVTKEMKRHCTVSTCLDGQVIGSAKMLYIQALPGPFLSMDPSAFVDVYGYIATPRVWKQKSSLIWRLGPTYLFEEAISMETLEVINKLGPRYCGNFQAVHVQGEDLDSEATPFVAEERVSFGLHIASSSITSVADIRNAYNEVDSRLIAKEMNISSRDNAMPVFLLRNCAGHLSGSLRTIGAVAVGQLGVRVFHSSPAASSLDFIGGPAILLGLISLATDDHTMYAAVKVLHSVLTSNAMCDFLMQHICGYQIMAFLLRKKASLLNHRIFQLILSVAGTVELGFRSSAITNTGVFQHILCNFELWMNTADNLELSLFSHLLEILQSPREGPRNAEAAHQAQLIPKLIFLFNEPSLIPSKISTIIGILACQLRGHFSTQDLLRIGLFVVYTLKPSSVNERQICMDGALDPSLPAGSQTSGKTIWLRNQLLEMLLSVISSPQLHLSSESKEEMFLKLGPDWFLLLLQGHLHASTTVLALKLLLYFLASPSLRTRFRDGLCAGSWVERSTEGVDIVMDNLKSQSPLPEQSPCLLPGFRVLNDFLAHHVHIPEVYLIVSTFFLQTPLTELMDGPKDSLDAMLQWLLQRHHQEEVLQAGLCTEGALLLLEMLKATMSQPLAGSEDGAWAQTFPASVLQFLSLVHRTYPQDPAWRAPEFLQTLAIAAFPLGAQKGVGAESTRNTSSPEAAAEGDSTVEGLQAPTKAHPARRKLREFTQLLLRELLLGASSPKQWLPLEVLLEASPDHATSQQKRDFQSEVLLSAMELFHMTSGGDAAMFRDGKEPQPSAEAAAAPSLANISCFTQKLVEKLYSGMFSADPRHILLFILEHIMVVIETASSQRDTVLSTLYSSLNKVILYCLSKPQQSLSECLGLLSILGFLQEHWDVVFATYNSNISFLLCLMHCLLLLNERSYPEGFGLEPKPRMSTYHQVFLSPNEDVKEKREDLPSLSDVQHNIQKTVQTLWQQLVAQRQQTLEDAFKIDLSVKPGEREVKIEEVTPLWEETMLKAWQHYLASEKKSLASRSNVAHHSKVTLWSGSLSSAMKLMPGRQAKDPECKTEDFVSCIENYRRRGQELYASLYKDHVQRRKCGNIKAANAWARIQEQLFGELGLWSQGEETKPCSPWELDWREGPARMRKRIKRLSPLEALSSGRHKESQDKNDHISQTNAENQDELTLREAEGEPDEVGVDCTQLTFFPALHESLHSEDFLELCRERQVILQELLDKEKVTQKFSLVIVQGHLVSEGVLLFGHQHFYICENFTLSPTGDVYCTRHCLSNISDPFIFNLCSKDRSTDHYSCQCHSYADMRELRQARFLLQDIALEIFFHNGYSKFLVFYNNDRSKAFKSFCSFQPSLKGKATSEDTLSLRRYPGSDRIMLQKWQKRDISNFEYLMYLNTAAGRTCNDYMQYPVFPWVLADYTSETLNLANPKIFRDLSKPMGAQTKERKLKFIQRFKEVEKTEGDMTVQCHYYTHYSSAIIVASYLVRMPPFTQAFCALQGGSFDVADRMFHSVKSTWESASRENMSDVRELTPEFFYLPEFLTNCNGVEFGCMQDGTVLGDVQLPPWADGDPRKFISLHRKALESDFVSANLHHWIDLIFGYKQQGPAAVDAVNIFHPYFYGDRMDLSSITDPLIKSTILGFVSNFGQVPKQLFTKPHPARTAAGKPLPGKDVSTPVSLPGHPQPFFYSLQSLRPSQVTVKDMYLFSLGSESPKGAIGHIVSTEKTILAVERNKVLLPPLWNRTFSWGFDDFSCCLGSYGSDKVLMTFENLAAWGRCLCAVCPSPTTIVTSGTSTVVCVWELSMTKGRPRGLRLRQALYGHTQAVTCLAASVTFSLLVSGSQDCTCILWDLDHLTHVTRLPAHREGISAITISDVSGTIVSCAGAHLSLWNVNGQPLASITTAWGPEGAITCCCLMEGPAWDTSQIIITGSQDGMVRVWKTEDVKMSVPGLQMGRKREAAEALAQQCQAEGGRGDWGLSSAYRRNPQGLLPHSSQGRASGNHSSAAQPSPWPMGLL

SEQ ID NO: 8202 - protein, 2920 aa, Homo sapiens
MEAEDLSKAEDRNEDPGSKNEGQLAAVQPDVPHGGQSSSPTALWDMLERKFLEYQQLTHKSPIERQKSLLSLLPLFLKAWEHSVGIICFPSLQRLAEDVSDQLAQQLQKALVGKPAEQARLAAGQLLWWKGDVDQDGYLLLKSVYVLTGTDSETLGRVAESGLPALLLQCLYLFFVFPLDKDELLESDLQVQKMFVQMLLNICSDSQGLEGLLSGSELQSLLIATTCLREHSCCFWKEPTFCVLRAISKAQNLSIIQYLQATDCVRLSLQNLSRLTDTLPAPEVSEAVSLILGFVKDSYPVSSALFLEFENSEGYPLLLKVLLRYDGLTQSEVDPHLEELLGLVVWLTTCGRSELKVFDSITYPQLEGFKFHHEASGVTVKNLQAFQVLQNVFHKASDSVLCIQVLSVIRTMWAWNARNFFLLEWTLQPISQFVEIMPLKPAPVQEHFFQLLEALVFELHYVPHEILRKVQHLIKESPGPSCTLMALQSILSIAGGDPLFTDIFRDSGLLGLLLAQLRKQAKIMRKSGNKVSTPGVQDPERELTCVMLRIVVTLLKGSVRNAVVLKDHGMVPFIKIFLDDECYREASLSILEQLSAINAEEYMSIIVGALCSSTQGELQLKLDLLKSLLRILVTPKGRAAFRVSSGFNGLLSLLSDLEGSLQEPPLQAWGAVSPRQTLELVLYTLCAVSAALHWDPVNGYFFRRNGLFEKLAEDLCLLGCFGALEEEGNLLRSWVDTKARPFADLLGTAFSSSGSLPPRIQSCLQILGFLDSMASGTLHLRGDLKESLRTKQGPVVDVQKGETGSDPQRNFKQWPDLEERMDEGDAAIMHPGVVCIMVRLLPRLYHEDHPQLSEEIQCSLASHIQSLVKSEKNRQVMCEAGLLGTLMASCHRALVTSGSPLHSRLIRIFEKLASQAIEPDVLRQFLGLGIPSSLSATTKILDSSHTHRGNPGCSGSQTAQGLAEGPWPAAPDAGLHPGVTQAPQPLGESQDSTTALQTALSLISMTSPRNLQPQRAALAPSFVEFDMSVEGYGCLFIPTLSTVMGTSTEYSVSGGIGTGATRPFPPPGGLTFSCWFLISRHGAATEGHPLRFLTLVRHLARTEQPFVCFSVSLCPDDLSLVVSTEEKEFQPLDVMEPEDDSEPSAGCQLQVRCGQLLACGQWHHLAVVVTKEMKRHCTVSTCLDGQVIGSAKMLYIQALPGPFLSMDPSAFVDVYGYIATPRVWKQKSSLIWRLGPTYLFEEAISMETLEVINKLGPRYCGNFQAVHVQGEDLDSEATPFVAEERVSFGLHIASSSITSVADIRNAYNEVDSRLIAKEMNISSRDNAMPVFLLRNCAGHLSGSLRTIGAVAVGQLGVRVFHSSPAASSLDFIGGPAILLGLISLATDDHTMYAAVKVLHSVLTSNAMCDFLMQHICGYQIMAFLLRKKASLLNHRIFQLILSVAGTVELGFRSSAITNTGVFQHILCNFELWMNTADNLELSLFSHLLEILQSPREGPRNAEAAHQAQLIPKLIFLFNEPSLIPSKISTIIGILACQLRGHFSTQDLLRIGLFVVYTLKPSSVNERQICMDGALDPSLPAGSQTSGKTIWLRNQLLEMLLSVISSPQLHLSSESKEEMFLKLGPDWFLLLLQGHLHASTTVLALKLLLYFLASPSLRTRFRDGLCAGSWVERSTEGVDIVMDNLKSQSPLPEQSPCLLPGFRVLNDFLAHHVHIPEVYLIVSTFFLQTPLTELMDGPKDSLDAMLQWLLQRHHQEEVLQAGLCTEGALLLLEMLKATMSQPLAGSEDGAWAQTFPASVLQFLSLVHRTYPQDPAWRAPEFLQTLAIAAFPLGAQKGVGAESTRNTSSPEAAAEGDSTVEGLQAPTKAHPARRKLREFTQLLLRELLLGASSPKQWLPLEVLLEASPDHATSQQKRDFQSEVLLSAMELFHMTSGGDAAMFRDGKEPQPSAEAAAAPSLANISCFTQKLVEKLYSGMFSADPRHILLFILEHIMVVIETASSQRDTVLSTLYSSLNKVILYCLSKPQQSLSECLGLLSILGFLQEHWDVVFATYNSNISFLLCLMHCLLLLNERSYPEGFGLEPKPRMSTYHQVFLSPNEDVKEKREDLPSLSDVQHNIQKTVQTLWQQLVAQRQQTLEDAFKIDLSVKPGEREVKIEEVTPLWEETMLKAWQHYLASEKKSLASRSNVAHHSKVTLWSGSLSSAMKLMPGRQAKDPECKTEDFVSCIENYRRRGQELYASLYKDHVQRRKCGNIKAANAWARIQEQLFGELGLWSQGEETKPCSPWELDWREGPARMRKRIKRLSPLEALSSGRHKESQDKNDHISQTNAENQDELTLREAEGEPDEVGVDCTQLTFFPALHESLHSEDFLELCRERQVILQELLDKEKVTQKFSLVIVQGHLVSEGVLLFGHQHFYICENFTLSPTGDVYCTRHCLSNISDPFIFNLCSKDRSTDHYSCQCHSYADMRELRQARFLLQDIALEIFFHNGYSKFLVFYNNDRSKAFKSFCSFQPSLKGKATSEDTLSLRRYPGSDRIMLQKWQKRDISNFEYLMYLNTAAGRTCNDYMQYPVFPWVLADYTSETLNLANPKIFRDLSKPMGAQTKERKLKFIQRFKEVEKTEGDMTVQCHYYTHYSSAIIVASYLVRMPPFTQAFCALQGGSFDVADRMFHSVKSTWESASRENMSDVRELTPEFFYLPEFLTNCNGVEFGCMQDGTVLGDVQLPPWADGDPRKFISLHRKALESDFVSANLHHWIDLIFGYKQQGPAAVDAVNIFHPYFYGDRMDLSSITDPLIKSTILGFVSNFGQVPKQLFTKPHPARTAAGKPLPGKDVSTPVSLPGHPQPFFYSLQSLRPSQVTVKGDSLAMHCLVSCPRVVPSVAGFLWRSSTTYLGKVLGTDFEWLHLQSQPDSRGVSSLGSV

SEQ ID NO: 8203 - protein, 563 aa, Homo sapiens
MANSSFIGDHVHGAPHAVMPEVEFPDQFFTVLTMDHELVTLRDVVINFSQEEWEYLDSAQRNLYWDVMMENYSNLLSLDLESRNETKHLSVGKDIIQNTGSQWEVMESSKLCGLEGSIFRNDWQSKSKIDLQGPEVGYFSQMKIISENVPSYKTHESLTLPRRTHDSEKPYEYKEYEKVFSCDLEFDEYQKIHTGGKNYECNQCWKTFGIDNSSMLQLNIHTGVKPCKYMEYGNTCSFYKDFNVYQKIHNEKFYKCKEYRRTFERVGKVTPLQRVHDGEKHFECSFCGKSFRVHAQLTRHQKIHTDEKTYKCMECGKDFRFHSQLTEHQRIHTGEKPYKCMHCEKVFRISSQLIEHQRIHTGEKPYACKECGKAFGVCRELARHQRIHTGKKPYECKACGKVFRNSSSLTRHQRIHTGEKPYKCKECEKAFGVGSELTRHERIHSGQKPYECKECGKFFRLTSALIQHQRIHSGEKPYECKVCGKAFRHSSALTEHQRIHTGEKPYECKACGKAFRHSSSFTKHQRIHTDDKPYECKECGNSFSVVGHLTCQPKIYTGEKSFD

SEQ ID NO: 8204 - protein, 425 aa, Homo sapiens
MAAVSPTTRCQESVTFEDVAVVFTDEEWSRLVPIQRDLYKEVMLENYNSIVSLGLPVPQPDVIFQLKRGDKPWMVDLHGSEEREWPESVSLDWETKPEIHDASDKKSEGSLRECLGRQSPLCPKFEVHTPNGRMGTEKQSPSGETRKKSLSRDKGLRRRSALSREILTKERHQECSDCGKTFFDHSSLTRHQRTHTGEKPYDCRECGKAFSHRSSLSRHLMSHTGESPYECSVCSKAFFDRSSLTVHQRIHTGEKPFQCNECGKAFFDRSSLTRHQRIHTGESPYECHQCGKAFSQKSILTRHQLIHTGRKPYECNECGKAFYGVSSLNRHQKAHAGDPRYQCNECGKAFFDRSSLTQHQKIHTGDKPYECSECGKAFSQRCRLTRHQRVHTGEKPFECTVCGKVFSSKSSVIQHQRRYAKQGID

SEQ ID NO: 8205 - protein, 383 aa, Homo sapiens
MLENYNSIVSLGLPVPQPDVIFQLKRGDKPWMVDLHGSEEREWPESVSLDWETKPEIHDASDKKSEGSLRECLGRQSPLCPKFEVHTPNGRMGTEKQSPSGETRKKSLSRDKGLRRRSALSREILTKERHQECSDCGKTFFDHSSLTRHQRTHTGEKPYDCRECGKAFSHRSSLSRHLMSHTGESPYECSVCSKAFFDRSSLTVHQRIHTGEKPFQCNECGKAFFDRSSLTRHQRIHTGESPYECHQCGKAFSQKSILTRHQLIHTGRKPYECNECGKAFYGVSSLNRHQKAHAGDPRYQCNECGKAFFDRSSLTQHQKIHTGDKPYECSECGKAFSQRCRLTRHQRVHTGEKPFECTVCGKVFSSKSSVIQHQRRYAKQGID

SEQ ID NO: 8206 - protein, 387 aa, Homo sapiens
MAAVSPTTRCQESVTFEDVAVVFTDEEWSRLVPIQRDLYKEVMLENYNSIVSLDWETKPEIHDASDKKSEGSLRECLGRQSPLCPKFEVHTPNGRMGTEKQSPSGETRKKSLSRDKGLRRRSALSREILTKERHQECSDCGKTFFDHSSLTRHQRTHTGEKPYDCRECGKAFSHRSSLSRHLMSHTGESPYECSVCSKAFFDRSSLTVHQRIHTGEKPFQCNECGKAFFDRSSLTRHQRIHTGESPYECHQCGKAFSQKSILTRHQLIHTGRKPYECNECGKAFYGVSSLNRHQKAHAGDPRYQCNECGKAFFDRSSLTQHQKIHTGDKPYECSECGKAFSQRCRLTRHQRVHTGEKPFECTVCGKVFSSKSSVIQHQRRYAKQGID

SEQ ID NO: 8207 - protein, 543 aa, Homo sapiens
MEQSCEEEKEPEPQKNIQETKQVDDEDAELIFVGVEHVNEDAELIFVGVTSNSKPVVSNILNRVTPGSWSRRKKYDHLRKDTARKLQPKSHETVTSEAVTVLPASQLESRSTDSPIIIEPLSKPDYRNSSPQVVPNNSSELPSPLITFTDSLHHPVSTALSVGGINESPRVSKQLSTFEVNSINPKRAKLRDGIIEGNSSASFPSDTFHTMNTQQSTPSNNVHTSLSHVQNGAPFPAAFPKDNIHFKPINTNLDRENELAKTDILSLTSQNKTFDPKKENPIVLLSDFYYGQHKGEGQPEQKTHTTFKCLSCVKVLKNVKFMNHVKHHLEFEKQRNDSWENHTTCQHCHRQFPTPFQLQCHIENVHTAQEPSTVCKICELSFETDQVLLQHMKDHHKPGEMPYVCQVCHYRSSVFADVETHFRTCHENTKNLLCPFCLKIFKTATPYMCHYRGHWGKSAHQCSKCRLQFLTFKEKMEHKTQCHQMFKKPKQLEGLPPETKVTIQVSLEPLQPGSVDVASITVSTSDSEPSLPRSKSKISKKSH

SEQ ID NO: 8208 - protein, 554 aa, Homo sapiens
MNVMLENYKNLVFLAGIAVSKQDPITSLEQEKEPWNMKICEMVDESPAMCSSFTRDLWPEQDIKDSFQQVILRRHGKCEHENLQLRKGSANVVECKVYKKGYELNQCLTTTQSKIFPCDKYIKVFHKIFNSNRHKTRHTGEKPFKCKKCDESFCMLLHLHQHKRIHIRENSYQCEECDKVFKRFSTLTRHKRVHTGEKPFKCEECGKAFKHSSTLTTHKMIHTGEKPYRCEECGKAFYHSSHLTTHKVIHTGEKPFKCEECGKAFNHPSALTTHKFIHVKEKPYKCEECDKAFNRFSYLTKHKIIHSGEKSYKCEQCGKGFNWSSTLTKHKRIHTGEKPYKCEECGKAFNVSSHLTTHKMIHTGEKPYKCEECGKAFNHSSKLTIHKIIHTGEKPYKCEECGKAFNQSSNLTKHKIIHTGEKLYKCEECGKAFNRSSNLTTHKRIHTGEKPYKCEECGKAFNRSSNLTKHNIIHTGEKSYKCEECGKAFNQSSTLTKHRKIQQGMVAHACNPNTLRGLGEQIARSGVQDQPGQHGKTPSLLKIQKFAGCGGRRL

SEQ ID NO: 8209 - protein, 523 aa, Homo sapiens
MNVMLENYKNLVFLAGIAVSKQDPITSLEQEKEPWNMKICEMVDESPAMCSSFTRDLWPEQDIKDSFQQVILRRHGKCEHENLQLRKGSANVVECKVYKKGYELNQCLTTTQSKIFPCDKYIKVFHKIFNSNRHKTRHTGEKPFKCKKCDESFCMLLHLHQHKRIHIRENSYQCEECDKVFKRFSTLTRHKRVHTGEKPFKCEECGKAFKHSSTLTTHKMIHTGEKPYRCEECGKAFYHSSHLTTHKVIHTGEKPFKCEECGKAFNHPSALTTHKFIHVKEKPYKCEECDKAFNRFSYLTKHKIIHSGEKSYKCEQCGKGFNWSSTLTKHKRIHTGEKPYKCEECGKAFNVSSHLTTHKMIHTGEKPYKCEECGKAFNHSSKLTIHKIIHTGEKPYKCEECGKAFNQSSNLTKHKIIHTGEKLYKCEECGKAFNRSSNLTTHKRIHTGEKPYKCEECGKAFNRSSNLTKHNIIHTGEKSYKCEECGKAFNQSSTLTKHRKIQQGMVAHACNPNTLGGQGRWIT

SEQ ID NO: 8210 - protein, 400 aa, Homo sapiens
MLLHLHQHKRIHIRENSYQCEECDKVFKRFSTLTRHKRVHTGEKPFKCEECGKAFKHSSTLTTHKMIHTGEKPYRCEECGKAFYHSSHLTTHKVIHTGEKPFKCEECGKAFNHPSALTTHKFIHVKEKPYKCEECDKAFNRFSYLTKHKIIHSGEKSYKCEQCGKGFNWSSTLTKHKRIHTGEKPYKCEECGKAFNVSSHLTTHKMIHTGEKPYKCEECGKAFNHSSKLTIHKIIHTGEKPYKCEECGKAFNQSSNLTKHKIIHTGEKLYKCEECGKAFNRSSNLTTHKRIHTGEKPYKCEECGKAFNRSSNLTKHNIIHTGEKSYKCEECGKAFNQSSTLTKHRKIQQGMVAHACNPNTLRGLGEQIARSGVQDQPGQHGKTPSLLKIQKFAGCGGRRL

SEQ ID NO: 8211 - protein, 627 aa, Homo sapiens
MAMALTDPAQVSVTFDDVAVTFTQEEWGQLDLAQRTLYQEVMLENCGLLVSLGCPVPRPELIYHLEHGQEPWTRKEDLSQGTCPGDKGKPKSTEPTTCELALSEGISFWGQLTQGASGDSQLGQPKDQDGFSEMQGERLRPGLDSQKEKLPGKMSPKHDGLGTADSVCSRIIQDRVSLGDDVHDCDSHGSGKNPVIQEEENIFKCNECEKVFNKKRLLARHERIHSGVKPYECTECGKTFSKSTYLLQHHMVHTGEKPYKCMECGKAFNRKSHLTQHQRIHSGEKPYKCSECGKAFTHRSTFVLHNRSHTGEKPFVCKECGKAFRDRPGFIRHYIIHSGENPYECFECGKVFKHRSYLMWHQQTHTGEKPYECSECGKAFCESAALIHHYVIHTGEKPFECLECGKAFNHRSYLKRHQRIHTGEKPYVCSECGKAFTHCSTFILHKRAHTGEKPFECKECGKAFSNRADLIRHFSIHTGEKPYECMECGKAFNRRSGLTRHQRIHSGEKPYECIECGKTFCWSTNLIRHSIIHTGEKPYECSECGKAFSRSSSLTQHQRMHTGRNPISVTDVGRPFTSGQTSVNIQELLLGKNFLNVTTEENLLQEEASYMASDRTYQRETPQVSSL

SEQ ID NO: 8212 - protein, 494 aa, Homo sapiens
MQGERLRPGLDSQKEKLPGKMSPKHDGLGTADSVCSRIIQDRVSLGDDVHDCDSHGSGKNPVIQEEENIFKCNECEKVFNKKRLLARHERIHSGVKPYECTECGKTFSKSTYLLQHHMVHTGEKPYKCMECGKAFNRKSHLTQHQRIHSGEKPYKCSECGKAFTHRSTFVLHNRSHTGEKPFVCKECGKAFRDRPGFIRHYIIHSGENPYECFECGKVFKHRSYLMWHQQTHTGEKPYECSECGKAFCESAALIHHYVIHTGEKPFECLECGKAFNHRSYLKRHQRIHTGEKPYVCSECGKAFTHCSTFILHKRAHTGEKPFECKECGKAFSNRADLIRHFSIHTGEKPYECMECGKAFNRRSGLTRHQRIHSGEKPYECIECGKTFCWSTNLIRHSIIHTGEKPYECSECGKAFSRSSSLTQHQRMHTGRNPISVTDVGRPFTSGQTSVNIQELLLGKNFLNVTTEENLLQEEASYMASDRTYQRETPQVSSL

SEQ ID NO: 8213 - protein, 567 aa, Homo sapiens
MSSRLGAVPATSGPTTFKQQRSTRIVGAKNSRTQCSIKDNSFQYTIPHDDSLSGSSSASSCEPVSDFPASFRKSTYWMKMRRIKPAATSHVEGSGGVSAKGKRKPRQEEDEDYREFPQKKHKLYGRKQRPKTQPNPKSQARRIRKEPPVYAAGSLEEQWYLEIVDKGSVSCPTCQAVGRKTIEGLKKHMENCKQEMFTCHHCGKQLRSLAGMKYHVMANHNSLPILKAGDEIDEPSERERLRTVLKRLGKLRCMRESCSSSFTSIMGYLYHVRKCGKGAAELEKMTLKCHHCGKPYRSKAGLAYHLRSEHGPISFFPESGQPECLKEMNLESKSGGRVQRRSAKIAVYHLQELASAELAKEWPKRKVLQDLVPDDRKLKYTRPGLPTFSQEVLHKWKTDIKKYHRIQCPNQGCEAVYSSVSGLKAHLGSCTLGNFVAGKYKCLLCQKEFVSESGVKYHINSVHAEDWFVVNPTTTKSFEKLMKIKQRQQEEEKRRQQHRSRRSLRRRQQPGIELPETELSLRVGKDQRRNNEELVVSASCKEPEQEPVPAQFQKVKPPKTNHKRGRK

SEQ ID NO: 8214 - protein, 490 aa, Homo sapiens
MKMRRIKPAATSHVEGSGGVSAKGKRKPRQEEDEDYREFPQKKHKLYGRKQRPKTQPNPKSQARRIRKEPPVYAAGSLEEQWYLEIVDKGSVSCPTCQAVGRKTIEGLKKHMENCKQEMFTCHHCGKQLRSLAGMKYHVMANHNSLPILKAGDEIDEPSERERLRTVLKRLGKLRCMRESCSSSFTSIMGYLYHVRKCGKGAAELEKMTLKCHHCGKPYRSKAGLAYHLRSEHGPISFFPESGQPECLKEMNLESKSGGRVQRRSAKIAVYHLQELASAELAKEWPKRKVLQDLVPDDRKLKYTRPGLPTFSQEVLHKWKTDIKKYHRIQCPNQGCEAVYSSVSGLKAHLGSCTLGNFVAGKYKCLLCQKEFVSESGVKYHINSVHAEDWFVVNPTTTKSFEKLMKIKQRQQEEEKRRQQHRSRRSLRRRQQPGIELPETELSLRVGKDQRRNNEELVVSASCKEPEQEPVPAQFQKVKPPKTNHKRGRK

SEQ ID NO: 8215 - protein, 538 aa, Homo sapiens
MSSRLGAVPATSGPTTFKQQRSTRIVGAKNRTQCSIKDNSFQYTIPHDDSLSGSSSASSCEPVSDFPASFRKSTYWMKMRRIKPAATSHVEGSGGVSAKGKRKPRQEEDEDYREFPQKKHKLYGSLEEQWYLEIVDKGSVSCPTCQAVGRKTIEGLKKHMENCKQEMFTCHHCGKQLRSLAGMKYHVMANHNSLPILKAGDEIDEPSERERLRTVLKRLGKLRCMRESCSSSFTSIMGYLYHVRKCGKGAAELEKMTLKCHHCGKPYRSKAGLAYHLRSEHGPISFFPESGQPECLKEMNLESKSGGRVQRRSAKIAVYHLQELASAELAKEWPKRKVLQDLVPDDRKLKYTRPGLPTFSQEVLHKWKTDIKKYHRIQCPNQGCEAVYSSVSGLKAHLGSCTLGNFVAGKYKCLLCQKEFVSESGVKYHINSVHAEDWFVVNPTTTKSFEKLMKIKQRQQEEEKRRQQHRSRRSLRRRQQPGIELPETELSLRVGKDQRRNNEELVVSASCKEPEQEPVPAQFQKVKPPKTNHKRGRK

SEQ ID NO: 8216 - protein, 682 aa, Homo sapiens
MPSLRTRREEAEMELSVPGPSPWTPAAQARVRDAPAVTHPGSAACGTPCCSDTELEAICPHYQQPDCDTRTEDKEFLHKEDIHEDLESQAEISENYAGDVSQVPELGDLCDDVSERDWGVPEGRRLPQSLSQEGDFTPAAMGLLRGPLGEKDLDCNGFDSRFSLSPNLMACQEIPTEERPHPYDMGGQSFQHSVDLTGHEGVPTAESPLICNECGKTFQGNPDLIQRQIVHTGEASFMCDDCGKTFSQNSVLKNRHRSHMSEKAYQCSECGKAFRGHSDFSRHQSHHSSERPYMCNECGKAFSQNSSLKKHQKSHMSEKPYECNECGKAFRRSSNLIQHQRIHSGEKPYVCSECGKAFRRSSNLIKHHRTHTGEKPFECGECGKAFSQSAHLRKHQRVHTGEKPYECNDCGKPFSRVSNLIKHHRVHTGEKPYKCSDCGKAFSQSSSLIQHRRIHTGEKPHVCNVCGKAFSYSSVLRKHQIIHTGEKPYRCSVCGKAFSHSSALIQHQGVHTGDKPYACHECGKTFGRSSNLILHQRVHTGEKPYECTECGKTFSQSSTLIQHQRIHNGLKPHECNQCGKAFNRSSNLIHHQKVHTGEKPYTCVECGKGFSQSSHLIQHQIIHTGERPYKCSECGKAFSQRSVLIQHQRIHTGVKPYDCAACGKAFSQRSKLIKHQLIHTRE

SEQ ID NO: 8217 - protein, 670 aa, Homo sapiens
MPAPVGRRSPPSPRSSMAAVALRDSAQGMTFEDVAIYFSQEEWELLDESQRFLYCDVMLENFAHVTSLGYCHGMENEAIASEQSVSIQVRTSKGNTPTQKTHLSEIKMCVPVLKDILPAAEHQTTSPVQKSYLGSTSMRGFCFSADLHQHQKHYNEEEPWKRKVDEATFVTGCRFHVLNYFTCGEAFPAPTDLLQHEATPSGEEPHSSSSKHIQAFFNAKSYYKWGEYRKASSHKHTLVQHQSVCSEGGLYECSKCEKAFTCKNTLVQHQQIHTGQKMFECSECEESFSKKCHLILHKIIHTGERPYECSDREKAFIHKSEFIHHQRRHTGGVRHECGECRKTFSYKSNLIEHQRVHTGERPYECGECGKSFRQSSSLFRHQRVHSGERPYQCCECGKSFRQIFNLIRHRRVHTGEMPYQCSDCGKSFSCKSELIQHQRIHSGERPYECRECGKSFRQFSNLIRHRSIHTGDRPYECSECEKSFSRKFILIQHQRVHTGERPYECSECGKSFTRKSDLIQHRRIHTGTRPYECSECGKSFRQRSGLIQHRRLHTGERPYECSECGKSFSQSASLIQHQRVHTGERPYECSECGKSFSQSSSLIQHQRGHTGERPYECSQCGKPFTHKSDLIQHQRVHTGERPYECSECGKSFSRKSNLIRHRRVHTEERP

SEQ ID NO: 8218 - protein, 597 aa, Homo sapiens
MENEAIASEQSVSIQVRTSKGNTPTQKTHLSEIKMCVPVLKDILPAAEHQTTSPVQKSYLGSTSMRGFCFSADLHQHQKHYNEEEPWKRKVDEATFVTGCRFHVLNYFTCGEAFPAPTDLLQHEATPSGEEPHSSSSKHIQAFFNAKSYYKWGEYRKASSHKHTLVQHQSVCSEGGLYECSKCEKAFTCKNTLVQHQQIHTGQKMFECSECEESFSKKCHLILHKIIHTGERPYECSDREKAFIHKSEFIHHQRRHTGGVRHECGECRKTFSYKSNLIEHQRVHTGERPYECGECGKSFRQSSSLFRHQRVHSGERPYQCCECGKSFRQIFNLIRHRRVHTGEMPYQCSDCGKSFSCKSELIQHQRIHSGERPYECRECGKSFRQFSNLIRHRSIHTGDRPYECSECEKSFSRKFILIQHQRVHTGERPYECSECGKSFTRKSDLIQHRRIHTGTRPYECSECGKSFRQRSGLIQHRRLHTGERPYECSECGKSFSQSASLIQHQRVHTGERPYECSECGKSFSQSSSLIQHQRGHTGERPYECSQCGKPFTHKSDLIQHQRVHTGERPYECSECGKSFSRKSNLIRHRRVHTEERP

SEQ ID NO: 8219 - protein, 362 aa, Homo sapiens
MPAPVGRRSPPSPRSSMAAVALRDSAQGMTFEDVAIYFSQEEWELLDESQRFLYCDVMLENFAHVTSLGYCHGMENEAIASEQSVSIQVRTSKGNTPTQKTHLSEIKMCVPVLKDILPAAEHQTTSPVQKSYLGSTSMRGFCFSADLHQHQKHYNEEEPWKRKVDEATFVTGCRFHVLNYFTCGEAFPAPTDLLQHEATPSGEEPHSSSSKHIQAFFNAKSYYKWGEYRKASSHKHTLVQHQSVCSEGGLYECSKCEKAFTCKNTLVQHQQIHTGQKMFECSECEESFSKKCHLILHKIIHTGERPYECSDREKAFIHKSEFIHHQRRHTGGVRHECGECRKTFSYKSNLIEHQRVHTGERP

SEQ ID NO: 8220 - protein, 572 aa, Homo sapiens
MAAPRPSPAISVSVSAPAFYAPQKKFGPVVAPKPKVNPFRPGDSEPPPAPGAQRAQMGRVGEIPPPPPEDFPLPPPPLAGDGDDAEGALGGAFPPPPPPIEESFPPAPLEEEIFPSPPPPPEEEGGPEAPIPPPPQPREKVSSIDLEIDSLSSLLDDMTKNDPFKARVSSGYVPPPVATPFSSKSSTKPAAGGTAPLPPWKSPSSSQPLPQVPAPAQSQTQFHVQPQPQPKPQVQLHVQSQTQPVSLANTQPRGPPASSPAPAPKFSPVTPKFTPVASKFSPGAPGGSGSQPNQKLGHPEALSAGTGSPQPPSFTYAQQREKPRVQEKQHPVPPPAQNQNQVRSPGAPGPLTLKEVEELEQLTQQLMQDMEHPQRQNVAVNELCGRCHQPLARAQPAVRALGQLFHIACFTCHQCAQQLQGQQFYSLEGAPYCEGCYTDTLEKCNTCGEPITDRMLRATGKAYHPHCFTCVVCARPLEGTSFIVDQANRPHCVPDYHKQYAPRCSVCSEPIMPEPGRDETVRVVALDKNFHMKCYKCEDCGKPLSIEADDNGCFPLDGHVLCRKCHTARAQT

SEQ ID NO: 8221 - protein, 415 aa, Homo sapiens
MTKNDPFKARVSSGYVPPPVATPFSSKSSTKPAAGGTAPLPPWKSPSSSQPLPQVPAPAQSQTQFHVQPQPQPKPQVQLHVQSQTQPVSLANTQPRGPPASSPAPAPKFSPVTPKFTPVASKFSPGAPGGSGSQPNQKLGHPEALSAGTGSPQPPSFTYAQQREKPRVQEKQHPVPPPAQNQNQVRSPGAPGPLTLKEVEELEQLTQQLMQDMEHPQRQNVAVNELCGRCHQPLARAQPAVRALGQLFHIACFTCHQCAQQLQGQQFYSLEGAPYCEGCYTDTLEKCNTCGEPITDRMLRATGKAYHPHCFTCVVCARPLEGTSFIVDQANRPHCVPDYHKQYAPRCSVCSEPIMPEPGRDETVRVVALDKNFHMKCYKCEDCGKPLSIEADDNGCFPLDGHVLCRKCHTARAQT

SEQ ID NO: 8222 - protein, 989 aa, Homo sapiens
MEPPAAKRSRGCPAGPEERDAGAGAARGRGRPEALLDLSAKRVAESWAFEQVEERFSRVPEPVQKRIVFWSFPRSEREICMYSSLGYPPPEGEHDARVPFTRGLHLLQSGAVDRVLQVGFHLSGNIREPGSPGEPERLYHVSISFDRCKITSVSCGCDNRDLFYCAHVVALSLYRIRHAHQVELRLPISETLSQMNRDQLQKFVQYLISAHHTEVLPTAQRLADEILLLGSEINLVNGAPDPTAGAGIEDANCWHLDEEQIQEQVKQLLSNGGYYGASQQLRSMFSKVREMLRMRDSNGARMLILMTEQFLQDTRLALWRQQGAGMTDKCRQLWDELGALWVCVVLSPHCKPEERAGWLQLLSRWDKLDVCPLEEGNYSFDGPSLQPTMAPAPELLQKGSTCITNTEGWVGHPLDPIGCLCRALLEACRLEEETLTLYPDSGPEKRKVAYQHVPVPGSPGESYLVLALEVALLGLGQQRALPEGLYAQDKVVRNEEQLLALLEEVELDERLVQVLRKQAGLLLEGGPFSGFGEVLFRESVPMHTCARYLFTALLPHDPDLAYRLALRAMRLPILETAFPAGEPHPSPLDSIMSNRFPRWFILGHLETRQCELASTMLTAAKGDPKWLHTVLGSIQQNIHSPALLFKLAQDACKTATPVSAPPDTTLLGIALELGLQVMRMTLNVMTWRRREMVRWLVSCATEIGPQALMNIMQNWYSLFTPVEAATIVAVTGTTHATLLRLQLDTSRREELWACARTLALQCAMKDPQNCALPALTLCEKNHSAFEAAYQIVLDAAAGGLGHAHLFTVARYMEHRGLPLRAYKLATLALAQLSIAFNQDSHPAVNDVLWACSLSHSLGRHELSAIVPLIIRSIHCAPMLSDILRRWTLSAPGLGPLGARRAAKPLGADRAPLCQLLDAAVTAYITTSHSRLTHISPRHYGDFIEFLGKARETFLLAPDGHLQFSQFLENLKQTYKGKKKLMLLVRERFG

SEQ ID NO: 8223 - protein, 725 aa, Homo sapiens
MGPRASLSRLRELCGHWLRPALHTKKQILELLVLEQFLSVLPPHLLGRLQGQPLRDGEEVVLLLEGIHREPSHAGPLDFSCNAGKSCPRADVTLEEKGCASQVPSHSPKKELPAEEPSVLGPSDEPPRPQPRAAQPAEPGQWRLPPSSKQPLSPGPQKTFQALQESSPQGPSPWPEESSRDQELAAVLECLTFEDVPENKAWPAHPLGFGSRTPDKEEFKQEEPKGAAWPTPILAESQADSPGVPGEPCAQSLGRGAAASGPGEDGSLLGSSEILEVKVAEGVPEPNPELQFICADCGVSFPQLSRLKAHQLRSHPAGRSFLCLCCGKSFGRSSILKLHMRTHTDERPHACHLCGHRFRQSSHLSKHLLTHSSEPAFLCAECGRGFQRRASLVQHLLAHAQDQKPPCAPESKAEAPPLTDVLCSHCGQSFQRRSSLKRHLRIHARDKDRRSSEGSGSRRRDSDRRPFVCSDCGKAFRRSEHLVAHRRVHTGERPFSCQACGRSFTQSSQLVSHQRVHTGEKPYACPQCGKRFVRRASLARHLLTHGGPRPHHCTQCGKSFGQTQDLARHQRSHTGEKPCRCSECGEGFSQSAHLARHQRIHTGEKPHACDTCGHRFRNSSNLARHRRSHTGERPYSCQTCGRSFRRNAHLRRHLATHAEPGQEQAEPPQECVECGKSFSRSCNLLRHLLVHTGARPYSCTQCGRSFSRNSHLLRHLRTHARETLY

SEQ ID NO: 8224 - protein, 386 aa, Homo sapiens
MRTHTDERPHACHLCGHRFRQSSHLSKHLLTHSSEPAFLCAECGRGFQRRASLVQHLLAHAQDQKPPCAPESKAEAPPLTDVLCSHCGQSFQRRSSLKRHLRIHARDKDRRSSEGSGSRRRDSDRRPFVCSDCGKAFRRSEHLVAHRRVHTGERPFSCQACGRSFTQSSQLVSHQRVHTGEKPYACPQCGKRFVRRASLARHLLTHGGPRPHHCTQCGKSFGQTQDLARHQRSHTGEKPCRCSECGEGFSQSAHLARHQRIHTGEKPHACDTCGHRFRNSSNLARHRRSHTGERPYSCQTCGRSFRRNAHLRRHLATHAEPGQEQAEPPQECVECGKSFSRSCNLLRHLLVHTGARPYSCTQCGRSFSRNSHLLRHLRTHARETLY

SEQ ID NO: 8225 - protein, 643 aa, Homo sapiens
MLPVSGGHGATGVPEPAPGALRPLAAAGSAHQETDPGAAGAGAVPECAASAPPGPPAGAAAQGWGGGGAAARGHPPGAQPRGAAGPQGPSPWPEESSRDQELAAVLECLTFEDVPENKAWPAHPLGFGSRTPDKEEFKQEEPKGAAWPTPILAESQADSPGVPGEPCAQSLGRGAAASGPGEDGSLLGSSEILEVKVAEGVPEPNPELQFICADCGVSFPQLSRLKAHQLRSHPAGRSFLCLCCGKSFGRSSILKLHMRTHTDERPHACHLCGHRFRQSSHLSKHLLTHSSEPAFLCAECGRGFQRRASLVQHLLAHAQDQKPPCAPESKAEAPPLTDVLCSHCGQSFQRRSSLKRHLRIHARDKDRRSSEGSGSRRRDSDRRPFVCSDCGKAFRRSEHLVAHRRVHTGERPFSCQACGRSFTQSSQLVSHQRVHTGEKPYACPQCGKRFVRRASLARHLLTHGGPRPHHCTQCGKSFGQTQDLARHQRSHTGEKPCRCSECGEGFSQSAHLARHQRIHTGEKPHACDTCGHRFRNSSNLARHRRSHTGERPYSCQTCGRSFRRNAHLRRHLATHAEPGQEQAEPPQECVECGKSFSRSCNLLRHLLVHTGARPYSCTQCGRSFSRNSHLLRHLRTHARETLY

SEQ ID NO: 8226 - protein, 827 aa, Homo sapiens
MTKLSAQVKGSLNITTPGLQIWRIEAMQMVPVPSSTFGSFFDGDCYIILAIHKTASSLSYDIHYWIGQDSSLDEQGAAAIYTTQMDDFLKGRAVQHREVQGNESEAFRGYFKQGLVIRKGGVASGMKHVETNSYDVQRLLHVKGKRNVVAGEVEMSWKSFNRGDVFLLDLGKLIIQWNGPESTRMERLRGMTLAKEIRDQERGGRTYVGVVDGENELASPKLMEVMNHVLGKRRELKAAVPDTVVEPALKAALKLYHVSDSEGNLVVREVATRPLTQDLLSHEDCYILDQGGLKIYVWKGKKANEQEKKGAMSHALNFIKAKQYPPSTQVEVQNDGAESAVFQQLFQKWTASNRTSGLGKTHTVGSVAKVEQVKFDATSMHVKPQVAAQQKMVDDGSGEVQVWRIENLELVPVDSKWLGHFYGGDCYLLLYTYLIGEKQHYLLYVWQGSQASQDEITASAYQAVILDQKYNGEPVQIRVPMGKEPPHLMSIFKGRMVVYQGGTSRTNNLETGPSTRLFQVQGTGANNTKAFEVPARANFLNSNDVFVLKTQSCCYLWCGKGCSGDEREMAKMVADTISRTEKQVVVEGQEPANFWMALGGKAPYANTKRLQEENLVITPRLFECSNKTGRFLATEIPDFNQDDLEEDDVFLLDVWDQVFFWIGKHANEEEKKAAATTAQEYLKTHPSGRDPETPIIVVKQGHEPPTFTGWFLAWDPFKWSNTKSYEDLKAELGNSRDWSQITAEVTSPKVDVFNANSNLSSGPLPIFPLEQLVNKPVEELPEGVDPSRKEEHLSIEDFTQAFGMTPAAFSALPRWKQQNLKKEKGLF

SEQ ID NO: 8227 - protein, 421 aa, Homo sapiens
MTKLSAQVKGSLNITTPGLQIWRIEAMQMVPVPSSTFGSFFDGDCYIILAIHKTASSLSYDIHYWIGQDSSLDEQGAAAIYTTQMDDFLKGRAVQHREVQGNESEAFRGYFKQGLVIRKGGVASGMKHVETNSYDVQRLLHVKGKRNVVAGEVEMSWKSFNRGDVFLLDLGKLIIQWNGPESTRMERLRGMTLAKEIRDQERGGRTYVGVVDGENELASPKLMEVMNHVLGKRRELKAAVPDTVVEPALKAALKLYHVSDSEGNLVVREVATRPLTQDLLSHEDCYILDQGGLKIYVWKGKKANEQEKKGAMSHALNFIKAKQYPPSTQVEVQNDGAESAVFQQLFQKWTASNRTSGLGKTHTVGSVGEGQAGAVREPGSRSWARRATWSTTHPPSLTCIFNEDFYAGSGLVLADGDVDKL

SEQ ID NO: 8228 - protein, 585 aa, Homo sapiens
MSATSVDQRPKGQGNKVSVQNGSIHQKDAVNDDDFEPYLSSQTNQSNSYPPMSDPYMPSYYAPSIGFPYSLGEAAWSTAGDQPMPYLTTYGQMSNGEHHYIPDGVFSQPGALGNTPPFLGQHGFNFFPGNADFSTWGTSGSQGQSTQSSAYSSSYGYPPSSLGRAITDGQAGFGNDTLSKVPGISSIEQGMTGLKIGGDLTAAVTKTVGTALSSSGMTSIATNSVPPVSSAAPKPTSWAAIARKPAKPQPKLKPKGNVGIGGSAVPPPPIKHNMNIGTWDEKGSVVKAPPTQPVLPPQTIIQQPQPLIQPPPLVQSQLPQQQPQPPQPQQQQGPQPQAQPHQVQPQQQQLQNRWVAPRNRGAGFNQNNGAGSENFGLGVVPVSASPSSVEVHPVLEKLKAINNYNPKDFDWNLKNGRVFIIKSYSEDDIHRSIKYSIWCSTEHGNKRLDAAYRSLNGKGPLYLLFSVNGSGHFCGVAEMKSVVDYNAYAGVWSQDKWKGKFEVKWIFVKDVPNNQLRHIRLENNDNKPVTNSRDTQEVPLEKAKQVLKIIATFKHTTSIFDDFAHYEKRQEEEEAMRRERNRNKQ

SEQ ID NO: 8229 - protein, 519 aa, Homo sapiens
MARDLVMFRDVAVDFSQEEWECLNSYQRNLYRDVILENYSNLVSLAGCSISKPDVITLLEQGKEPWMVVRDEKRRWTLDLESRYDTKKLFQGKDIYEMNLSQWKVMERIKSCGLEEQESPHEVCFRQVTKTTSEKMPTYRKLTSLPLYQKSHNREKPYECGECGKAFRVRQQLTFHQRIHTGEKPYECKECGKAFRQCAHLSRHQRIHTSDKLYECKKCGKIFTCGSDLRVHQRIHIGEKPYECKECGKAFRVRGQLNLHQRIHTGEKPYECKECGKAFRQYAHLTRHQRLNIAEKCYECKECGQAFLCSTGLRLHHKLHTGEKPYECKECGKAFRVRQQLTLHQRIHTGEKPYDCKECGKTFSRGYHLTLHQRIHTGEKPYECKECQKFFRRYSELISHQGIHIGEKPYECKECGKAFRLFSQLTQHQSIHFGEKPFKCKECEKTFRLLSQLTQHQSIHTGEKPYDCKECGKAFRLHSSLIQHQRIHSGEKPYKCKECKKAFRQHSHLTYHQRIHNVT

SEQ ID NO: 8230 - protein, 694 aa, Homo sapiens
MENKSLESSQTDLKLVAHPRAKSKVWKYFGFDTNAEGCILQWKKIYCRICMAQIAYSGNTSNLSYHLEKNHPEEFCEFVKSNTEQMREAFATAFSKLKPESSQQPGQDALAVKAGHGYDSKKQQELTAAVLGLICEGLYPASIVDEPTFKVLLKTADPRYELPSRKYISTKAIPEKYGAVREVILKELAEATWCGISTDMWRSENQNRAYVTLAAHFLGLGAPNCLSMGSRCLKTFEVPEENTAETITRVLYEVFIEWGISAKVFGATTNYGKDIVKACSLLDVAVHMPCLGHTFNAGIQQAFQLPKLGALLSRCRKLVEYFQQSAVAMYMLYEKQKQQNVAHCMLVSNRVSWWGSTLAMLQRLKEQQFVIAGVLVEDSNNHHLMLEASEWATIEGLVELLQPFKQVAEMLSASRYPTISMVKPLLHMLLNTTLNIKETDSKELSMAKEVIAKELSKTYQETPEIDMFLNVATFLDPRYKRLPFLSAFERQQVENRVVEEAKGLLDKVKDGGYRPAEDKIFPVPEEPPVKKLMRTSTPPPASVINNMLAEIFCQTGGVEDQEEWHAQVVEELSNFKSQKVLGLNEDPLKWWSDRLALFPLLPKVLQKYWCVTATRVAPERLFGSAANVVSAKRNRLAPAHVDEQVFLYENARSGAEAEPEDQDEGEWGLDQEQVFSLGDGVSGGFFGIRDSSFL

SEQ ID NO: 8231 - protein, 400 aa, Homo sapiens
MTFEDVAVEFSQWEWGQLNPAQKDLYREVMLENFRNLAILGLLVSKPYVICQLEEGGEPFMVEREISTGAHSDWKRRSKSKESMPSWGISKEELFQVVSVEKHIQDVLQFSKLKAACGCDGQLEMQQIKQERHLKQMSTIHKSATTLSRDYKWNGFGRSLGLRSVLVNQHSILMGEGSYKCDTEFRQTLGGNNSQRTHPEKKSCKCNECGKSFHFQSELRRHQRCHTGEKPYECSDCGRAFGHISSLIKHQRTHTGEKPYECSECGRAFSQSSSLVLHYRFHTGEKPYKCNECGRAFGHTSSLIKHQRTHTGEKPYECRECGRTFSQSSSLIVHYRFHTGEKPYKCNKCGRAFSQSSSLTQHYRFHTGEKPYKCNECGRAFAHTASLIKHQRSHAGKKTL

SEQ ID NO: 8232 - protein, 673 aa, Homo sapiens
MDLTKMGMIQLQNPSHPTGLLCKANQMRLAGTLCDVVIMVDSQEFHAHRTVLACTSKMFEILFHRNSQHYTLDFLSPKTFQQILEYAYTATLQAKAEDLDDLLYAAEILEIEYLEEQCLKMLETIQASDDNDTEATMADGGAEEEEDRKARYLKNIFISKHSSEESGYASVAGQSLPGPMVDQSPSVSTSFGLSAMSPTKAAVDSLMTIGQSLLQGTLQPPAGPEEPTLAGGGRHPGVAEVKTEMMQVDEVPSQDSPGAAESSISGGMGDKVEERGKEGPGTPTRSSVITSARELHYGREESAEQVPPPAEAGQAPTGRPEHPAPPPEKHLGIYSVLPNHKADAVLSMPSSVTSGLHVQPALAVSMDFSTYGGLLPQGFIQRELFSKLGELAVGMKSESRTIGEQCSVCGVELPDNEAVEQHRKLHSGMKTYGCELCGKRFLDSLRLRMHLLAHSAGAKAFVCDQCGAQFSKEDALETHRQTHTGTDMAVFCLLCGKRFQAQSALQQHMEVHAGVRSYICSECNRTFPSHTALKRHLRSHTGDHPYECEFCGSCFRDESTLKSHKRIHTGEKPYECNGCGKKFSLKHQLETHYRVHTGEKPFECKLCHQRSRDYSAMIKHLRTHNGASPYQCTICTEYCPSLSSMQKHMKGHKPEEIPPDWRIEKTYLYLCYV

SEQ ID NO: 8233 - protein, 550 aa, Homo sapiens
MDLTKMGMIQLQNPSHPTGLLCKANQMRLAGTLCDVVIMVDSQEFHAHRTVLACTSKMFEILFHRNSQHYTLDFLSPKTFQQILEYAYTATLQAKAEDLDDLLYAAEILEIEYLEEQCLKMLETIQASDDNDTEATMADGGAEEEEDRKARYLKNIFISKHSSEESGYASVAGQSLPGPMVDQSPSVSTSFGLSAMSPTKAAVDSLMTIGQSLLQGTLQPPAGPEEPTLAGGGRHPGVAEVKTEMMQVDEVPSQGFIQRELFSKLGELAVGMKSESRTIGEQCSVCGVELPDNEAVEQHRKLHSGMKTYGCELCGKRFLDSLRLRMHLLAHSAGAKAFVCDQCGAQFSKEDALETHRQTHTGTDMAVFCLLCGKRFQAQSALQQHMEVHAGVRSYICSECNRTFPSHTALKRHLRSHTGDHPYECEFCGSCFRDESTLKSHKRIHTGEKPYECNGCGKKFSLKHQLETHYRVHTGEKPFECKLCHQRSRDYSAMIKHLRTHNGASPYQCTICTEYCPSLSSMQKHMKGHKPEEIPPDWRIEKTYLYLCYV

SEQ ID NO: 8234 - protein, 544 aa, Homo sapiens
MLNMQGAEERDIRRETCPGWVNKNKPALEQDVCKIDSSGIVVKRFQEDEYQDSTFEEKYACEGMKENSPREIAESCLFQEGGFGRITFIHKEAPPEIISQGYNFEKSLLLTSSLVTRLRVSTEESLHQWETSNIQTNDISDQSKCPTLCTQKKSWKCNECGKTFTQSSSLTQHQRTHTGERPYTCEECGKAFSRSSFLVQHQRIHTGVKPYGCEQCGKTFRCRSFLTQHQRIHTGEKPYKCNECGNSFRNHSHLTEHQRIHTGEKPYKCNRCGKAFNQNTHLIHHQRIHTGEKPYICSECGSSFRKHSNLTQHQRIHTGEKPHKCDECGKTFQTKANLSQHQRIHSGEKPYKCKECGKAFCQSPSLIKHQRIHTGEKPYKCKECGKAFTQSTPLTKHQRIHTGERPYKCSECGKAFIQSICLIRHQRSHTGEKPYKCNECGKGFNQNTCLTQHMRIHTGEKPYKCKECGKAFAHSSSLTEHHRTHTGEKLYKCSECEKTFRKYAHLSEHYRIHTGEKPYECIECGKFFRHSSVLFRHQKLHSGD

SEQ ID NO: 8235 - protein, 678 aa, Homo sapiens
MALPQGQLTFKDVAIEFSQEEWTCLDPAQKTLYRDVMLENYRNLVSLDISCKCVNTDLPPKGKNNMGEAFYTVKLERLESCDTVGLSFQEVQKNTYDFECQWKDDEGNYKTVLMLQKENLPGRRAQRDRRAAGNRHIENQLGVSFQSHLPELQQFQHEGKIYEYNQVEKSPNNRGKHYKCDECGKVFSQNSRLTSHKRIHTGEKPYQCNKCGKAFTVRSNLTIHQVIHTGEKPYKCNECGKVFSQPSNLAGHQRIHTGEKPYKCNECGKAFRAHSKLTTHQVIHTGEKPYKCKECGKCFTQNSHLASHRRIHTGEKPYKCNECGKAFSVRSSLTTHQTIHTGEKPYKCNECGKVFRHNSYLAKHRRIHTGEKPYKCNECGKAFSMHSNLTKHQIIHTGEKPFKCNECVKVFTQYSHLANHRRIHTGEKPYRCDECGKAFSVRSSLTTHQAIHTGEKPYKCNDCGKVFTQNSHLASHRGIHSGEKPYKCDECGKAFSQTSQLARHWRVHTGEKPYKCNECGKAFSVHSSLTIHQTIHTGQKPYKCNDCGKVFRHNSYLAIHQRIHTGEKPYKCNECGKAFSVHSNLATHQVIHTGEKPYKCNECGKVFTQNSHLANHRRIHTGEKPYRCNECGKAFSVRSTLTTHMAVHTGDKPYKCNQCGKVFTQNSNLAKHRRIHSG

SEQ ID NO: 8236 - protein, 561 aa, Homo sapiens
MMQGEAHPSASLIDRTIKMRKETEARKVVLAWGLLNVSMAGMIYTEMTGKLISSYYNVTYWPLWYIELALASLFSLNALFDFWRYFKYTVAPTSLVVSPGQQTLLGLKTAVVQTTPPHDLAATQIPPAPPSPSIQGQSVLSYSPSRSPSTSPKFTTSCMTGYSPQLQGLSSGGSGSYSPGVTYSPVSGYNKLASFSPSPPSPYPTTVGPVESSGLRSRYRSSPTVYNSPTDKEDYMTDLRTLDTFLRSEEEKQHRVKLGSPDSTSPSSSPTFWNYSRSMGDYAQTLKKFQYQLACRSQAPCANKDEADLSSKQAAEEVWARVAMNRQLLDHMDSWTAKFRNWINETILVPLVQEIESVSTQMRRMGCPELQIGEASITSLKQAALVKAPLIPTLNTIVQYLDLTPNQEYLFERIKELSQGGCMSSFRWNRGGDFKGRKWDTDLPTDSAIIMHVFCTYLDSRLPPHPKYPDGKTFTSQHFVQTPNKPDVTNENVFCIYQSAINPPHYELIYQRHVYNLPKGRNNMFHTLLMFLYIIKTKESGMLGRVNLGLSGVNILWIFGE

SEQ ID NO: 8237 - protein, 560 aa, Homo sapiens
MQGEAHPSASLIDRTIKMRKETEARKVVLAWGLLNVSMAGMIYTEMTGKLISSYYNVTYWPLWYIELALASLFSLNALFDFWRYFKYTVAPTSLVVSPGQQTLLGLKTAVVQTTPPHDLAATQIPPAPPSPSIQGQSVLSYSPSRSPSTSPKFTTSCMTGYSPQLQGLSSGGSGSYSPGVTYSPVSGYNKLASFSPSPPSPYPTTVGPVESSGLRSRYRSSPTVYNSPTDKEDYMTDLRTLDTFLRSEEEKQHRVKLGSPDSTSPSSSPTFWNYSRSMGDYAQTLKKFQYQLACRSQAPCANKDEADLSSKQAAEEVWARVAMNRQLLDHMDSWTAKFRNWINETILVPLVQEIESVSTQMRRMGCPELQIGEASITSLKQAALVKAPLIPTLNTIVQYLDLTPNQEYLFERIKELSQGGCMSSFRWNRGGDFKGRKWDTDLPTDSAIIMHVFCTYLDSRLPPHPKYPDGKTFTSQHFVQTPNKPDVTNENVFCIYQSAINPPHYELIYQRHVYNLPKGRNNMFHTLLMFLYIIKTKESGMLGRVNLGLSGVNILWIFGE

SEQ ID NO: 8238 - protein, 519 aa, Homo sapiens
MMQGEAHPSASLIDRTIKMRKETEARKVVLAWGLLNVSMAGMIYTEMTGKLISSYYNVTYWPLWYIELALASLFSLNALFDFWRYFKYTVAPTSLVVSPGQQTLLGLKTAVVQTTPPHDLAATQIPPAPPSPSIQGQSVLSYSPSRSPSTSPKFTTSCMTGYSPQLQGLSSGGSGSYSPGVTYSPVSGYNKLASFSPSPPSPYPTTVGPVESSGLRSRYRSSPTVYNSPTDKEDYMTDLRTLDTFLRSEEEKQHRVKLGSPDSTSPSSSPTFWNYSRSMGDYAQTLKKFQYQLACRSQAPCANKDEADLSSKQAAEEVWARVAMNRQLLDHMDSWTAKFRNWINETILVPLVQEIESVSTQMRRMGCPELQIGELSQGGCMSSFRWNRGGDFKGRKWDTDLPTDSAIIMHVFCTYLDSRLPPHPKYPDGKTFTSQHFVQTPNKPDVTNENVFCIYQSAINPPHYELIYQRHVYNLPKGRNNMFHTLLMFLYIIKTKESGMLGRVNLGLSGVNILWIFGE

SEQ ID NO: 8239 - protein, 203 aa, Homo sapiens
MMQGEAHPSASLIDRTIKMRKETEARKVVLAWGLLNVSMAGMIYTEMTGKLISSYYNVTYWPLWYIELALASLFSLNALFDFWRYFKYTVAPTSLVVSPGQQTLLGLKTAVVQTTPPHDLAATQIPPAPPSPSIQGQSVLSYSPSRSPSTSPKFTTSCMTGYSPQLQGLSSGGSGSYSPGVTYSPVSGYNKVMTLFSCLVTLF

SEQ ID NO: 8240 - protein, 293 aa, Homo sapiens
MSGLGRSRRGGRSRVDQEERFPQGLWTGVAMRSCPEEQYWDPLLGTCMSCKTICNHQSQRTCAAFCRSLSCRKEQGKFYDHLLRDCISCASICGQHPKQCAYFCENKLRSPVNLPPELRRQRSGEVENNSDNSGRYQGLEHRGSEASPALPGLKLSADQVALVYSTLGLCLCAVLCCFLVAVACFLKKRGDPCSCQPRSRPRQSPAKSSQDHAMEAGSPVSTSPEPVETCSFCFPECRAPTQESAVTPGTPDPTCAGRWGCHTRTTVLQPCPHIPDSGLGIVCVPAQEGGPGA

SEQ ID NO: 8241 - protein, 247 aa, Homo sapiens
MSGLGRSRRGGRSRVDQEERWSLSCRKEQGKFYDHLLRDCISCASICGQHPKQCAYFCENKLRSPVNLPPELRRQRSGEVENNSDNSGRYQGLEHRGSEASPALPGLKLSADQVALVYSTLGLCLCAVLCCFLVAVACFLKKRGDPCSCQPRSRPRQSPAKSSQDHAMEAGSPVSTSPEPVETCSFCFPECRAPTQESAVTPGTPDPTCAGRWGCHTRTTVLQPCPHIPDSGLGIVCVPAQEGGPGA

SEQ ID NO: 8242 - protein, 176 aa, Homo sapiens
MSGLGRSRRGGRSRVDQEERFPQGLWTGVAMRSCPEEQYWDPLLGTCMSCKTICNHQSQRTCAAFCRSLSCRKEQGKFYDHLLRDCISCASICGQHPKQCAYFCENKLRSPVNLPPELRRQRSGEVENNSDNSGRYQGLEHRGSEASPAPRGCPAPGTRKSFWDKENFQGEGFHLG

SEQ ID NO: 8243 - protein, 353 aa, Homo sapiens
MDYKSSLIQDGNPMENLEKQLICPICLEMFTKPVVILPCQHNLCRKCANDIFQAANPYWTSRGSSVSMSGGRFRCPTCRHEVIMDRHGVYGLQRNLLVENIIDIYKQECSSRPLQKGSHPMCKEHEDEKINIYCLTCEVPTCSMCKVFGIHKACEVAPLQSVFQGQKTELNNCISMLVAGNDRVQTIITQLEDSRRVTKENSHQVKEELSQKFDTLYAILDEKKSELLQRITQEQEKKLSFIEALIQQYQEQLDKSTKLVETAIQSLDEPGGATFLLTAKQLIKSIVEASKGCQLGKTEQGFENMDFFTLDLEHIADALRAIDFGTDEEEEEFIEEEDQEEEESTEGKEEGHQ

SEQ ID NO: 8244 - protein, 325 aa, Homo sapiens
MDYKSSLIQDGNPMENLEKQLICPICLEMFTKPVVILPCQHNLCRKCANDIFQAANPYWTSRGSSVSMSGGRFRCPTCRHEVIMDRHGVYGLQRNLLVENIIDIYCLTCEVPTCSMCKVFGIHKACEVAPLQSVFQGQKTELNNCISMLVAGNDRVQTIITQLEDSRRVTKENSHQVKEELSQKFDTLYAILDEKKSELLQRITQEQEKKLSFIEALIQQYQEQLDKSTKLVETAIQSLDEPGGATFLLTAKQLIKSIVEASKGCQLGKTEQGFENMDFFTLDLEHIADALRAIDFGTDEEEEEFIEEEDQEEEESTEGKEEGHQ

SEQ ID NO: 8245 - protein, 278 aa, Homo sapiens
MSDTEEQEYEEEQPEEEAAEEEEEAPEEPEPVAEPEEERPKPSRPVVPPLIPPKIPEGERVDFDDIHRKRMEKDLLELQTLIDVHFEQRKKEEEELVALKERIERRRSERAEQQRFRTEKERERQAKLAEEKMRKEEEEAKKRAEDDAKKKKVLSNMGAHFGGYLVKAEQKRGKRQTGREMKVRILSERKKPLDIDYMGEEQLRARSAWLPPSQPSCPAREKAQELSDWIHQLESEKFDLMAKLKQQKYEINVLYNRISHAQKFRKGAGKGRVGGRWK

SEQ ID NO: 8246 - protein, 251 aa, Homo sapiens
MSDTEEQEYEEEQPEEEAAEEEEEEEERPKPSRPVVPPLIPPKIPEGERVDFDDIHRKRMEKDLLELQTLIDVHFEQRKKEEEELVALKERIERRRSERAEQQRFRTEKERERQAKLAEEKMRKEEEEAKKRAEDDAKKKKVLSNMGAHFGGYLVKAEQKRGKRQTGREMKVRILSERKKPLDIDYMGEEQLREKAQELSDWIHQLESEKFDLMAKLKQQKYEINVLYNRISHAQKFRKGAGKGRVGGRWK

SEQ ID NO: 8247 - protein, 262 aa, Homo sapiens
MSDTEEQEYEEEQPEEEAAEEEEEAPEEPEPVAEPEEERPKPSRPVVPPLIPPKIPEGERVDFDDIHRKRMEKDLLELQTLIDVHFEQRKKEEEELVALKERIERRRSERAEQQRFRTEKERERQAKLAEEKMRKEEEEAKKRAEDDAKKKKVLSNMGAHFGGYLVKAEQKRGKRQTGREMKVRILSERKKPLDIDYMGEEQLREKAQELSDWIHQLESEKFDLMAKLKQQKYEINVLYNRISHAQKFRKGAGKGRVGGRWK

SEQ ID NO: 8248 - protein, 160 aa, Homo sapiens
MAPALWRACNGLMAAFFALAALVQVNDPDAEVWVVVYTIPAVLTLLVGLNPEVTGNVIWKSISAIHILFCTVWAVGLASYLLHRTQQNILHEEEGRELSGLVIITAWIILCHSSSKNPVGGRIQLAIAIVITLFPFISWVYIYINKEMRSSWPTHCKTVI

SEQ ID NO: 8249 - protein, 150 aa, Homo sapiens
MAPALWRACNGLMAAFFALAALVQVVYTIPAVLTLLVGLNPEVTGNVIWKSISAIHILFCTVWAVGLASYLLHRTQQNILHEEEGRELSGLVIITAWIILCHSSSKNPVGGRIQLAIAIVITLFPFISWVYIYINKEMRSSWPTHCKTVI

SEQ ID NO: 8250 - protein, 272 aa, Homo sapiens
MMIHGFQSSHRDFCFGPWKLTASKTHIMKSADVEKLADELHMPSLPEMMFGDNVLRIQHGSGFGIEFNATDALRCVNNYQGMLKVACAEEWQESRTEGEHSKEVIKPYDWTYTTDYKGTLLGESLKLKVVPTTDHIDTEKLKAREQIKFFEEVLLFEDELHDHGVSSLSVKIRVMPSSFFLLLRFFLRIDGVLIRMNDTRLYHEADKTYMLREYTSRESKISSLMHVPPSLFTEPNEISQYLPIKEAVCEKLIFPERIDPNPADSQKSTQVE

SEQ ID NO: 8251 - protein, 178 aa, Homo sapiens
MMIHGFQSSHRDFCFGPWKLTASKTHIMKSADVEKLADELHMPSLPEMMFGDNVLRIQHGSGFGIEFNATDALRCVNNYQGMLKVACAEEWQESRTEGEHSKEVIKPYDWTYTTDYKGTLLGESLKLKVVPTTDHIDTEKLKAREQIKFFEEVLLFEDELHDHGVSSLSVKIPGGGHL

SEQ ID NO: 8252 - protein, 317 aa, Homo sapiens
MRRASRDYTKYLRGSEEMGGGPGAPHEGPLHAPPPPAPHQPPAASRSMFVALLGLGLGQVVCSVALFFYFRAQMDPNRISEDGTHCIYRILRLHENADFQDTTLESQDTKLIPDSCRRIKQAFQGAVQKELQHIVGSQHIRAEKAMVDGSWLDLAKRSKLEAQPFAHLTINATDIPSGSHKVSLSSWYHDRGWAKISNMTFSNGKLIVNQDGFYYLYANICFRHHETSGDLATEYLQLMVYVTKTSIKIPSSHTLMKGGSTKYWSGNSEFHFYSINVGGFFKLRSGEEISIEVSNPSLLDPDQDATYFGAFKVRDID

SEQ ID NO: 8253 - protein, 244 aa, Homo sapiens
MDPNRISEDGTHCIYRILRLHENADFQDTTLESQDTKLIPDSCRRIKQAFQGAVQKELQHIVGSQHIRAEKAMVDGSWLDLAKRSKLEAQPFAHLTINATDIPSGSHKVSLSSWYHDRGWAKISNMTFSNGKLIVNQDGFYYLYANICFRHHETSGDLATEYLQLMVYVTKTSIKIPSSHTLMKGGSTKYWSGNSEFHFYSINVGGFFKLRSGEEISIEVSNPSLLDPDQDATYFGAFKVRDID

SEQ ID NO: 8254 - protein, 270 aa, Homo sapiens
MFVALLGLGLGQVVCSVALFFYFRAQMDPNRISEDGTHCIYRILRLHENADFQDTTLESQDTKLIPDSCRRIKQAFQGAVQKELQHIVGSQHIRAEKAMVDGSWLDLAKRSKLEAQPFAHLTINATDIPSGSHKVSLSSWYHDRGWAKISNMTFSNGKLIVNQDGFYYLYANICFRHHETSGDLATEYLQLMVYVTKTSIKIPSSHTLMKGGSTKYWSGNSEFHFYSINVGGFFKLRSGEEISIEVSNPSLLDPDQDATYFGAFKVRDID

SEQ ID NO: 8255 - protein, 638 aa, Homo sapiens
MDGSGPFSCPICLEPLREPVTLPCGHNFCLACLGALWPHRGASGAGGPGGAARCPLCQEPFPDGLQLRKNHTLSELLQLRQGSGPGSGPGPAPALAPEPSAPSALPSVPEPSAPCAPEPWPAGEEPVRCDACPEGAALPAALSCLSCLASFCPAHLGPHERSPALRGHRLVPPLRRLEESLCPRHLRPLERYCRAERVCLCEACAAQEHRGHELVPLEQERALQEAEQSKVLSAVEDRMDELGAGIAQSRRTVALIKSAAVAERERVSRLFADAAAALQGFQTQVLGFIEEGEAAMLGRSQGDLRRQEEQRSRLSRARQNLSQVPEADSVSFLQELLALRLALEDGCGPGPGPPRELSFTKSSQAVRAVRDMLAVACVNQWEQLRGPGGNEDGPQKLDSEADAEPQDLESTNLLESEAPRDYFLKFAYIVDLDSDTADKFLQLFGTKGVKRVLCPINYPLSPTRFTHCEQVLGEGALDRGTYYWEVEIIEGWVSMGVMAEDFSPQEPYDRGRLGRNAHSCCLQWNGRSFSVWFHGLEAPLPHPFSPTVGVCLEYADRALAFYAVRDGKMSLLRRLKASRPRRGGIPASPIDPFQSRLDSHFAGLFTHRLKPAFFLESVDAHLQIGPLKKSCISVLKRR

SEQ ID NO: 8256 - protein, 400 aa, Homo sapiens
MDELGAGIAQSRRTVALIKSAAVAERERVSRLFADAAAALQGFQTQVLGFIEEGEAAMLGRSQGDLRRQEEQRSRLSRARQNLSQVPEADSVSFLQELLALRLALEDGCGPGPGPPRELSFTKSSQAVRAVRDMLAVACVNQWEQLRGPGGNEDGPQKLDSEADAEPQDLESTNLLESEAPRDYFLKFAYIVDLDSDTADKFLQLFGTKGVKRVLCPINYPLSPTRFTHCEQVLGEGALDRGTYYWEVEIIEGWVSMGVMAEDFSPQEPYDRGRLGRNAHSCCLQWNGRSFSVWFHGLEAPLPHPFSPTVGVCLEYADRALAFYAVRDGKMSLLRRLKASRPRRGGIPASPIDPFQSRLDSHFAGLFTHRLKPAFFLESVDAHLQIGPLKKSCISVLKRR

SEQ ID NO: 8257 - protein, 446 aa, Homo sapiens
MDSDFSHAFQKELTCVICLNYLVDPVTICCGHSFCRPCLCLSWEEAQSPANCPACREPSPKMDFKTNILLKNLVTIARKASLWQFLSSEKQICGTHRQTKKMFCDMDKSLLCLLCSNSQEHGAHKHYPIEEAAEEDREKLLKQMRILWKKIQENQRNLYEERRTAFLLRGDVVLRAQMIRNEYRKLHPVLHKEEKQHLERLNKEYQEIFQQLQRSWVKMDQKSKHLKEMYQELMEMCHKPEVELLQDLGDIVARSESVLLHMPQPVNPELTAGPITGLVYRLNRFRVEISFHFEVTNHNIRLFEDVRSWMFRRGPLNSDRSDYFAAWGARVFSFGKHYWELDVDNSCDWALGVCNNSWIRKNSTMVNSEDIFLLLCLKVDNHFNLLTTSPVFPHYIEKPLGRVGVFLDFESGSVSFLNVTKSSLIWSYPAGSLTFPVRPFFYTGHR

SEQ ID NO: 8258 - protein, 95 aa, Homo sapiens
MEGGFGSDFGGSGSGKLDPGLIMEQVKVQIAVANAQELLQRMTDKCFRKCIGKPGGSLDNSEQKCIAMCMDRYMDAWNTVSRAYNSRLQRERANM

SEQ ID NO: 8259 - protein, 122 aa, Homo sapiens
MLSLLHTSTLAVLGALCVYGAGHLEQPQISSTKTLSKTARLECVVSGITISATSVYWYRERPGEVIQFLVSISYDGTVRKESGIPSGKFEVDRIPETSTSTLTIHNVEKQDIATYYCALWEV

SEQ ID NO: 8260 - protein, 873 aa, Homo sapiens
MTDSDEDALKVDQGPSRDIPKPWVIPAPKGILQHIFGTSHVFQSICDVKPKVTGLTVPLKVREYYSRGQQCLEQADWETAVLLFSRALHLDPQLVDFYALRAEAYLQLCDFSSAAQNLRRAYSLQQDNCKHLERLTFVLYLQGQCLFEQCAFLDALNVFSHAAELQPEKPCFRYRCMACLLALKQHQACLTLITNELKQDTTNADVYIFRARLYNFLQKPHLCYRDLHSALLLNPKHPQARMLLQKMVAQAQQARQDAGILAVQGKLQHALQRINRAIENNPLDPSLFLFRGTMYRRLQEFDGAVEDFLKVLDMVTEDQEDMVRQAQRQLLLTYNDFAVHCYRQGAYQEGVLLLNKALRDEQQEKGLYINRGDCFFQLGNLAFAEADYQQALALSPQDEGANTRMGLLQEKMGFCEQRRKQFQKAENHFSTAIRHNPQKAQYYLYRAKSRQLLQNIFGARQDVATVLLLNPKQPKLSLLMTNLFPGMSVEEVLSTQIAHLARLQLEQMVEGSLQAGSPQGIVGMLKRHELERQKALALQHSWKQGEPLIATSEELKATPEIPQVKPGSSEGEAEAPEEEEEKEKEKKEEKKSELIPSKVASLSDSYLDQTSSASSMSFRTTGTSETEMSAICQEYRSTSATAVTFSDSSLLKTQSSDSGNNREALSHGPRKIKATQGQRQSLSKTEPTQSQRRNSSKTKATIHKRNSSKTKATQSQRRNSSKTRATQGQGQSSSKTEATQGQRQSSSEIEATQGPRQEPSKTKTTRSPRQRPRKVKAARGRSWRPSKVDATQGRSRGLLRSSTKTEAFYDSNWSLSKTEYAQGQGQRSSKAEGAQGKSQGMSSTSSKAESTWGPSPSLSKTEVDQDLTYYEAV

SEQ ID NO: 8261 - protein, 241 aa, Homo sapiens
MACLLALKQHQACLTLITNELKQDTTNADVYIFRARLYNFLQKPHLCYRDLHSALLLNPKHPQARMLLQKMVAQAQQARQDAGILAVQGKLQHALQRINRAIENNPLDPSLFLFRGTMYRRLQEFDGAVEDFLKVLDMVTEDQEDMVRQAQRQLLLTYNDFAVHCYRQGAYQEGVLLLNKALRDEQQEKGLYINRGGAQRPGHWGGGVRGSLAISKAPTGHLRPLGGRRKGERKEAREEEM

SEQ ID NO: 8262 - protein, 355 aa, Homo sapiens
MEEGERSPLLSQETAGQKPLSVHRPPTSGCLGPVPREDQAEAWGCSCCPPETKHQALSGTPKKGPAPSLSPGSSCVKYLIFLSNFPFSLLGLLALAIGLWGLAVKGSLGSDLGGPLPTDPMLGLALGGLVVSAASLAGCLGALCENTCLLRGFSGGILAFLVLEAVAGALVVALWGPLQDSLEHTLRVAIAHYQDDPDLRFLLDQVQLGLRCCGAASYQDWQQNLYFNCSSPGVQACSLPASCCIDPREDGASVNDQCGFGVLRLDADAAQRVVYLEGCGPPLRRWLRANLAASGGYAIAVVLLQGAELLLAARLLGALAARSGAAYGPGAHGEDRAGPQSPSPGAPPAAKPARG

SEQ ID NO: 8263 - protein, 682 aa, Homo sapiens
MDAVLACRLRGRGNRVAALRPRPRPGGSAGPSPFALLCAGLSPEPRAGVGSEFPAWFLGGSSQRRNMALLGSRAELEADEDVFEDALETISISSHSDMATSSLHFASCDTQQAPRQRGASTVSSSSSTKVDLKSGLEECAVALNLFLSNKFTDALELLRPWAKESMYHALGYSTIVVLQAVLTFEQQDIQNGISAMKDALQTCQKYRKKYTVVESFSSLLSRGSLEQLSEEEMHAEICYAECLLQKAALTFVQDENMINFIKGGLKIRTSYQIYKECLSILHEIQKNKLQQEFFYEFEGGVKLGSGAFNLMLSLLPARIIRLLEFIGFSGNRELGLLQLREGASGRSMRSALCCLTILAFHTYISLILGTGEVNVAEAERLLAPFLQQFPNGSLVLFYHARIELLKGNLEEAQEVFQKCISVQEEWKQFHHLCYWELMWINVFQQNWMQAYYYSDLLCKESKWSKATYVFLKAAILSMLPEEDVVATNENVVTLFRQVDSLKQRIAGKSIPTEKFAVRKARRYSASLPAPVKLILPALEMMYVWNGFSIVSKRKDLSENLLVTVEKAEAALQSQNFNSFSVDDECLVKLLKGCCLKNLQRPLQAELCYNHVVESEKLLKYDHYLVPFTLFELASLYKSQGEIDKAIKFLETARNNYKDYSLESRLHFRIQAALHLWRKPSSD

SEQ ID NO: 8264 - protein, 585 aa, Homo sapiens
MATSSLHFASCDTQQAPRQRGASTVSSSSSTKVDLKSGLEECAVALNLFLSNKFTDALELLRPWAKESMYHALGYSTIVVLQAVLTFEQQDIQNGISAMKDALQTCQKYRKKYTVVESFSSLLSRGSLEQLSEEEMHAEICYAECLLQKAALTFVQDENMINFIKGGLKIRTSYQIYKECLSILHEIQKNKLQQEFFYEFEGGVKLGSGAFNLMLSLLPARIIRLLEFIGFSGNRELGLLQLREGASGRSMRSALCCLTILAFHTYISLILGTGEVNVAEAERLLAPFLQQFPNGSLVLFYHARIELLKGNLEEAQEVFQKCISVQEEWKQFHHLCYWELMWINVFQQNWMQAYYYSDLLCKESKWSKATYVFLKAAILSMLPEEDVVATNENVVTLFRQVDSLKQRIAGKSIPTEKFAVRKARRYSASLPAPVKLILPALEMMYVWNGFSIVSKRKDLSENLLVTVEKAEAALQSQNFNSFSVDDECLVKLLKGCCLKNLQRPLQAELCYNHVVESEKLLKYDHYLVPFTLFELASLYKSQGEIDKAIKFLETARNNYKDYSLESRLHFRIQAALHLWRKPSSD

SEQ ID NO: 8265 - protein, 669 aa, Homo sapiens
MDAVLACRLRGRGNRVAALRPRPRPGGSAGPSPFALLCAGLSPEPRAGVGSEFPAWFLGGSSQRRNMALLGSRAELEADEDVFEDALETISISSHSDMATSSLHFASCDTQQAPRQRGASTVSSSSSTKVDLKSGLEECAVALNLFLSNKFTDALELLRPWAKESMYHALGYSTIVVLQAVLTFEQQDIQNGISAMKDALQTCQKYRKKYTVVESFSSLLSRGSLEQLSEEEMHAEICYAECLLQKAALTFVQDENMINFIKGGLKIRTSYQIYKECLSILHEIQKNKLQQEFFYEFEGGVKLGSGAFNLMLSLLPARIIRLLEFIGFSGNRELGLLQLREGASGRSMRSALCCLTILAFHTYISLILGTGEVNVAEAERLLAPFLQQFPNVRSVFQSAQEVFQKCISVQEEWKQFHHLCYWELMWINVFQQNWMQAYYYSDLLCKESKWSKATYVFLKAAILSMLPEEDVVATNENVVTLFRQVDSLKQRIAGKSIPTEKFAVRKARRYSASLPAPVKLILPALEMMYVWNGFSIVSKRKDLSENLLVTVEKAEAALQSQNFNSFSVDDECLVKLLKGCCLKNLQRPLQAELCYNHVVESEKLLKYDHYLVPFTLFELASLYKSQGEIDKAIKFLETARNNYKDYSLESRLHFRIQAALHLWRKPSSD

SEQ ID NO: 8266 - protein, 680 aa, Homo sapiens
MDAVLACRLRGRGNRVAALRPRPRPGGSAGPSPFALLCAGLSPEPRAGVGSEFPAWFLGGSSQRRNMALLGSRAELEADEDVFEDALETISISSHSDMATSSLHFASCDTQQAPRQRGASTVSSSSSTKVDLKSGLEECAVALNLFLSNKFTDALELLRPWAKESMYHALGYSTIVVLQAVLTFEQQDIQNGISAMKDALQTCQKKKYTVVESFSSLLSRGSLEQLSEEEMHAEICYAECLLQKAALTFVQDENMINFIKGGLKIRTSYQIYKECLSILHEIQKNKLQQEFFYEFEGGVKLGSGAFNLMLSLLPARIIRLLEFIGFSGNRELGLLQLREGASGRSMRSALCCLTILAFHTYISLILGTGEVNVAEAERLLAPFLQQFPNGSLVLFYHARIELLKGNLEEAQEVFQKCISVQEEWKQFHHLCYWELMWINVFQQNWMQAYYYSDLLCKESKWSKATYVFLKAAILSMLPEEDVVATNENVVTLFRQVDSLKQRIAGKSIPTEKFAVRKARRYSASLPAPVKLILPALEMMYVWNGFSIVSKRKDLSENLLVTVEKAEAALQSQNFNSFSVDDECLVKLLKGCCLKNLQRPLQAELCYNHVVESEKLLKYDHYLVPFTLFELASLYKSQGEIDKAIKFLETARNNYKDYSLESRLHFRIQAALHLWRKPSSD

SEQ ID NO: 8267 - protein, 517 aa, Homo sapiens
MYHALGYSTIVVLQAVLTFEQQDIQNGISAMKDALQTCQKYRKKYTVVESFSSLLSRGSLEQLSEEEMHAEICYAECLLQKAALTFVQDENMINFIKGGLKIRTSYQIYKECLSILHEIQKNKLQQEFFYEFEGGVKLGSGAFNLMLSLLPARIIRLLEFIGFSGNRELGLLQLREGASGRSMRSALCCLTILAFHTYISLILGTGEVNVAEAERLLAPFLQQFPNGSLVLFYHARIELLKGNLEEAQEVFQKCISVQEEWKQFHHLCYWELMWINVFQQNWMQAYYYSDLLCKESKWSKATYVFLKAAILSMLPEEDVVATNENVVTLFRQVDSLKQRIAGKSIPTEKFAVRKARRYSASLPAPVKLILPALEMMYVWNGFSIVSKRKDLSENLLVTVEKAEAALQSQNFNSFSVDDECLVKLLKGCCLKNLQRPLQAELCYNHVVESEKLLKYDHYLVPFTLFELASLYKSQGEIDKAIKFLETARNNYKDYSLESRLHFRIQAALHLWRKPSSD

SEQ ID NO: 8268 - protein, 613 aa, Homo sapiens
MDAVLACRLRGRGNRVAALRPRPRPGGSAGPSPFALLCAGLSPEPRAGVGSEFPAWFLGGSSQRRNMALLGSRAELEADEDVFEDALETISMAKESMYHALGYSTIVVLQAVLTFEQQDIQNGISAMKDALQTCQKYRKKYTVVESFSSLLSRGSLEQLSEEEMHAEICYAECLLQKAALTFVQDENMINFIKGGLKIRTSYQIYKECLSILHEIQKNKLQQEFFYEFEGGVKLGSGAFNLMLSLLPARIIRLLEFIGFSGNRELGLLQLREGASGRSMRSALCCLTILAFHTYISLILGTGEVNVAEAERLLAPFLQQFPNGSLVLFYHARIELLKGNLEEAQEVFQKCISVQEEWKQFHHLCYWELMWINVFQQNWMQAYYYSDLLCKESKWSKATYVFLKAAILSMLPEEDVVATNENVVTLFRQVDSLKQRIAGKSIPTEKFAVRKARRYSASLPAPVKLILPALEMMYVWNGFSIVSKRKDLSENLLVTVEKAEAALQSQNFNSFSVDDECLVKLLKGCCLKNLQRPLQAELCYNHVVESEKLLKYDHYLVPFTLFELASLYKSQGEIDKAIKFLETARNNYKDYSLESRLHFRIQAALHLWRKPSSD

SEQ ID NO: 8269 - protein, 199 aa, Homo sapiens
MTFLWGWAGVLHRQVDSLKQRIAGKSIPTEKFAVRKARRYSASLPAPVKLILPALEMMYVWNGFSIVSKRKDLSENLLVTVEKAEAALQSQNFNSFSVDDECLVKLLKGCCLKNLQRPLQAELCYNHVVESEKLLKYDHYLVPFTLFELASLYKSQGEIDKAIKFLETARNNYKDYSLESRLHFRIQAALHLWRKPSSD

SEQ ID NO: 8270 - protein, 793 aa, Homo sapiens
MWIQVRTMDGRQTHTVDSLSRLTKVEELRRKIQELFHVEPGLQRLFYRGKQMEDGHTLFDYEVRLNDTIQLLVRQSLVLPHSTKERDSELSDTDSGCCLGQSESDKSSTHGEAAAETDSRPADEDMWDETELGLYKVNEYVDARDTNMGAWFEAQVVRVTRKAPSRDEPCSSTSRPALEEDVIYHVKYDDYPENGVVQMNSRDVRARARTIIKWQDLEVGQVVMLNYNPDNPKERGFWYDAEISRKRETRTARELYANVVLGDDSLNDCRIIFVDEVFKIERPGEGSPMVDNPMRRKSGPSCKHCKDDVNRLCRVCACHLCGGRQDPDKQLMCDECDMAFHIYCLDPPLSSVPSEDEWYCPECRNDASEVVLAGERLRESKKKAKMASATSSSQRDWGKGMACVGRTKECTIVPSNHYGPIPGIPVGTMWRFRVQVSESGVHRPHVAGIHGRSNDGAYSLVLAGGYEDDVDHGNFFTYTGSGGRDLSGNKRTAEQSCDQKLTNTNRALALNCFAPINDQEGAEAKDWRSGKPVRVVRNVKGGKNSKYAPAEGNRYDGIYKVVKYWPEKGKSGFLVWRYLLRRDDDEPGPWTKEGKDRIKKLGLTMQYPEGYLEALANREREKENSKREEEEQQEGGFASPRTGKGKWKRKSAGGGPSRAGSPRRTSKKTKVEPYSLTAQQSSLIREDKSNAKLWNEVLASLKDRPASGSPFQLFLSKVEETFQCICCQELVFRPITTVCQHNVCKDCLDRSFRAQVFSCPACRYDLGRSYAMQVNQPLQTVLNQLFPGYGNGR

SEQ ID NO: 8271 - protein, 806 aa, Homo sapiens
MGVFAVPPLSSDTMWIQVRTMDGRQTHTVDSLSRLTKVEELRRKIQELFHVEPGLQRLFYRGKQMEDGHTLFDYEVRLNDTIQLLVRQSLVLPHSTKERDSELSDTDSGCCLGQSESDKSSTHGEAAAETDSRPADEDMWDETELGLYKVNEYVDARDTNMGAWFEAQVVRVTRKAPSRDEPCSSTSRPALEEDVIYHVKYDDYPENGVVQMNSRDVRARARTIIKWQDLEVGQVVMLNYNPDNPKERGFWYDAEISRKRETRTARELYANVVLGDDSLNDCRIIFVDEVFKIERPGEGSPMVDNPMRRKSGPSCKHCKDDVNRLCRVCACHLCGGRQDPDKQLMCDECDMAFHIYCLDPPLSSVPSEDEWYCPECRNDASEVVLAGERLRESKKKAKMASATSSSQRDWGKGMACVGRTKECTIVPSNHYGPIPGIPVGTMWRFRVQVSESGVHRPHVAGIHGRSNDGAYSLVLAGGYEDDVDHGNFFTYTGSGGRDLSGNKRTAEQSCDQKLTNTNRALALNCFAPINDQEGAEAKDWRSGKPVRVVRNVKGGKNSKYAPAEGNRYDGIYKVVKYWPEKGKSGFLVWRYLLRRDDDEPGPWTKEGKDRIKKLGLTMQYPEGYLEALANREREKENSKREEEEQQEGGFASPRTGKGKWKRKSAGGGPSRAGSPRRTSKKTKVEPYSLTAQQSSLIREDKSNAKLWNEVLASLKDRPASGSPFQLFLSKVEETFQCICCQELVFRPITTVCQHNVCKDCLDRSFRAQVFSCPACRYDLGRSYAMQVNQPLQTVLNQLFPGYGNGR

SEQ ID NO: 8272 - protein, 366 aa, Homo sapiens
MTVRNIASICNMGTNASALEKDIGPEQFPINEHYFGLVNFGNTCYCNSVLQALYFCRPFRENVLAYKAQQKKKENLLTCLADLFHSIATQKKKVGVIPPKKFISRLRKENDLFDNYMQQDAHEFLNYLLNTIADILQEEKKQEKQNGKLKNGNMNEPAENNKPELTWVHEIFQGTLTNETRCLNCETVSSKDEDFLDLSVDVEQNTSITHCLRDFSNTETLCSEQKYYCETCCSKQEAQKRMRVKKLPMILALHLKRFKYMEQLHRYTKLSYRVVFPLELRLFNTSSDAVNLDRMYDLVAVVVHCGSGPNRGHYITIVKSHGFWLLFDDDIVEKIDAQAIEEFYGLTSDISKNSESGYILFYQSRE

SEQ ID NO: 8273 - protein, 225 aa, Homo sapiens
MQQDAHEFLNYLLNTIADILQEEKKQEKQNGKLKNGNMNEPAENNKPELTWVHEIFQGTLTNETRCLNCETVSSKDEDFLDLSVDVEQNTSITHCLRDFSNTETLCSEQKYYCETCCSKQEAQKRMRVKKLPMILALHLKRFKYMEQLHRYTKLSYRVVFPLELRLFNTSSDAVNLDRMYDLVAVVVHCGSGPNRGHYITIVKSHGFWLLFDDDIVEVGLQIILQ

SEQ ID NO: 8274 - protein, 359 aa, Homo sapiens
MNCFQGTNASALEKDIGPEQFPINEHYFGLVNFGNTCYCNSVLQALYFCRPFRENVLAYKAQQKKKENLLTCLADLFHSIATQKKKVGVIPPKKFISRLRKENDLFDNYMQQDAHEFLNYLLNTIADILQEEKKQEKQNGKLKNGNMNEPAENNKPELTWVHEIFQGTLTNETRCLNCETVSSKDEDFLDLSVDVEQNTSITHCLRDFSNTETLCSEQKYYCETCCSKQEAQKRMRVKKLPMILALHLKRFKYMEQLHRYTKLSYRVVFPLELRLFNTSSDAVNLDRMYDLVAVVVHCGSGPNRGHYITIVKSHGFWLLFDDDIVEKIDAQAIEEFYGLTSDISKNSESGYILFYQSRE

SEQ ID NO: 8275 - protein, 354 aa, Homo sapiens
MTVRNIASICNMGTNASALEKDIGPEQFPINEHYFGLVNALYFCRPFRENVLAYKAQQKKKENLLTCLADLFHSIATQKKKVGVIPPKKFISRLRKENDLFDNYMQQDAHEFLNYLLNTIADILQEEKKQEKQNGKLKNGNMNEPAENNKPELTWVHEIFQGTLTNETRCLNCETVSSKDEDFLDLSVDVEQNTSITHCLRDFSNTETLCSEQKYYCETCCSKQEAQKRMRVKKLPMILALHLKRFKYMEQLHRYTKLSYRVVFPLELRLFNTSSDAVNLDRMYDLVAVVVHCGSGPNRGHYITIVKSHGFWLLFDDDIVEKIDAQAIEEFYGLTSDISKNSESGYILFYQSRE

SEQ ID NO: 8276 - protein, 193 aa, Homo sapiens
MSDDDSRASTSSSSSSSSNQQTEKETNTPKKKESKVSMSKNSKLLSTSAKRIQKELADITLDPPPNCSAGPKGDNIYEWRSTILGPPGSVYEGGVFFLDITFTPEYPFKPPKVTFRTRIYHCNINSQGVICLDILKDNWSPALTISKVLLSICSLLTDCNPADPLVGSIATQYMTNRAEHDRMARQWTKRYAT

SEQ ID NO: 8277 - protein, 160 aa, Homo sapiens
MKEVGRPREVRGRPGKSRIQKELADITLDPPPNCSAGPKGDNIYEWRSTILGPPGSVYEGGVFFLDITFTPEYPFKPPKVTFRTRIYHCNINSQGVICLDILKDNWSPALTISKVLLSICSLLTDCNPADPLVGSIATQYMTNRAEHDRMARQWTKRYAT

SEQ ID NO: 8278 - protein, 176 aa, Homo sapiens
MSDDDSRASTSSSSSSSSNQQTEKETNTPKKKESKVSMSKNSKLLSTSAKSAGPKGDNIYEWRSTILGPPGSVYEGGVFFLDITFTPEYPFKPPKVTFRTRIYHCNINSQGVICLDILKDNWSPALTISKVLLSICSLLTDCNPADPLVGSIATQYMTNRAEHDRMARQWTKRYAT

SEQ ID NO: 8279 - protein, 170 aa, Homo sapiens
MDTRNKAQLLVLLTLLSVLFSQTSAWPLYRAPSALRLGDRIPFEGANEPDQVSLKEDIDMLQNALAENDTPYYDVSRNARHADGVFTSDFSKLLGQLSAKKYLESLMGKRVSSNISEDPVPVKRHSDAVFTDNYTRLRKQMAVKKYLNSILNGKRSSEGESPDFPEELEK

SEQ ID NO: 8280 - protein, 169 aa, Homo sapiens
MDTRNKAQLLVLLTLLSVLFSQTSAWPLYRAPSALRLGDRIPFEGANEPDQVSLKEDIDMLQNALAENDTPYYDVSRNARHADGVFTSDFSKLLGQLSAKKYLESLMGKRVSNISEDPVPVKRHSDAVFTDNYTRLRKQMAVKKYLNSILNGKRSSEGESPDFPEELEK

SEQ ID NO: 8281 - protein, 953 aa, Homo sapiens
MEESSSVAMLVPDIGEQEAILTAESIISPSLEIDEQRKTKPDPLIHVIQKLSKIVENEKSQKCLLIGKKRPRSSAATHSLETQELCEIPAKVIQSPAADTRRAEMSQTNFTPDTLAQNEGKAMSYQCSLCKFLSSSFSVLKDHIKQHGQQNEVILMCSECHITSRSQEELEAHVVNDHDNDANIHTQSKAQQCVSPSSSLCRKTTERNETIPDIPVSVDNLQTHTVQTASVAEMGRRKWYAYEQYGMYRCLFCSYTCGQQRMLKTHAWKHAGEVDCSYPIFENENEPLGLLDSSAAAAPGGVDAVVIAIGESELSIHNGPSVQVQICSSEQLSSSSPLEQSAERGVHLSQSVTLDPNEEEMLEVISDAEENLIPDSLLTSAQKIISSSPNKKGHVNVIVERLPSAEETLSQKRFLMNTEMEEGKDLSLTEAQIGREGMDDVYRADKCTVDIGGLIIGWSSSEKKDELMNKGLATDENAPPGRRRTNSESLRLHSLAAEALVTMPIRAAELTRANLGHYGDINLLDPDTSQRQVDSTLAAYSKMMSPLKNSSDGLTSLNQSNSTLVALPEGRQELSDGQVKTGISMSLLTVIEKLRERTDQNASDDDILKELQDNAQCQPNSDTSLSGNNVVEYIPNAERPYRCRLCHYTSGNKGYIKQHLRVHRQRQPYQCPICEHIADNSKDLESHMIHHCKTRIYQCKQCEESFHYKSQLRNHEREQHSLPDTLSIATSNEPRISSDTADGKCVQEGNKSSVQKQYRCDVCDYTSTTYVGVRNHRRIHNSDKPYRCSLCGYVCSHPPSLKSHMWKHASDQNYNYEQVNKAINDAISQSGRVLGKSPGKTQLKSSEESADPVTGSSENAVSSSELMSQTPSEVLGTNENEKLSPTSNTSYSLEKISSLAPPSMEYCVLLFCCCICGFESTSKENLLDHMKEHEGEIVNIILNKDHNTALNTN

SEQ ID NO: 8282 - protein, 764 aa, Homo sapiens
MEESSSVAMLVPDIGEQEAILTAESIISPSLEIDEQRKTKPDPLIHVIQKLSKIVENEKSQKCLLIGKKRPRSSAATHSLETQELCEIPAKVIQSPAADTRRAEMSQTNFTPDTLAQNEGKAMSYQCSLCKFLSSSFSVLKDHIKQHGQQNEVILMCSECHITSRSQEELEAHVVNDHDNDANIHTQSKAQQCVSPSSSLCRKTTERNETIPDIPVSVDNLQTHTVQTASVAEMGRRKWYAYEQYGMYRCLFCSYTCGQQRMLKTHAWKHAGEVDCSYPIFENENEPLGLLDSSAAAAPGGVDAVVIAIGESELSIHNGPSVQVQICSSEQLSSSSPLEQSAERGVHLSQSVTLDPNEEEMLEVISDAEENLIPDSLLTSAQKIISSSPNKKGHVNVIVERLPSAEETLSQKRFLMNTEMEEGKDLSLTEAQIGREGMDDVYRADKCTVDIGGLIIGWSSSEKKDELMNKGLATDENAPPGRRRTNSESLRLHSLAAEALVTMPIRAAELTRANLGHYGDINLLDPDTSQRQVDSTLAAYSKMMSPLKNSSDGLTSLNQSNSTLVALPEGRQELSDGQVKTGISMSLLTVIEKLRERTDQNASDDDILKELQDNAQCQPNSDTSLSGNNVVEYIPNAERPYRCRLCHYTSGNKGYIKQHLRVHRQRQPYQCPICEHIADNSKDLESHMIHHCKTRIYQCKQCEESFHYKSQLRNHEREQHSLPDTLSIATSNEPRISSDTADGKCVQEGIYVFCYAGCSDLHMT

SEQ ID NO: 8283 - protein, 533 aa, Homo sapiens
MAHGSVTFRDVAIDFSQEEWEFLDPAQRDLYRDVMWENYSNFISLGPSISKPDVITLLDEERKEPGMVVREGTRRYCPDLESRYRTNTLSPEKDIYEIYSFQWDIMERIKSYSLQGSIFRNDWECKSKIEGEKEQQEGYFGQVKITSEKMTTYKRHNFLTEYQIVHNGEKVYECKECRKTFIRRSTLSQHLRIHTGEKPYKCKECGQAFRQRAHLIRHHKLHTGEKPYECKECGKAFTVLQELTQHQRLHTGEKPYECKECGKAFRVHQQLARHQRIHTGEKPYECKDCGKTFRQCTHLTRHQRLHTAEKLYECKECGKAFVCGPDLRVHQKIHFGEKPYECKECGKAFRICQQLTVHQSIHTGEKPYECKECGKTFRLRQQLVRHQRIHTREKPYECMECWKTFSSYSQLISHQSIHIGERPYECEECGKAFRLLSQLTQHQSIHTGEKPYECKECRKPFRLLSQLTQHQSIHTGEKPYECKECGKAFRLYSFLTQHQRIHTGEKPYKCKECKKAFRQHSHLTQHQKIHNGI

SEQ ID NO: 8284 - protein, 595 aa, Homo sapiens
MRETLEALSSLGFSVGQPEMAPQSEPREGSHNAQEQMSSSREERALGVCSGHEAPTPEEGAHTEQAEAPCRGQACSAQKAQPVGTCPGEEWMIRKVKVEDEDQEAEEEVEWPQHLSLLPSPFPAPDLGHLAAAYKLEPGAPGALSGLALSGWGPMPEKPYGCGECERRFRDQLTLRLHQRLHRGEGPCACPDCGRSFTQRAHMLLHQRSHRGERPFPCSECDKRFSKKAHLTRHLRTHTGERPYPCAECGKRFSQKIHLGSHQKTHTGERPFPCTECEKRFRKKTHLIRHQRIHTGERPYQCAQCARSFTHKQHLVRHQRVHQTAGPARPSPDSSASPHSTAPSPTPSFPGPKPFACSDCGLSFGWKKNLATHQCLHRSEGRPFGCDECALGATVDAPAAKPLASAPGGPGCGPGSDPVVPQRAPSGERSFFCPDCGRGFSHGQHLARHPRVHTGERPFACTQCDRRFGSRPNLVAHSRAHSGARPFACAQCGRRFSRKSHLGRHQAVHTGSRPHACAVCARSFSSKTNLVRHQAIHTGSRPFSCPQCGKSFSRKTHLVRHQLIHGEAAHAAPDAALAAPAWSAPPEVAPPPLFF

SEQ ID NO: 8285 - protein, 425 aa, Homo sapiens
MFPPARGKELLSFEDVAMYFTREEWGHLNWGQKDLYRDVMLENYRNMVLLGFQFPKPEMICQLENWDEQWILDLPRTGNRKASGSACPGSEARHKMKKLTPKQKFSEDLESYKISVVMQESAEKLSEKLHKCKEFVDSCRLTFPTSGDEYSRGFLQNLNLIQDQNAQTRWKQGRYDEDGKPFNQRSLLLGHERILTRAKSYECSECGKVIRRKAWFDQHQRIHFLENPFECKVCGQAFRQRSALTVHKQCHLQNKPYRCHDCGKCFRQLAYLVEHKRIHTKEKPYKCSKCEKTFSQNSTLIRHQVIHSGEKRHKCLECGKAFGRHSTLLCHQQIHSKPNTHKCSECGQSFGRNVDLIQHQRIHTKEEFFQCGECGKTFSFKRNLFRHQVIHTGSQPYQCVICGKSFKWHTSFIKHQGTHKGQIST

SEQ ID NO: 8286 - protein, 330 aa, Homo sapiens
MKKLTPKQKFSEDLESYKISVVMQESAEKLSEKLHKCKEFVDSCRLTFPTSGDEYSRGFLQNLNLIQDQNAQTRWKQGRYDEDGKPFNQRSLLLGHERILTRAKSYECSECGKVIRRKAWFDQHQRIHFLENPFECKVCGQAFRQRSALTVHKQCHLQNKPYRCHDCGKCFRQLAYLVEHKRIHTKEKPYKCSKCEKTFSQNSTLIRHQVIHSGEKRHKCLECGKAFGRHSTLLCHQQIHSKPNTHKCSECGQSFGRNVDLIQHQRIHTKEEFFQCGECGKTFSFKRNLFRHQVIHTGSQPYQCVICGKSFKWHTSFIKHQGTHKGQIST

SEQ ID NO: 8287 - protein, 62 aa, Homo sapiens
MFPPARGKELLSFEDVAMYFTREEWGHLNWGQKDLYRDVMLENYRNMVLLVYFQFDAAIPLC

SEQ ID NO: 8288 - protein, 542 aa, Homo sapiens
MDDPRYGMCPLKGASGCPGAERSLLVQSYFEKGPLTFRDVAIEFSLEEWQCLDSAQQGLYRKVMLENYRNLVFLAGIALTKPDLITCLEQGKEPWNIKRHEMVAKPPVICSHFPQDLWAEQDIKDSFQEAILKKYGKYGHDNLQLQKGCKSVDECKVHKEHDNKLNQCLITTQSNIFQCDPSAKVFHTFSNSNRHKIRHTRKKPFKCKKCEKSFCMLLHLTQHKRFHITENSYQCKDCGKAFNWFSTLTTHRRIHTGEKPYKCEECGKAFNRSSHLTTHKIIHTGEKPYRCEECGKAFNRSSHLTTHKRIHTGVKPYKCTECGKAFNRSSHLTTHRIIHTGEKPYKCEECGKAFNQSSTLTTHKITHAGEKPYKCEECGKAFYRFSYLTKHKTSHTGEKFYKCEECGKGFNWSSALTKHKRIHTGEKPYKCEECGKAFNESSNLTTHKMIHTGEKPYKCDECGKAFNRSSQLTAHKMIHTGEKPYKCEECGKAFNRSSTLTKHKITHTGEKSYKWEECGKDFNQSLSLIKQNNSYWRETLQM

SEQ ID NO: 8289 - protein, 1209 aa, Homo sapiens
MECYYIVISSTHLSNGHFRNIKGVFRGPLSKNGNKTLDYAEKENTIAKALEDLKANFYCELCDKQYYKHQEFDNHINSYDHAHKQRLKELKQREFARNVASKSRKDERKQEKALQRLHKLAELRKETVCAPGSGPMFKSTTVTVRENCNEISQRVVVDSVNNQQDFKYTLIHSEENTKDATTVAEDPESANNYTAKNNQVGDQAQGIHRHKIGFSFAFPKKASVKLESSAAAFSEYSDDASVGKGFSRKSRFVPSACHLQQSSPTDVLLSSEEKTNSFHPPEAMCRDKETVQTQEIKEVSSEKDALLLPSFCKFQLQLSSDADNCQNSVPLADQIPLESVVINEDIPVSGNSFELLGNKSTVLDMSNDCISVQATTEENVKHNEASTTEVENKNGPETLAPSNTEEVNITIHKKTNFCKRQCEPFVPVLNKHRSTVLQWPSEMLVYTTTKPSISYSCNPLCFDFKSTKVNNNLDKNKPDLKDLCSQQKQEDICMGPLSDYKDVSTEGLTDYEIGSSKNKCSQVTPLLADDILSSSCDSGKNENTGQRYKNISCKIRETEKYNFTKSQIKQDTLDEKYNKIRLKETHEYWFHKSRRKKKRKKLCQHHHMEKTKESETRCKMEAENSYTENAGKYLLEPISEKQYLAAEQLLDSHQLLDKRPKSESISLSDNEEMCKTWNTEYNTYDTISSKNHCKKNTILLNGQSNATMIHSGKHNLTYSRTYCCWKTKMSSCSQDHRSLVLQNDMKHMSQNQAVKRGYNSVMNESERFYRKRRQHSHSYSSDESLNRQNHLPEEFLRPPSTSVAPCKPKKKRRRKRGRFHPGFETLELKENTDYPVKDNSSLNPLDRLISEDKKEKMKPQEVAKIERNSEQTNQLRNKLSFHPNNLLPSETNGETEHLEMETTSGELSDVSNDPTTSVCVASAPTKEAIDNTLLEHKERSENINLNEKQIPFQVPNIERNFRQSQPKSYLCHYELAEALPQGKMNETPTEWLRYNSGILNTQPPLPFKEAHVSGHTFVTAEQILAPLALPEQALLIPLENHDKFKNVPCEVYQHILQPNMLANKVKFTFPPAALPPPSTPLQPLPLQQSLCSTSVTTIHHTVLQQHAAAAAAAAAAAAAGTFKVLQPHQQFLSQIPALTRTSLPQLSVGPVGPRLCPGNQPTFVAPPQMPIIPASVLHPSHLAFPSLPHALFPSLLSPHPTVIPLQPLF

SEQ ID NO: 8290 - protein, 483 aa, Homo sapiens
MWLGTSGKSGLPGHCLENPLQECHPAQLEEWALKGISRPSVISQPEQKEEPWVLPLQNFEARKIPRESHTDCEHQVAKLNQDNSETAEQCGTSSERTNKDLSHTLSWGGNWEQGLELEGQHGTLPGEGQLESFSQERDLNKLLDGYVGEKPMCAECGKSFNQSSYLIRHLRTHTGERPYTCIECGKGFKQSSDLVTHRRTHTGEKPYQCKGCEKKFSDSSTLIKHQRTHTGERPYECPECGKTFGRKPHLIMHQRTHTGEKPYACLECHKSFSRSSNFITHQRTHTGVKPYRCNDCGESFSQSSDLIKHQRTHTGERPFKCPECGKGFRDSSHFVAHMSTHSGERPFSCPDCHKSFSQSSHLVTHQRTHTGERPFKCENCGKGFADSSALIKHQRIHTGERPYKCGECGKSFNQSSHFITHQRIHLGDRPYRCPECGKTFNQRSHFLTHQRTHTGEKPFHCSKCNKSFRQKAHLLCHQNTHLI

SEQ ID NO: 8291 - protein, 538 aa, Homo sapiens
MVAGWLTNYSQDSVTFEDVAVDFTQEEWTLLDQTQRNLYRDVMLENYKNLVAVDWESHINTKWSAPQQNFLQGKTSSVVEMERNHFGEELFDFNQCEKALSEHSCLKTHRRTYFRKKTCECNQCEKAFRKPSIFTLHKKTDIGEELPNCNQCETAFSQHLHLVCKKTSQNLHLVCKKTHTQEKPYKCSDCEKGLPSSSHLRECVRIYGGERPYTHKEYVETFSHSTALFVHMQTQDGEKFYECKACGKPFTESSYLTQHLRTHSRVLPIEHKKFGKAFAFSPDLAKHIRLRTRGKHYVCNECGKEFTCFSKLNIHIRVHTGEKPYECNKCGKAFTDSSGLIKHRRTHTGEKPYECKECGKAFANSSHLTVHMRTHTGEKPYQCKECGKAFINSSSFKSHMQTHPGVKPYDCQQCGKAFIRSSFLIRHLRSHSAERPFECEECGKAFRYSSHLSQHKRIHTGERPYKCQKCGQAFSISSGLTVHMRTHTGERPFECQECGKAFTRSTYLIRHLRSHSVEKPYKECGQTFSNSSCLTECV

SEQ ID NO: 8292 - protein, 84 aa, Homo sapiens
MVAGWLTNYSQDSVTFEDVAVDFTQEEWTLLDQTQRNLYRDVMLENYKNLVAVDWESHINTKWSAPQQNFLQGKTSSVVEMNSE

SEQ ID NO: 8293 - protein, 132 aa, Homo sapiens
MPFKTKYPNGFHFAYLPTGSTQFRSLLQGQDSASQGVCPCRLCGAVPVRDQARIQSRRITLANCQGQPSALRQVNELANSAQIESFLCFSQLPNAVCFGGHLSCEFRECGYCNINPHHSKQLKLNSVTREES

SEQ ID NO: 8294 - protein, 659 aa, Homo sapiens
MLHQPTPGNRGLTARMEVGPATETFVLELQCLEDGGPGPDTLSGGSGGSESQEEEEPQERNSSPQRPAVSAPVGASEIAEETRPGQRELQLQQLEQQPEPQQQPQHEQLQQPQPHLELQQQPQQDGQQQLSQLQQEKHQSVHHQELKPELQLMHQQQQLQPQQVQEQQRLQQQQEQLQTQQAQEQQVLQQQEQLQQQVQEQQLLQQQQEQLQQQQLLQQQEQLQQQQFQQQQEQLQQQQQLLLLQQQGQLQQQLLQQQQAQLQQQLLEQQQAQLQQQLLLQQQEQLQQQQQQQLLQQQQEQLQQQQLQPPPLEPEEEEEVELELMPVDLGSEQELEQQRQELERQQELERQQEQRQLQLKLQEELQQLEQQLEQQQQQLEQQEVQLELTPVELGAQQQEVQLELTPVQPELQLELVPAAGGGGAAVPGAPAAVVVAPPGYVVVQELMVLPAVAAPAVVAIPGPAGSAALTPARQRRRRRARDRPTICGECGKGFSRSTDLVRHQATHTGERPHRCGECGKGFSQHSNLVTHQRIHTGEKPYACSYCAKRFSESSALVQHQRTHTGERPYACGDCGKRFSVSSNLLRHRRTHSGERPYVCEDCGERFRHKVQIRRHERQLHGAGRSRGLGLLRASRPAALGGPARAEQAATATAPADKAL

SEQ ID NO: 8295 - protein, 971 aa, Homo sapiens
MSNVSEERRKRQQNIKEGLQFIQSPLSYPGTQEQYAVYLRALVRNLFNEGNDVYREHDWNNSISQYTEALNIADYAKSEEILIPKEIIEKLYINRIACYSNMGFHDKVLEDCNIVLSLNASNCKALYRKSKALSDLGRYKKAYDAVAKCSLAVPQDEHVIKLTQELAQKLGFKIRKAYVRAELSLKSVPGDGATKALNHSVEDIEPDLLTPRQEAVPVVSLPAPSFSHEVGSELASVPVMPLTSILPLQVEESALPSAVLANGGKMPFTMPEAFLDDGDMVLGDELDDLLDSAPETNETVMPSALVRGPLQTASVSPSMPFSASLLGTLPIGARYAPPPSFSEFYPPLTSSLEDFCSSLNSFSMSESKRDLSTSTSREGTPLNNSNSSLLLMNGPGSLFASENFLGISSQPRNDFGNFFGSAVTKPSSSVTPRHPLEGTHELRQACQICFVKSGPKLMDFTYHANIDHKCKKDILIGRIKNVEDKSWKKIRPRPTKTNYEGPYYICKDVAAEEECRYSGHCTFAYCQEEIDVWTLERKGAFSREAFFGGNGKINLTVFKLLQEHLGEFIFLCEKCFDHKPRMISKRNKDNSTACSHPVTKHEFEDNKCLVHILRETTVKYSKIRSFHGQCQLDLCRHEVRYGCLREDECFYAHSLVELKVWIMQNETGISHDAIAQESKRYWQNLEANVPGAQVLGNQIMPGFLNMKIKFVCAQCLRNGQVIEPDKNRKYCSAKARHSWTKDRRAMRVMSIERKKWMNIRPLPTKKQMPLQFDLCNHIASGKKCQYVGNCSFAHSPEEREVWTYMKENGIQDMEQFYELWLKSQKNEKSEDIASQSNKENGKQIHMPTDYAEVTVDFHCWMCGKNCNSEKQWQGHISSEKHKEKVFHTEDDQYCWQHRFPTGYFSICDRYMNGTCPEGNSCKFAHGNAELHEWEERRDALKMKLNKARKDHLIGPNDNDFGKYSFLFKDLN

SEQ ID NO: 8296 - protein, 167 aa, Homo sapiens
MKENGIQDMEQFYELWLKSQKNEKSEDIASQSNKENGKQIHMPTDYAEVTVDFHCWMCGKNCNSEKQWQGHISSEKHKEKVFHTEDDQYCWQHRFPTGYFSICDRYMNGTCPEGNSCKFAHGNAELHEWEERRDALKMKLNKARKDHLIGPNDNDFGKYSFLFKDLN

SEQ ID NO: 8297 - protein, 560 aa, Homo sapiens
MLLLLSDQLLLTALRKPNPQAMAALFLSAPPQAEVTFEDVAVYLSREEWGRLGPAQRGLYRDVMLETYGNLVSLGVGPAGPKPGVISQLERGDEPWVLDVQGTSGKEHLRVNSPALGTRTEYKELTSQETFGEEDPQGSEPVEACDHISKSEGSLEKLVEQRGPRAVTLTNGESSRESGGNLRLLSRPVPDQRPHKCDICEQSFEQRSYLNNHKRVHRSKKTNTVRNSGEIFSANLVVKEDQKIPTGKKLHYCSYCGKTFRYSANLVKHQRLHTEEKPYKCDECGKAFSQSCEFINHRRMHSGEIPYRCDECGKTFTRRPNLMKHQRIHTGEKPYKCGECGKHFSAYSSLIYHQRIHTGEKPYKCNDCGKAFSDGSILIRHRRTHTGEKPFECKECGKGFTQSSNLIQHQRIHTGEKPYKCNECEKAFIQKTKLVEHQRSHTGEKPYECNDCGKVFSQSTHLIQHQRIHTGEKPYKCSECGKAFHNSSRLIHHQRLHHGEKPYRCSDCKKAFSQSTYLIQHRRIHTGEKPYKCSECGKAFRHSSNMCQHQRIHLREDFSM

SEQ ID NO: 8298 - protein, 491 aa, Homo sapiens
MEEIPAQEAAGSPRVQFQSLETQSECLSPEPQFVQDTDMEQGLTGDGETREENKLLIPKQKISEEVHSYKVRVGRLKHDITQVPETREVYKSEDRLERLQEILRKFLYLEREFRQITISKETFTSEKNNECHEPEKSFSLDSTIDADQRVLRIQNTDDNDKYDMSFNQNSASGKHEHLNLTEDFQSSECKESLMDLSHLNKWESIPNTEKSYKCDVCGKIFHQSSALTRHQRIHTREKPYKCKECEKSFSQSSSLSRHKRIHTREKPYKCEASDKSCEASDKSCSPSSGIIQHKKIHTRAKSYKCSSCERVFSRSVHLTQHQKIHKEMPCKCTVCGSDFCHTSYLLEHQRVHHEEKAYEYDEYGLAYIKQQGIHFREKPYTCSECGKDFRLNSHLIQHQRIHTGEKAHECNECGKAFSQTSCLIQHHKMHRKEKSYECNEYEGSFSHSSDLILQQEVLTRQKAFDCDVWEKNSSQRAHLVQHQSIHTKENS

SEQ ID NO: 8299 - protein, 181 aa, Homo sapiens
MEEIPAQEAAGSPRVQFQSLETQSECLSPEPQFVQDTDMEQGLTGAPPVPQVPALPREGSPGDQAAALLTARYQEFVTFEDVAVHLTREEWGYLDPVQRDLYREVMLENYGNVVSLGILLRLPTTRIHSVNSCPALSHTQASAFSGETLAVLTAGISKRWPKYRLPIDIARPCSETPFPRL

SEQ ID NO: 8300 - protein, 526 aa, Homo sapiens
MEEIPAQEAAGSPRVQFQSLETQSECLSPEPQFVQDTDMEQGLTGGFPISKPDGISQLEQDLQVFDLETKTREVLRDDCSDGETREENKLLIPKQKISEEVHSYKVRVGRLKHDITQVPETREVYKSEDRLERLQEILRKFLYLEREFRQITISKETFTSEKNNECHEPEKSFSLDSTIDADQRVLRIQNTDDNDKYDMSFNQNSASGKHEHLNLTEDFQSSECKESLMDLSHLNKWESIPNTEKSYKCDVCGKIFHQSSALTRHQRIHTREKPYKCKECEKSFSQSSSLSRHKRIHTREKPYKCEASDKSCEASDKSCSPSSGIIQHKKIHTRAKSYKCSSCERVFSRSVHLTQHQKIHKEMPCKCTVCGSDFCHTSYLLEHQRVHHEEKAYEYDEYGLAYIKQQGIHFREKPYTCSECGKDFRLNSHLIQHQRIHTGEKAHECNECGKAFSQTSCLIQHHKMHRKEKSYECNEYEGSFSHSSDLILQQEVLTRQKAFDCDVWEKNSSQRAHLVQHQSIHTKENS

SEQ ID NO: 8301 - protein, 110 aa, Homo sapiens
MEEIPAQEAAGSPRVQFQSLETQSECLSPEPQFVQDTDMEQGLTGGILLRLPTTRIHSVNSCPALSHTQASAFSGETLAVLTAGISKRWPKYRLPIDIARPCSETPFPRL

SEQ ID NO: 8302 - protein, 461 aa, Homo sapiens
MDSVAFEDVAVNFTLEEWALLDPSQKNLYRDVMRETFRNLASVGKQWEDQNIEDPFKIPRRNISHIPERLCESKEGGQGEETFSQIPDGILNKKTPGVKPCESSVCGEVGMGPSSLNRHIRDHTGREPNEYQEYGKKSYTRNQCGRALSYHRSFPVRERTHPGGKPYDCKECGETFISLVSIRRHMLTHRGGVPYKCKVCGKAFDYPSLFRIHERSHTGEKPYECKQCGKAFSCSSYIRIHERTHTGDKPYECKQCGKAFSCSKYIRIHERTHTGEKPYECKQCGKAFRCASSVRSHERTHTGEKLFECKECGKALTCLASVRRHMIKHTGNGPYKCKVCGKAFDFPSSFRIHERTHTGEKPYDCKQCGKAFSCSSSFRKHERIHTGEKPYKCTKCGKAFSRSSYFRIHERTHTGEKPYECKQCGKAFSRSTYFRVHEKIHTGEKPYENPNPNASVVPVLS

SEQ ID NO: 8303 - protein, 1159 aa, Homo sapiens
MLDFLAENNLCGQAILRIVSCGNAIIAELLRLSEFIPAVFRLKDRADQQKYGDIIFDFSYFKGPELWESKLDAKPELQDLDEEFRENNIEIVTRFYLAFQSVHKYIVDLNRYLDDLNEGVYIQQTLETVLLNEDGKQLLCEALYLYGVMLLVIDQKIEGEVRERMLVSYYRYSAARSSADSNMDDICKLLRSTGYSSQPGAKRPSNYPESYFQRVPINESFISMVIGRLRSDDIYNQVSAYPLPEHRSTALANQAAMLYVILYFEPSILHTHQAKMREIVDKYFPDNWVISIYMGITVNLVDAWEPYKAAKTALNNTLDLSNVREQASRYATVSERVHAQVQQFLKEGYLREEMVLDNIPKLLNCLRDCNVAIRWLMLHTADSACDPNNKRLRQIKDQILTDSRYNPRILFQLLLDTAQFEFILKEMFKQMLSEKQTKWEHYKKEGSERMTELADVFSGVKPLTRVEKNENLQAWFREISKQILSLNYDDSTAAGRKTVQLIQALEEVQEFHQLESNLQVCQFLADTRKFLHQMIRTINIKEEVLITMQIVGDLSFAWQLIDSFTSIMQESIRVNPSMVTKLRATFLKLASALDLPLLRINQANSPDLLSVSQYYSGELVSYVRKVLQIIPESMFTSLLKIIKLQTHDIIEVPTRLDKDKLRDYAQLGPRYEVAKLTHAISIFTEGILMMKTTLVGIIKVDPKQLLEDGIRKELVKRVAFALHRGLIFNPRAKPSELMPKLKELGATMDGFHRSFEYIQDYVNIYGLKIWQEEVSRIINYNVEQECNNFLRTKIQDWQSMYQSTHIPIPKFTPVDESVTFIGRLCREILRITDPKMTCHIDQLNTWYDMKTHQEVTSSRLFSEIQTTLGTFGLNGLDRLLCFMIVKELQNFLSMFQKIILRDRTVQDTLKTLMNAVSPLKSIVANSNKIYFSAIAKTQKIWTAYLEAIMKVGQMQILRQQIANELNYSCRFDSKHLAAALENLNKALLADIEAHYQDPSLPYPKEDNTLLYEITAYLEAAGIHNPLNKIYITTKRLPYFPIVNFLFLIAQLPKLQYNKNLGMVCRKPTDPVDWPPLVLGLLTLLKQFHSRYTEQFLALIGQFICSTVEQCTSQKIPEIPADVVGALLFLEDYVRYTKLPRRVAEAHVPNFIFDEFRTVL

SEQ ID NO: 8304 - protein, 199 aa, Homo sapiens
MLPVQRRKLDPLLKKYRHHKKATRTKRRRKEKMEAQCSPVPPTPSTPPQSEEDEAVDKKPTLLSAQEDTPDLLHEDRLQYLQEEGSGVMHQECQIQSCELSVAQKPRPSSPAVTSLASPPLCFGSFLSCVCQTFSRSRKQKPPRRKGNNQAEAGGDAEVLRPGPAKPELSLSKTCSHLKLIELSFVFSFIVLSVCHCSS

SEQ ID NO: 8305 - protein, 244 aa, Homo sapiens
MQPPGPPPAYAPTNGDFTFVSSADAEDLSGSIASPDVKLNLGGDFIKESTATTFLRQRGYGWLLEVEDDDPEDNKPLLEELDIDLKDIYYKIRCVLMPMPSLGFNRQVVRDNPDFWGPLAVVLFFSMISLYGQFRVVSWIITIWIFGSLTIFLLARVLGGEVAYGQVLGVIGYSLLPLIVIAPVLLVVGSFEVVSTLIKLFGVFWAAYSAASLLVGEEFKTKKPLLIYPIFLLYIYFLSLYTGV

SEQ ID NO: 8306 - protein, 403 aa, Homo sapiens
MATGGGAEEERKRGRPQLLPPARPAARGEEADGGREKMGWAQVVKNLAEKKGEFREPRPPRREEESGGGGGSAGLGGPAGLAAPDLGDFPPAGRGDPKGRRRDPAGEAVDPRKKKGAAEAGRRKKAEAAAAAMATPARPGEAEDAAERPLQDEPAAAAGPGKGRFLVRICFQGDEGACPTRDFVVGALILRSIGMDPSDIYAVIQIPGSREFDVSFRSAEKLALFLRVYEEKREQEDCWENFVVLGRSKSSLKTLFILFRNETVDVEDIVTWLKRHCDVLAVPVKVTDRFGIWTGEYKCEIELRQGEGGVRHLPGAFFLGAERGYSWYKGQPKTCFKCGSRTHMSGSCTQDRCFRCGEEGHLSPYCRKGIVCNLCGKRGHAFAQCPKAVHNSVAAQLTGVAGH

SEQ ID NO: 8307 - protein, 239 aa, Homo sapiens
MATGGGAEEERKRGRPQLLPPARPAARGEEADGGREKMGWAQVVKNLADVSFRSAEKLALFLRVYEEKREQEDCWENFVVLGRSKSSLKTLFILFRNETVDVEDIVTWLKRHCDVLAVPVKVTDRFGIWTGEYKCEIELRQGEGGVRHLPGAFFLGAERGYSWYKGQPKTCFKCGSRTHMSGSCTQDRCFRCGEEGHLSPYCRKGIVCNLCGKRGHAFAQCPKAVHNSVAAQLTGVAGH

SEQ ID NO: 8308 - protein, 970 aa, Homo sapiens
MALSQGLLTFRDVAIEFSQEEWKCLDPAQRTLYRDVMLENYRNLVSLDISSKCMMKEFSSTAQGNTEVIHTGTLQRHERHHIGDFCFQEMEKDIHDFEFQWKEDERNSHEAPMTEIKQLTGSTNRHDQRHAGNKPIKDQLGSSFHSHLPELHMFQTEGKIGNQVEKSINSASLVSTSQRISCRPKTHISKNYGNNFLNSSLLTQKQEVHMREKSFQCNESGKAFNYSSVLRKHQIIHLGAKQYKCDVCGKVFNQKRYLACHRRCHTGKKPYKCNDCGKTFSQELTLTCHHRLHTGEKHYKCSECGKTFSRNSALVIHKAIHTGEKSYKCNECGKTFSQTSYLVYHRRLHTGEKPYKCEECDKAFSFKSNLERHRKIHTGEKPYKCNECSRTFSRKSSLTRHRRLHTGEKPYKCNDCGKTFSQMSSLVYHRRLHTGEKPYKCEECDEAFSFKSNLERHRRIHTGEKPYKCNDCGKTFSQTSSLVYHRRLHTGEKPYKCEECDEAFSFKSNLERHRIIHTGEKLYKCNECGKTFSRKSSLTRHCRLHTGEKPYQCNECGKAFRGQSALIYHQAIHGIGKLYKCNDCHQVFSNATTIANHWRIHNEERSYKCNRCGKFFRHRSYLAVHWRTHSGEKPYKCEECDEAFSFKSNLQRHRRIHTGEKPYRCNECGKTFSRKSYLTCHRRLHTGEKPYKCNECGKTFGRNSALIIHKAIHTGEKPYKCNECGKAFSQKSSLTCHLRLHTGEKPYKCEECDKVFSRKSSLEKHRRIHTGEKPYKCKVCDKAFGRDSHLAQHTRIHTGEKPYKCNECGKNFRHNSALVIHKAIHSGEKPYKCNECGKTFRHNSALEIHKAIHTGEKPYKCSECGKVFNRKANLSRHHRLHTGEKPYKCNKCGKVFNQQAHLACHHRIHTGEKPYKCNECGKTFRHNSVLVIHKTIHTGEKPYKCNECGKVFNRKAKLARHHRIHTGKKH

SEQ ID NO: 8309 - protein, 1883 aa, Homo sapiens
MPVGRIECPSSPSFPRDISHECRVCGVTEVGLSAYAKHISGQLHKDNVDAQEREDDGKGEEEEEDYFDKELIQLIKQRKEQSRQDEPSNSNQEINSDDRRPQWRREDRIPYQDRESYSQPAWHHRGPPQRDWKWEKDGFNNTRKNSFPHSLRNGGGPRGRSGWHKGVAGGSSTWFHNHSNSGGGWLSNSGAVDWNHNGTGRNSSWLSEGTGGFSSWHMNNSNGNWKSSVRSTNNWNYSGPGDKFQPGRNRNSNCQMEDMTMLWNKKSNKSNKYSHDRYNWQRQENDKLGTVATYRGPSEGFTSDKFPSEGLLDFNFEQLESQTTKQADTATSKVSGKNGSAAREKPRRWTPYPSQKTLDLQSGLKDITGNKSEMIEKPLFDFSLITTGIQEPQTDETRNSPTQKTQKEIHTGSLNHKASSDSAASFEVVRQCPTAEKPEQEHTPNKMPSLKSPLLPCPATKSLSQKQDPKNISKNTKTNFFSPGEHSNPSNKPTVEDNHGPYISKLRSSCPHVLKGNKSTFGSQKQSGDNLNDTLRKAKEVLQCHESLQNPLLSTSKSTRNYAKASRNVEESEKGSLKIEFQVHALEDESDGETSDTEKHGTKIGTLGSATTELLSGSTRTADEKEEDDRILKTSRELSTSPCNPIVRQKESELQMTSAASPHPGLLLDLKTSLEDAQVDDSIKSHVSYETEGFESASLDAELQKSDISQPSGPLLPELSKLGFPASLQRDLTRHISLKSKTGVHLPEPNLNSARRIRNISGHRKSETEKESGLKPTLRQILNASRRNVNWEQVIQQVTKKKQELGKGLPRFGIEMVPLVQNEQEALDLDGEPDLSSLEGFQWEGVSISSSPGLARKRSLSESSVIMDRAPSVYSFFSEEGTGKENEPQQMVSPSNSLRAGQSQKATMHLKQEVTPRAASLRTGERAENVATQRRHSAQLSSDHIIPLMHLAKDLNSQERSIPPSENQNSQESNGEGNCLSSSASSALAISSLADAATDSSCTSGAEQNDGQSIRKKRRATGDGSSPELPSLERKNKRRKIKGKKERSQVDQLLNISLREEELSKSLQCMDNNLLQARAALQTAYVEVQRLLMLKQQITMEMSALRTHRIQILQGLQETYEPSEHPDQVPCSLTRERRNSRSQTSIDAALLPTPFFPLFLEPPSSHVSPSPTGASLQITTSPTFQTHGSVPAPDSSVQIKQEPMSPEQDENVNAVPPSSACNVSKELLEANREISDSCPVYPVITARLSLPESTESFHEPSQELKFSVEQRNTRNRENSPSSQSAGLSSINKEGEEPTKGNSGSEACTSSFLRLSFASETPLEKEPHSPADQPEQQAESTLTSAETRGSKKKKKLRKKKSLRAAHVPENSDTEQDVLTVKPVRKVKAGKLIKGGKVTTSTWEDSRTGREQESVRDEPDSDSSLEVLEIPNPQLEVVAIDSSESGEEKPDSPSKKDIWNSTEQNPLETSRSGCDEVSSTSEIGTRYKDGIPVSVAETQTVISSIKGSKNSSEISSEPGDDDEPTEGSFEGHQAAVNAIQIFGNLLYTCSADKTVRVYNLVSRKCIGVFEGHTSKVNCLLVTQTSGKNAALYTGSSDHTIRCYNVKSRECVEQLQLEDRVLCLHSRWRILYAGLANGTVVTFNIKNNKRLEIFECHGPRAVSCLATAQEGARKLLVVGSYDCTISVRDARNGLLLRTLEGHSKTILCMKVVNDLVFSGSSDQSVHAHNIHTGELVRIYKGHNHAVTVVNILGKVMVTACLDKFVRVYELQSHDRLQVYGGHKDMIMCMTIHKSMIYTGCYDGSIQAVRLNLMQNYRCWWHGCSLIFGVVDHLKQHLLTDHTNPNFQTLKCRWKNCDAFFTARKGSKQDAAGHIERHAEDDSKIDS

SEQ ID NO: 8310 - protein, 1111 aa, Homo sapiens
MVRERKCILCHIVYSSKKEMDEHMRSMLHHRELENLKGRFGIEMVPLVQNEQEALDLDGEPDLSSLEGFQWEGVSISSSPGLARKRSLSESSVIMDRAPSVYSFFSEEGTGKENEPQQMVSPSNSLRAGQSQKATMHLKQEVTPRAASLRTGERAENVATQRRHSAQLSSDHIIPLMHLAKDLNSQERSIPPSENQNSQESNGEGNCLSSSASSALAISSLADAATDSSCTSGAEQNDGQSIRKKRRATGDGSSPELPSLERKNKRRKIKGKKERSQVDQLLNISLREEELSKSLQCMDNNLLQARAALQTAYVEVQRLLMLKQQITMEMSALRTHRIQILQGLQETYEPSEHPDQVPCSLTRERRNSRSQTSIDAALLPTPFFPLFLEPPSSHVSPSPTGASLQITTSPTFQTHGSVPAPDSSVQIKQEPMSPEQDENVNAVPPSSACNVSKELLEANREISDSCPVYPVITARLSLPESTESFHEPSQELKFSVEQRNTRNRENSPSSQSAGLSSINKEGEEPTKGNSGSEACTSSFLRLSFASETPLEKEPHSPADQPEQQAESTLTSAETRGSKKKKKLRKKKSLRAAHVPENSDTEQDVLTVKPVRKVKAGKLIKGGKVTTSTWEDSRTGREQESVRDEPDSDSSLEVLEIPNPQLEVVAIDSSESGEEKPDSPSKKDIWNSTEQNPLETSRSGCDEVSSTSEIGTRYKDGIPVSVAETQTVISSIKGSKNSSEISSEPGDDDEPTEGSFEGHQAAVNAIQIFGNLLYTCSADKTVRVYNLVSRKCIGVFEGHTSKVNCLLVTQTSGKNAALYTGSSDHTIRCYNVKSRECVEQLQLEDRVLCLHSRWRILYAGLANGTVVTFNIKNNKRLEIFECHGPRAVSCLATAQEGARKLLVVGSYDCTISVRDARNGLLLRTLEGHSKTILCMKVVNDLVFSGSSDQSVHAHNIHTGELVRIYKGHNHAVTVVNILGKVMVTACLDKFVRVYELQSHDRLQVYGGHKDMIMCMTIHKSMIYTGCYDGSIQAVRLNLMQNYRCWWHGCSLIFGVVDHLKQHLLTDHTNPNFQTLKCRWKNCDAFFTARKGSKQDAAGHIERHAEDDSKIDS

SEQ ID NO: 8311 - protein, 137 aa, Homo sapiens
MAALSRALGPLRTPAPPLWIGLFLVATGSQQSLAQPLPGNTTEATPRSLRASGSLCGPHAKAPYLCEATHEPAAARIRAQVPDTRWSRVGGQRFYSRVLSPLHRGPSGHTEASAQRSHMGKLKEPQPQDHKPGLGAS

SEQ ID NO: 8312 - protein, 574 aa, Homo sapiens
MATLVVNKLGAGVDSGRQGSRGTAVVKVLECGVCEDVFSLQGDKVPRLLLCGHTVCHDCLTRLPLHGRAIRCPFDRQVTDLGDSGVWGLKKNFALLELLERLQNGPIGQYGAAEESIGISGESIIRCDEDEAHLASVYCTVCATHLCSECSQVTHSTKTLAKHRRVPLADKPHEKTMCSQHQVHAIEFVCLEEGCQTSPLMCCVCKEYGKHQGHKHSVLEPEANQIRASILDMAHCIRTFTEEISDYSRKLVGIVQHIEGGEQIVEDGIGMAHTEHVPGTAENARSCIRAYFYDLHETLCRQEEMALSVVDAHVREKLIWLRQQQEDMTILLSEVSAACLHCEKTLQQDDCRVVLAKQEITRLLETLQKQQQQFTEVADHIQLDASIPVTFTKDNRVHIGPKMEIRVVTLGLDGAGKTTILFKLKQDEFMQPIPTIGFNVETVEYKNLKFTIWDVGGKHKLRPLWKHYYLNTQAVVFVVDSSHRDRISEAHSELAKLLTEKELRDALLLIFANKQDVAGALSVEEITELLSLHKLCCGRSWYIQGCDARSGMGLYEGLDWLSRQLVAAGVLDVA

SEQ ID NO: 8313 - protein, 569 aa, Homo sapiens
MATLVVNKLGAGVDSGRQGSRGTAVVKVLECGVCEDVFSLQGDKVPRLLLCGHTVCHDCLTRLPLHGRAIRCPFDRQVTDLGDSGVWGLKKNFALLELLERLQNGPIGQYGAAEESIGISGESIIRCDEDEAHLASVYCTVCATHLCSECSQVTHSTKTLAKHRRVPLADKPHEKTMCSQHQVHAIEFVCLEEGCQTSPLMCCVCKEYGKHQGHKHSVLEPEANQIRASILDMAHCIRTFTEEISDYSRKLVGIVQHIEGGEQIVEDGIGMAHTEHVPGTAENARSCIRAYFYDLHETLCRQEEMALSVVDAHVREKLIWLRQQQEDMTILLSEVSAACLHCEKTLQQDDCRVVLAKQEITRLLETLQKQQQQFTEVADHIQLDASIPVTFTKDNRVHIGPKMEIRVVTLGLDGAGKTTILFKLKQDEFMQPIPTIGFNVETVEYKNLKFTIWDVGGKHKLRPLWKHYYLNTQAVVFVVDSSHRDRISEAHSELAKLLTEKELRDALLLIFANKQDVAGALSVEEITELLSLHKLCCGRSWYIQGCDARSVFQIICDQYTGKEVVTEKG

SEQ ID NO: 8314 - protein, 546 aa, Homo sapiens
MATLVVNKLGAGVDSGRQGSRGTAVVKVLECGVCEDVFSLQGDKVPRLLLCGHTVCHDCLTRLPLHGRAIRCPFDRQVTDLGDSGVWGLKKNFALLELLERLQNGPIGQYGAAEESIGISGESIIRCDEDEAHLASVYCTVCATHLCSECSQVTHSTKTLAKHRRVPLADKPHEKTMCSQHQVHAIEFVCLEEGCQTSPLMCCVCKEYGKHQGHKHSVLEPEANQIRASILDMAHCIRTFTEEISDYSRKLVGIVQHIEGGEQIVEDGIGMAHTEHVPGTAENARSCIRAYFYDLHETLCRQEEMALSVVDAHVREKLIWLRQQQEDMTILLSEVSAACLHCEKTLQQDDCRVVLAKQEITRLLETLQKQQQQFTEVADHIQLDASIPVTFTKDNRVHIGPKMEIRVVTLGLDGAGKTTILFKLKQDEFMQPIPTIGFNVETVEYKNLKFTIWDVGGKHKLRPLWKHYYLNTQAVVFVVDSSHRDRISEAHSELAKLLTEKELRDALLLIFANKQDVAGALSVEEITELLSLHKLCCGRSCFSDNM

SEQ ID NO: 8315 - protein, 518 aa, Homo sapiens
MAETSLLEAGASAASTAAALENLQVEASCSVCLEYLKEPVIIECGHNFCKACITRWWEDLERDFPCPVCRKTSRYRSLRPNRQLGSMVEIAKQLQAVKRKIRDESLCPQHHEALSLFCYEDQEAVCLICAISHTHRAHTVVPLDDATQEYKEKLQKCLEPLEQKLQEITRCKSSEEKKPGELKRLVESRRQQILREFEELHRRLDEEQQVLLSRLEEEEQDILQRLRENAAHLGDKRRDLAHLAAEVEGKCLQSGFEMLKDVKSTLEKNIPRKFGGSLSTICPRDHKALLGLVKEINRCEKVKTMEVTSVSIELEKNFSNFPRQYFALRKILKQLIADVTLDPETAHPNLVLSEDRKSVKFVETRLRDLPDTPRRFTFYPCVLATEGFTSGRHYWEVEVGDKTHWAVGVCRDSVSRKGELTPLPETGYWRVRLWNGDKYAATTTPFTPLHIKVKPKRVGIFLDYEAGTLSFYNVTDRSHIYTFTDTFTEKLWPLFYPGIRAGRKNAAPLTIRPPTDWE

SEQ ID NO: 8316 - protein, 488 aa, Homo sapiens
MAETSLLEAGASAASTAAALENLQVEASCSVCLEYLKEPVIIECGHNFCKACITRWWEDLERDFPCPVCRKTSRYRSLRPNRQLGSMVEIAKQLQAVKRKIRDESLCPQHHEALSLFCYEDQEAVCLICAISHTHRAHTVVPLDDATQEYKEKLQKCLEPLEQKLQEITRCKSSEEKKPGELKRLVESRRQQILREFEELHRRLDEEQQVLLSRLEEEEQDILQRLRENAAHLGDKRRDLAHLAAEVEGKCLQSGFEMLKDVKSTLEKCEKVKTMEVTSVSIELEKNFSNFPRQYFALRKILKQLIADVTLDPETAHPNLVLSEDRKSVKFVETRLRDLPDTPRRFTFYPCVLATEGFTSGRHYWEVEVGDKTHWAVGVCRDSVSRKGELTPLPETGYWRVRLWNGDKYAATTTPFTPLHIKVKPKRVGIFLDYEAGTLSFYNVTDRSHIYTFTDTFTEKLWPLFYPGIRAGRKNAAPLTIRPPTDWE

SEQ ID NO: 8317 - protein, 119 aa, Homo sapiens
MVAADQGRGWNPLDGPTWEVLAMPLPLGPATQVPALFSAALVPPVSSLRPNQMLDWQRLKTPHGAPVACSLGLSGEWVPTPCALSILALLGLQLDPLFGLWGCTRTLFWSEWARESRRP

SEQ ID NO: 8318 - protein, 250 aa, Homo sapiens
MAWQVSLLELEDWLQCPICLEVFKESLMLQCGHSYCKGCLVSLSYHLDTKVRCPMCWQVVDGSSSLPNVSLAWVIEALRLPGDPEPKVCVHHRNPLSLFCEKDQELICGLCGLLGSHQHHPVTPVSTVCSRMKEELAALFSELKQEQKKVDELIAKLVKNRTRIVNESDVFSWVIRREFQELRHPVDEEKARCLEGIGGHTRGLVASLDMQLEQAQGTRERLAQAECVLEQFGNEDHHEFIWKFHSMASR

SEQ ID NO: 8319 - protein, 249 aa, Homo sapiens
MAWQVSLLELEDWLQCPICLEVFKESLMLQCGHSYCKGCLVSLSYHLDTKVRCPMCWQVVDGSSSLPNVSLAWVIEALRLPGDPEPKVCVHHRNPLSLFCEKDQELICGLCGLLGSHQHHPVTPVSTVCSRMKEELAALFSELKQEQKKVDELIAKLVKNRTRIVNESDVFSWVIRREFQELRHPVDEEKARCLEGIGGHTRGLVASLDMQLEQAQGTRERLAQAECVLEQFGNEDHHEFIWFHSMASR

SEQ ID NO: 8320 - protein, 811 aa, Homo sapiens
MEAARALRLLLVVCGCLALPPLAEPVCPERCDCQHPQHLLCTNRGLRVVPKTSSLPSPHDVLTYSLGGNFITNITAFDFHRLGQLRRLDLQYNQIRSLHPKTFEKLSRLEELYLGNNLLQALAPGTLAPLRKLRILYANGNEISRLSRGSFEGLESLVKLRLDGNALGALPDAVFAPLGNLLYLHLESNRIRFLGKNAFAQLGKLRFLNLSANELQPSLRHAATFAPLRSLSSLILSANNLQHLGPRIFQHLPRLGLLSLRGNQLTHLAPEAFWGLEALRELRLEGNRLSQLPTALLEPLHSLEALDLSGNELSALHPATFGHLGRLRELSLRNNALSALSGDIFAASPALYRLDLDGNGWTCDCRLRGLKRWMGDWHSQGRLLTVFVQCRHPPALRGKYLDYLDDQQLQNGSCADPSPSASLTADRRRQPLPTAAGEEMTPPAGLAEELPPQPQLQQQGRFLAGVAWDGAARELVGNRSALRLSRRGPGLQQPSPSVAAAAGPAPQSLDLHKKPQRGRPTRADPALAEPTPTASPGSAPSPAGDPWQRATKHRLGTEHQERAAQSDGGAGLPPLVSDPCDFNKFILCNLTVEAVGADSASVRWAVREHRSPRPLGGARFRLLFDRFGQQPKFHRFVYLPESSDSATLRELRGDTPYLVCVEGVLGGRVCPVAPRDHCAGLVTLPEAGSRGGVDYQLLTLALLTVNALLVLLALAAWASRWLRRKLRARRKGGAPVHVRHMYSTRRPLRSMGTGVSADFSGFQSHRPRTTVCALSEADLIEFPCDRFMDSAGGGAGGSLRREDRLLQRFAD

SEQ ID NO: 8321 - protein, 445 aa, Homo sapiens
MREIVHLQAGQCGNQIGAKFWEVISDEHGIDPTGTYHGDSDLQLERINVYYNEATGGKYVPRAVLVDLEPGTMDSVRSGPFGQIFRPDNFVFGQSGAGNNWAKGHYTEGAELVDSVLDVVRKEAESCDCLQGFQLTHSLGGGTGSGMGTLLISKIREEYPDRIMNTFSVVPSPKVSDTVVEPYNATLSVHQLVENTDETYCIDNEALYDICFRTLKLTTPTYGDLNHLVSATMSGVTTCLRFPGQLNADLRKLAVNMVPFPRLHFFMPGFAPLTSRGSQQYRALTVPELTQQMFDAKNMMAACDPRHGRYLTVAAVFRGRMSMKEVDEQMLNVQNKNSSYFVEWIPNNVKTAVCDIPPRGLKMSATFIGNSTAIQELFKRISEQFTAMFRRKAFLHWYTGEGMDEMEFTEAESNMNDLVSEYQQYQDATAEEEGEFEEEAEEEVA

SEQ ID NO: 8322 - protein, 570 aa, Homo sapiens
MGFLQLLVVAVLASEHRVAGAAEVFGNSSEGLIEFSVGKFRYFELNRPFPEEAILHDISSNVTFLIFQIHSQYQNTTVSFSPTLLSNSSETGTASGLVFILRPEQSTCTWYLGTSGIQPVQNMAILLSYSERDPVPGGCNLEFDLDIDPNIYLEYNFFETTIKFAPANLGYARGVDPPPCDAGTDQDSRWRLQYDVYQYFLPENDLTEEMLLKHLQRMVSVPQVKASALKVVTLTANDKTSVSFSSLPGQGVIYNVIVWDPFLNTSAAYIPAHTYACSFEAGEGSCASLGRVSSKVFFTLFALLGFFICFFGHRFWKTELFFIGFIIMGFFFYILITRLTPIKYDVNLILTAVTGSVGGMFLVAVWWRFGILSICMLCVGLVLGFLISSVTFFTPLGNLKIFHDDGVFWVTFSCIAILIPVVFMGCLRILNILTCGVIGSYSVVLAIDSYWSTSLSYITLNVLKRALNKDFHRAFTNVPFQTNDFIILAVWGMLAVSGITLQIRRERGRPFFPPHPYKLWKQERERRVTNILDPSYHIPPLRERLYGRLTQIKGLFQKEQPAGERTPLLL

SEQ ID NO: 8323 - protein, 1732 aa, Homo sapiens
MPEPWGTVYFLGIAQVFSFLFSWWNLEGVMNQADAPRPLNWTIRKLCHAAFLPSVRLLKAQKSWIERAFYKRECVHIIPSTKDPHRCCCGRLIGQHVGLTPSISVLQNEKNESRLSRNDIQSEKWSISKHTQLSPTDAFGTIEFQGGGHSNKAMYVRVSFDTKPDLLLHLMTKEWQLELPKLLISVHGGLQNFELQPKLKQVFGKGLIKAAMTTGAWIFTGGVNTGVIRHVGDALKDHASKSRGKICTIGIAPWGIVENQEDLIGRDVVRPYQTMSNPMSKLTVLNSMHSHFILADNGTTGKYGAEVKLRRQLEKHISLQKINTRCLPFFSLDSRLFYSFWGSCQLDSVGIGQGVPVVALIVEGGPNVISIVLEYLRDTPPVPVVVCDGSGRASDILAFGHKYSEEGGLINESLRDQLLVTIQKTFTYTRTQAQHLFIILMECMKKKELITVFRMGSEGHQDIDLAILTALLKGANASAPDQLSLALAWNRVDIARSQIFIYGQQWPVGSLEQAMLDALVLDRVDFVKLLIENGVSMHRFLTISRLEELYNTRHGPSNTLYHLVRDVKKGNLPPDYRISLIDIGLVIEYLMGGAYRCNYTRKRFRTLYHNLFGPKRPKALKLLGMEDDIPLRRGRKTTKKREEEVDIDLDDPEINHFPFPFHELMVWAVLMKRQKMALFFWQHGEEAMAKALVACKLCKAMAHEASENDMVDDISQELNHNSRDFGQLAVELLDQSYKQDEQLAMKLLTYELKNWSNATCLQLAVAAKHRDFIAHTCSQMLLTDMWMGRLRMRKNSGLKVILGILLPPSILSLEFKNKDDMPYMSQAQEIHLQEKEAEEPEKPTKEKEEEDMELTAMLGRNNGESSRKKDEEEVQSKHRLIPLGRKIYEFYNAPIVKFWFYTLAYIGYLMLFNYIVLVKMERWPSTQEWIVISYIFTLGIEKMREILMSEPGKLLQKVKVWLQEYWNVTDLIAILLFSVGMILRLQDQPFRSDGRVIYCVNIIYWYIRLLDIFGVNKYLGPYVMMIGKMMIDMMYFVIIMLVVLMSFGVARQAILFPNEEPSWKLAKNIFYMPYWMIYGEVFADQIDPPCGQNETREDGKIIQLPPCKTGAWIVPAIMACYLLVANILLVNLLIAVFNNTFFEVKSISNQVWKFQRYQLIMTFHERPVLPPPLIIFSHMTMIFQHLCCRWRKHESDPDERDYGLKLFITDDELKKVHDFEEQCIEEYFREKDDRFNSSNDERIRVTSERVENMSMRLEEVNEREHSMKASLQTVDIRLAQLEDLIGRMATALERLTGLERAESNKIRSRTSSDCTDAAYIVRQSSFNSQEGNTFKLQESIDPAGEETMSPTSPTLMPRMRSHSFYSVNMKDKGGIEKLESIFKERSLSLHRATSSHSVAKEPKAPAAPANTLAIVPDSRRPSSCIDIYVSAMDELHCDIDPLDNSVNILGLGEPSFSTPVPSTAPSSSAYATLAPTDRPPSRSIDFEDITSMDTRSFSSDYTHLPECQNPWDSEPPMYHTIERSKSSRYLATTPFLLEEAPIVKSHSFMFSPSRSYYANFGVPVKTAEYTSITDCIDTRCVNAPQAIADRAAFPGGLGDKVEDLTCCHPEREAELSHPSSDSEENEAKGRRATIAISSQEGDNSERTLSNNITVPKIERANSYSAEEPSAPYAHTRKSFSISDKLDRQRNTASLRNPFQRSKSSKPEGRGDSLSMRRLSRTSAFQSFESKHN

SEQ ID NO: 8324 - protein, 1707 aa, Homo sapiens
MPEPWGTVYFLGIAQVFSFLFSWWNLEGVMNQADAPRPLNWTIRKLCHAAFLPSVRLLKAQKSWIERAFYKRECVHIIPSTKDPHRCCCGRLIGQHVGLTPSISVLQNEKNESRLSRNDIQSEKWSISKHTQLSPTDAFGTIEFQGGGHSNKAMYVRVSFDTKPDLLLHLMTKEWQLELPKLLISVHGGLQNFELQPKLKQVFGKGLIKAAMTTGAWIFTGGVNTGVIRHVGDALKDHASKSRGKICTIGIAPWGIVENQEDLIGRDVVRPYQTMSNPMSKLTVLNSMHSHFILADNGTTGKYGAEVKLRRQLEKHISLQKINTRIGQGVPVVALIVEGGPNVISIVLEYLRDTPPVPVVVCDGSGRASDILAFGHKYSEEGGLINESLRDQLLVTIQKTFTYTRTQAQHLFIILMECMKKKELITVFRMGSEGHQDIDLAILTALLKGANASAPDQLSLALAWNRVDIARSQIFIYGQQWPVGSLEQAMLDALVLDRVDFVKLLIENGVSMHRFLTISRLEELYNTRHGPSNTLYHLVRDVKKGNLPPDYRISLIDIGLVIEYLMGGAYRCNYTRKRFRTLYHNLFGPKRPKALKLLGMEDDIPLRRGRKTTKKREEEVDIDLDDPEINHFPFPFHELMVWAVLMKRQKMALFFWQHGEEAMAKALVACKLCKAMAHEASENDMVDDISQELNHNSRDFGQLAVELLDQSYKQDEQLAMKLLTYELKNWSNATCLQLAVAAKHRDFIAHTCSQMLLTDMWMGRLRMRKNSGLKVILGILLPPSILSLEFKNKDDMPYMSQAQEIHLQEKEAEEPEKPTKEKEEEDMELTAMLGRNNGESSRKKDEEEVQSKHRLIPLGRKIYEFYNAPIVKFWFYTLAYIGYLMLFNYIVLVKMERWPSTQEWIVISYIFTLGIEKMREILMSEPGKLLQKVKVWLQEYWNVTDLIAILLFSVGMILRLQDQPFRSDGRVIYCVNIIYWYIRLLDIFGVNKYLGPYVMMIGKMMIDMMYFVIIMLVVLMSFGVARQAILFPNEEPSWKLAKNIFYMPYWMIYGEVFADQIDPPCGQNETREDGKIIQLPPCKTGAWIVPAIMACYLLVANILLVNLLIAVFNNTFFEVKSISNQVWKFQRYQLIMTFHERPVLPPPLIIFSHMTMIFQHLCCRWRKHESDPDERDYGLKLFITDDELKKVHDFEEQCIEEYFREKDDRFNSSNDERIRVTSERVENMSMRLEEVNEREHSMKASLQTVDIRLAQLEDLIGRMATALERLTGLERAESNKIRSRTSSDCTDAAYIVRQSSFNSQEGNTFKLQESIDPAGEETMSPTSPTLMPRMRSHSFYSVNMKDKGGIEKLESIFKERSLSLHRATSSHSVAKEPKAPAAPANTLAIVPDSRRPSSCIDIYVSAMDELHCDIDPLDNSVNILGLGEPSFSTPVPSTAPSSSAYATLAPTDRPPSRSIDFEDITSMDTRSFSSDYTHLPECQNPWDSEPPMYHTIERSKSSRYLATTPFLLEEAPIVKSHSFMFSPSRSYYANFGVPVKTAEYTSITDCIDTRCVNAPQAIADRAAFPGGLGDKVEDLTCCHPEREAELSHPSSDSEENEAKGRRATIAISSQEGDNSERTLSNNITVPKIERANSYSAEEPSAPYAHTRKSFSISDKLDRQRNTASLRNPFQRSKSSKPEGRGDSLSMRRLSRTSAFQSFESKHN

SEQ ID NO: 8325 - protein, 1719 aa, Homo sapiens
MPEPWGTVYFLGIAQVFSFLFSWWNLEGVMNQADAPRPLNWTIRKLCHAAFLPSVRLLKAQKSWIERAFYKRECVHIIPSTKDPHRCCCGRLIGQHVGLTPSISVLQNEKNESRLSRNDIQSEKWSISKHTQLSPTDAFGTIEFQGGGHSNKAMYVRVSFDTKPDLLLHLMTKEWQLELPKLLISVHGGLQNFELQPKLKQVFGKGLIKAAMTTGAWIFTGGVNTGVIRHVGDALKDHASKSRGKICTIGIAPWGIVENQEDLIGRDVVRPYQTMSNPMSKLTVLNSMHSHFILADNGTTGKYGAEVKLRRQLEKHISLQKINTRIGQGVPVVALIVEGGPNVISIVLEYLRDTPPVPVVVCDGSGRASDILAFGHKYSEEGGLINESLRDQLLVTIQKTFTYTRTQAQHLFIILMECMKKKELITVFRMGSEGHQDIDLAILTALLKGANASAPDQLSLALAWNRVDIARSQIFIYGQQWPVGSLEQAMLDALVLDRVDFVKLLIENGVSMHRFLTISRLEELYNTRHGPSNTLYHLVRDVKKREYPGFGWIYFKGNLPPDYRISLIDIGLVIEYLMGGAYRCNYTRKRFRTLYHNLFGPKRPKALKLLGMEDDIPLRRGRKTTKKREEEVDIDLDDPEINHFPFPFHELMVWAVLMKRQKMALFFWQHGEEAMAKALVACKLCKAMAHEASENDMVDDISQELNHNSRDFGQLAVELLDQSYKQDEQLAMKLLTYELKNWSNATCLQLAVAAKHRDFIAHTCSQMLLTDMWMGRLRMRKNSGLKVILGILLPPSILSLEFKNKDDMPYMSQAQEIHLQEKEAEEPEKPTKEKEEEDMELTAMLGRNNGESSRKKDEEEVQSKHRLIPLGRKIYEFYNAPIVKFWFYTLAYIGYLMLFNYIVLVKMERWPSTQEWIVISYIFTLGIEKMREILMSEPGKLLQKVKVWLQEYWNVTDLIAILLFSVGMILRLQDQPFRSDGRVIYCVNIIYWYIRLLDIFGVNKYLGPYVMMIGKMMIDMMYFVIIMLVVLMSFGVARQAILFPNEEPSWKLAKNIFYMPYWMIYGEVFADQIDPPCGQNETREDGKIIQLPPCKTGAWIVPAIMACYLLVANILLVNLLIAVFNNTFFEVKSISNQVWKFQRYQLIMTFHERPVLPPPLIIFSHMTMIFQHLCCRWRKHESDPDERDYGLKLFITDDELKKVHDFEEQCIEEYFREKDDRFNSSNDERIRVTSERVENMSMRLEEVNEREHSMKASLQTVDIRLAQLEDLIGRMATALERLTGLERAESNKIRSRTSSDCTDAAYIVRQSSFNSQEGNTFKLQESIDPAGEETMSPTSPTLMPRMRSHSFYSVNMKDKGGIEKLESIFKERSLSLHRATSSHSVAKEPKAPAAPANTLAIVPDSRRPSSCIDIYVSAMDELHCDIDPLDNSVNILGLGEPSFSTPVPSTAPSSSAYATLAPTDRPPSRSIDFEDITSMDTRSFSSDYTHLPECQNPWDSEPPMYHTIERSKSSRYLATTPFLLEEAPIVKSHSFMFSPSRSYYANFGVPVKTAEYTSITDCIDTRCVNAPQAIADRAAFPGGLGDKVEDLTCCHPEREAELSHPSSDSEENEAKGRRATIAISSQEGDNSERTLSNNITVPKIERANSYSAEEPSAPYAHTRKSFSISDKLDRQRNTASLRNPFQRSKSSKPEGRGDSLSMRRLSRTSAFQSFESKHN

SEQ ID NO: 8326 - protein, 1697 aa, Homo sapiens
MPEPWGTVYFLGIAQVFSFLFSWWNLEGVMNQADAPRPLNWTIRKLCHAAFLPSVRLLKAQKSWIERAFYKRECVHIIPSTKDPHRCCCGRLIGQHVGLTPSISVLQNEKNESRLSRNDIQSEKWSISKHTQLSPTDAFGTIEFQGGGHSNKAMYVRVSFDTKPDLLLHLMTKEWQLELPKLLISVHGGLQNFELQPKLKQVFGKGLIKAAMTTGAWIFTGGVNTGVIRHVGDALKDHASKSRGKICTIGIAPWGIVENQEDLIGRDVVRPYQTMSNPMSKLTVLNSMHSHFILADNGTTGKYGAEVKLRRQLEKHISLQKINTRIGQGVPVVALIVEGGPNVISIVLEYLRDTPPVPVVVCDGSGRASDILAFGHKYSEEGGLINESLRDQLLVTIQKTFTYTRTQAQHLFIILMECMKKKELITVFRMGSEGHQDIDLAILTALLKGANASAPDQLSLALAWNRVDIARSQIFIYGQQWPVGSLEQAMLDALVLDRVDFVKLLIENGVSMHRFLTISRLEELYNTRHGPSNTLYHLVRDVKKGNLPPDYRISLIDIGLVIEYLMGGAYRCNYTRKRFRTLYHNLFGPKRDDIPLRRGRKTTKKREEEVDIDLDDPEINHFPFPFHELMVWAVLMKRQKMALFFWQHGEEAMAKALVACKLCKAMAHEASENDMVDDISQELNHNSRDFGQLAVELLDQSYKQDEQLAMKLLTYELKNWSNATCLQLAVAAKHRDFIAHTCSQMLLTDMWMGRLRMRKNSGLKVILGILLPPSILSLEFKNKDDMPYMSQAQEIHLQEKEAEEPEKPTKEKEEEDMELTAMLGRNNGESSRKKDEEEVQSKHRLIPLGRKIYEFYNAPIVKFWFYTLAYIGYLMLFNYIVLVKMERWPSTQEWIVISYIFTLGIEKMREILMSEPGKLLQKVKVWLQEYWNVTDLIAILLFSVGMILRLQDQPFRSDGRVIYCVNIIYWYIRLLDIFGVNKYLGPYVMMIGKMMIDMMYFVIIMLVVLMSFGVARQAILFPNEEPSWKLAKNIFYMPYWMIYGEVFADQIDPPCGQNETREDGKIIQLPPCKTGAWIVPAIMACYLLVANILLVNLLIAVFNNTFFEVKSISNQVWKFQRYQLIMTFHERPVLPPPLIIFSHMTMIFQHLCCRWRKHESDPDERDYGLKLFITDDELKKVHDFEEQCIEEYFREKDDRFNSSNDERIRVTSERVENMSMRLEEVNEREHSMKASLQTVDIRLAQLEDLIGRMATALERLTGLERAESNKIRSRTSSDCTDAAYIVRQSSFNSQEGNTFKLQESIDPAGEETMSPTSPTLMPRMRSHSFYSVNMKDKGGIEKLESIFKERSLSLHRATSSHSVAKEPKAPAAPANTLAIVPDSRRPSSCIDIYVSAMDELHCDIDPLDNSVNILGLGEPSFSTPVPSTAPSSSAYATLAPTDRPPSRSIDFEDITSMDTRSFSSDYTHLPECQNPWDSEPPMYHTIERSKSSRYLATTPFLLEEAPIVKSHSFMFSPSRSYYANFGVPVKTAEYTSITDCIDTRCVNAPQAIADRAAFPGGLGDKVEDLTCCHPEREAELSHPSSDSEENEAKGRRATIAISSQEGDNSERTLSNNITVPKIERANSYSAEEPSAPYAHTRKSFSISDKLDRQRNTASLRNPFQRSKSSKPEGRGDSLSMRRLSRTSAFQSFESKHN

SEQ ID NO: 8327 - protein, 1709 aa, Homo sapiens
MPEPWGTVYFLGIAQVFSFLFSWWNLEGVMNQADAPRPLNWTIRKLCHAAFLPSVRLLKAQKSWIERAFYKRECVHIIPSTKDPHRCCCGRLIGQHVGLTPSISVLQNEKNESRLSRNDIQSEKWSISKHTQLSPTDAFGTIEFQGGGHSNKAMYVRVSFDTKPDLLLHLMTKEWQLELPKLLISVHGGLQNFELQPKLKQVFGKGLIKAAMTTGAWIFTGGVNTGVIRHVGDALKDHASKSRGKICTIGIAPWGIVENQEDLIGRDVVRPYQTMSNPMSKLTVLNSMHSHFILADNGTTGKYGAEVKLRRQLEKHISLQKINTRIGQGVPVVALIVEGGPNVISIVLEYLRDTPPVPVVVCDGSGRASDILAFGHKYSEEGGLINESLRDQLLVTIQKTFTYTRTQAQHLFIILMECMKKKELITVFRMGSEGHQDIDLAILTALLKGANASAPDQLSLALAWNRVDIARSQIFIYGQQWPVGSLEQAMLDALVLDRVDFVKLLIENGVSMHRFLTISRLEELYNTRHGPSNTLYHLVRDVKKREYPGFGWIYFKGNLPPDYRISLIDIGLVIEYLMGGAYRCNYTRKRFRTLYHNLFGPKRDDIPLRRGRKTTKKREEEVDIDLDDPEINHFPFPFHELMVWAVLMKRQKMALFFWQHGEEAMAKALVACKLCKAMAHEASENDMVDDISQELNHNSRDFGQLAVELLDQSYKQDEQLAMKLLTYELKNWSNATCLQLAVAAKHRDFIAHTCSQMLLTDMWMGRLRMRKNSGLKVILGILLPPSILSLEFKNKDDMPYMSQAQEIHLQEKEAEEPEKPTKEKEEEDMELTAMLGRNNGESSRKKDEEEVQSKHRLIPLGRKIYEFYNAPIVKFWFYTLAYIGYLMLFNYIVLVKMERWPSTQEWIVISYIFTLGIEKMREILMSEPGKLLQKVKVWLQEYWNVTDLIAILLFSVGMILRLQDQPFRSDGRVIYCVNIIYWYIRLLDIFGVNKYLGPYVMMIGKMMIDMMYFVIIMLVVLMSFGVARQAILFPNEEPSWKLAKNIFYMPYWMIYGEVFADQIDPPCGQNETREDGKIIQLPPCKTGAWIVPAIMACYLLVANILLVNLLIAVFNNTFFEVKSISNQVWKFQRYQLIMTFHERPVLPPPLIIFSHMTMIFQHLCCRWRKHESDPDERDYGLKLFITDDELKKVHDFEEQCIEEYFREKDDRFNSSNDERIRVTSERVENMSMRLEEVNEREHSMKASLQTVDIRLAQLEDLIGRMATALERLTGLERAESNKIRSRTSSDCTDAAYIVRQSSFNSQEGNTFKLQESIDPAGEETMSPTSPTLMPRMRSHSFYSVNMKDKGGIEKLESIFKERSLSLHRATSSHSVAKEPKAPAAPANTLAIVPDSRRPSSCIDIYVSAMDELHCDIDPLDNSVNILGLGEPSFSTPVPSTAPSSSAYATLAPTDRPPSRSIDFEDITSMDTRSFSSDYTHLPECQNPWDSEPPMYHTIERSKSSRYLATTPFLLEEAPIVKSHSFMFSPSRSYYANFGVPVKTAEYTSITDCIDTRCVNAPQAIADRAAFPGGLGDKVEDLTCCHPEREAELSHPSSDSEENEAKGRRATIAISSQEGDNSERTLSNNITVPKIERANSYSAEEPSAPYAHTRKSFSISDKLDRQRNTASLRNPFQRSKSSKPEGRGDSLSMRRLSRTSAFQSFESKHN

SEQ ID NO: 8328 - protein, 1719 aa, Homo sapiens
MPEPWGTVYFLGIAQVFSFLFSWWNLEGVMNQADAPRPLNWTIRKLCHAAFLPSVRLLKAQKSWIERAFYKRECVHIIPSTKDPHRCCCGRLIGQHVGLTPSISVLQNEKNESRLSRNDIQSEKWSISKHTQLSPTDAFGTIEFQGGGHSNKAMYVRVSFDTKPDLLLHLMTKEWQLELPKLLISVHGGLQNFELQPKLKQVFGKGLIKAAMTTGAWIFTGGVNTGVIRHVGDALKDHASKSRGKICTIGIAPWGIVENQEDLIGRDVVRPYQTMSNPMSKLTVLNSMHSHFILADNGTTGKYGAEVKLRRQLEKHISLQKINTRIGQGVPVVALIVEGGPNVISIVLEYLRDTPPVPVVVCDGSGRASDILAFGHKYSEEGGLINESLRDQLLVTIQKTFTYTRTQAQHLFIILMECMKKKELITVFRMGSEGHQDIDLAILTALLKGANASAPDQLSLALAWNRVDIARSQIFIYGQQWPVGSLEQAMLDALVLDRVDFVKLLIENGVSMHRFLTISRLEELYNTRHGPSNTLYHLVRDVKKGNLPPDYRISLIDIGLVIEYLMGGAYRCNYTRKRFRTLYHNLFGPKRPKALKLLGMEDDIPLRRGRKTTKKREEEVDIDLDDPEINHFPFPFHELMVWAVLMKRQKMALFFWQHGEEAMAKALVACKLCKAMAHEASENDMVDDISQELNHNSRDFGQLAVELLDQSYKQDEQLAMKLLTYELKNWSNATCLQLAVAAKHRDFIAHTCSQMLLTDMWMGRLRMRKNSGLKVILGILLPPSILSLEFKNKDDMPYMSQAQEIHLQEKEAEEPEKPTKEKEEEDMELTAMLGRNNGESSRKKDEEEVQSKHRLIPLGRKIYEFYNAPIVKFWFYTLAYIGYLMLFNYIVLVKMERWPSTQEWIVISYIFTLGIEKMREILMSEPGKLLQKVKVWLQEYWNVTDLIAILLFSVGMILRLQDQPFRSDGRVIYCVNIIYWYIRLLDIFGVNKYLGPYVMMIGKMMIDMMYFVIIMLVVLMSFGVARQAILFPNEEPSWKLAKNIFYMPYWMIYGEVFADQIDRKQVYDSHTPKSAPCGQNETREDGKIIQLPPCKTGAWIVPAIMACYLLVANILLVNLLIAVFNNTFFEVKSISNQVWKFQRYQLIMTFHERPVLPPPLIIFSHMTMIFQHLCCRWRKHESDPDERDYGLKLFITDDELKKVHDFEEQCIEEYFREKDDRFNSSNDERIRVTSERVENMSMRLEEVNEREHSMKASLQTVDIRLAQLEDLIGRMATALERLTGLERAESNKIRSRTSSDCTDAAYIVRQSSFNSQEGNTFKLQESIDPAGEETMSPTSPTLMPRMRSHSFYSVNMKDKGGIEKLESIFKERSLSLHRATSSHSVAKEPKAPAAPANTLAIVPDSRRPSSCIDIYVSAMDELHCDIDPLDNSVNILGLGEPSFSTPVPSTAPSSSAYATLAPTDRPPSRSIDFEDITSMDTRSFSSDYTHLPECQNPWDSEPPMYHTIERSKSSRYLATTPFLLEEAPIVKSHSFMFSPSRSYYANFGVPVKTAEYTSITDCIDTRCVNAPQAIADRAAFPGGLGDKVEDLTCCHPEREAELSHPSSDSEENEAKGRRATIAISSQEGDNSERTLSNNITVPKIERANSYSAEEPSAPYAHTRKSFSISDKLDRQRNTASLRNPFQRSKSSKPEGRGDSLSMRRLSRTSAFQSFESKHN

SEQ ID NO: 8329 - protein, 1722 aa, Homo sapiens
MPEPWGTVYFLGIAQVFSFLFSWWNLEGVMNQADAPRPLNWTIRKLCHAAFLPSVRLLKAQKSWIERAFYKRECVHIIPSTKDPHRCCCGRLIGQHVGLTPSISVLQNEKNESRLSRNDIQSEKWSISKHTQLSPTDAFGTIEFQGGGHSNKAMYVRVSFDTKPDLLLHLMTKEWQLELPKLLISVHGGLQNFELQPKLKQVFGKGLIKAAMTTGAWIFTGGVNTGVIRHVGDALKDHASKSRGKICTIGIAPWGIVENQEDLIGRDVVRPYQTMSNPMSKLTVLNSMHSHFILADNGTTGKYGAEVKLRRQLEKHISLQKINTRCLPFFSLDSRLFYSFWGSCQLDSVGIGQGVPVVALIVEGGPNVISIVLEYLRDTPPVPVVVCDGSGRASDILAFGHKYSEEGGLINESLRDQLLVTIQKTFTYTRTQAQHLFIILMECMKKKELITVFRMGSEGHQDIDLAILTALLKGANASAPDQLSLALAWNRVDIARSQIFIYGQQWPVGSLEQAMLDALVLDRVDFVKLLIENGVSMHRFLTISRLEELYNTRHGPSNTLYHLVRDVKKGNLPPDYRISLIDIGLVIEYLMGGAYRCNYTRKRFRTLYHNLFGPKRDDIPLRRGRKTTKKREEEVDIDLDDPEINHFPFPFHELMVWAVLMKRQKMALFFWQHGEEAMAKALVACKLCKAMAHEASENDMVDDISQELNHNSRDFGQLAVELLDQSYKQDEQLAMKLLTYELKNWSNATCLQLAVAAKHRDFIAHTCSQMLLTDMWMGRLRMRKNSGLKVILGILLPPSILSLEFKNKDDMPYMSQAQEIHLQEKEAEEPEKPTKEKEEEDMELTAMLGRNNGESSRKKDEEEVQSKHRLIPLGRKIYEFYNAPIVKFWFYTLAYIGYLMLFNYIVLVKMERWPSTQEWIVISYIFTLGIEKMREILMSEPGKLLQKVKVWLQEYWNVTDLIAILLFSVGMILRLQDQPFRSDGRVIYCVNIIYWYIRLLDIFGVNKYLGPYVMMIGKMMIDMMYFVIIMLVVLMSFGVARQAILFPNEEPSWKLAKNIFYMPYWMIYGEVFADQIDPPCGQNETREDGKIIQLPPCKTGAWIVPAIMACYLLVANILLVNLLIAVFNNTFFEVKSISNQVWKFQRYQLIMTFHERPVLPPPLIIFSHMTMIFQHLCCRWRKHESDPDERDYGLKLFITDDELKKVHDFEEQCIEEYFREKDDRFNSSNDERIRVTSERVENMSMRLEEVNEREHSMKASLQTVDIRLAQLEDLIGRMATALERLTGLERAESNKIRSRTSSDCTDAAYIVRQSSFNSQEGNTFKLQESIDPAGEETMSPTSPTLMPRMRSHSFYSVNMKDKGGIEKLESIFKERSLSLHRATSSHSVAKEPKAPAAPANTLAIVPDSRRPSSCIDIYVSAMDELHCDIDPLDNSVNILGLGEPSFSTPVPSTAPSSSAYATLAPTDRPPSRSIDFEDITSMDTRSFSSDYTHLPECQNPWDSEPPMYHTIERSKSSRYLATTPFLLEEAPIVKSHSFMFSPSRSYYANFGVPVKTAEYTSITDCIDTRCVNAPQAIADRAAFPGGLGDKVEDLTCCHPEREAELSHPSSDSEENEAKGRRATIAISSQEGDNSERTLSNNITVPKIERANSYSAEEPSAPYAHTRKSFSISDKLDRQRNTASLRNPFQRSKSSKPEGRGDSLSMRRLSRTSAFQSFESKHN

SEQ ID NO: 8330 - protein, 1679 aa, Homo sapiens
MPEPWGTVYFLGIAQVFSFLFSWWNLEGVMNQADAPRPLNWTIRKLCHAAFLPSVRLLKAQKSWIERAFYKRECVHIIPSTKDPHRCCCGRLIGQHVGLTPSISVLQNEKNESRLSRNDIQSEKWSISKHTQLSPTDAFGTIEFQGGGHSNKAMYVRVSFDTKPDLLLHLMTKEWQLELPKLLISVHGGLQNFELQPKLKQVFGKGLIKAAMTTGAWIFTGGVNTGVIRHVGDALKDHASKSRGKICTIGIAPWGIVENQEDLIGRDVVRPYQTMSNPMSKLTVLNSMHSHFILADNGTTGKYGAEVKLRRQLEKHISLQKINTRIGQGVPVVALIVEGGPNVISIVLEYLRDTPPVPVVVCDGSGRASDILAFGHKYSEEGGLINESLRDQLLVTIQKTFTYTRTQAQHLFIILMECMKKKELITVFRMGSEGHQDIDLAILTALLKGANASAPDQLSLALAWNRVDIARSQIFIYGQQWPVGSLEQAMLDALVLDRVDFVKLLIENGRHGPSNTLYHLVRDVKKGNLPPDYRISLIDIGLVIEYLMGGAYRCNYTRKRFRTLYHNLFGPKRDDIPLRRGRKTTKKREEEVDIDLDDPEINHFPFPFHELMVWAVLMKRQKMALFFWQHGEEAMAKALVACKLCKAMAHEASENDMVDDISQELNHNSRDFGQLAVELLDQSYKQDEQLAMKLLTYELKNWSNATCLQLAVAAKHRDFIAHTCSQMLLTDMWMGRLRMRKNSGLKVILGILLPPSILSLEFKNKDDMPYMSQAQEIHLQEKEAEEPEKPTKEKEEEDMELTAMLGRNNGESSRKKDEEEVQSKHRLIPLGRKIYEFYNAPIVKFWFYTLAYIGYLMLFNYIVLVKMERWPSTQEWIVISYIFTLGIEKMREILMSEPGKLLQKVKVWLQEYWNVTDLIAILLFSVGMILRLQDQPFRSDGRVIYCVNIIYWYIRLLDIFGVNKYLGPYVMMIGKMMIDMMYFVIIMLVVLMSFGVARQAILFPNEEPSWKLAKNIFYMPYWMIYGEVFADQIDPPCGQNETREDGKIIQLPPCKTGAWIVPAIMACYLLVANILLVNLLIAVFNNTFFEVKSISNQVWKFQRYQLIMTFHERPVLPPPLIIFSHMTMIFQHLCCRWRKHESDPDERDYGLKLFITDDELKKVHDFEEQCIEEYFREKDDRFNSSNDERIRVTSERVENMSMRLEEVNEREHSMKASLQTVDIRLAQLEDLIGRMATALERLTGLERAESNKIRSRTSSDCTDAAYIVRQSSFNSQEGNTFKLQESIDPAGEETMSPTSPTLMPRMRSHSFYSVNMKDKGGIEKLESIFKERSLSLHRATSSHSVAKEPKAPAAPANTLAIVPDSRRPSSCIDIYVSAMDELHCDIDPLDNSVNILGLGEPSFSTPVPSTAPSSSAYATLAPTDRPPSRSIDFEDITSMDTRSFSSDYTHLPECQNPWDSEPPMYHTIERSKSSRYLATTPFLLEEAPIVKSHSFMFSPSRSYYANFGVPVKTAEYTSITDCIDTRCVNAPQAIADRAAFPGGLGDKVEDLTCCHPEREAELSHPSSDSEENEAKGRRATIAISSQEGDNSERTLSNNITVPKIERANSYSAEEPSAPYAHTRKSFSISDKLDRQRNTASLRNPFQRSKSSKPEGRGDSLSMRRLSRTSAFQSFESKHN

SEQ ID NO: 8331 - protein, 1325 aa, Homo sapiens
MPEPWGTVYFLGIAQVFSFLFSWWNLEGVMNQADAPRPLNWTIRKLCHAAFLPSVRLLKAQKSWIERAFYKRECVHIIPSTKDPHRCCCGRLIGQHVGLTPSISVLQNEKNESRLSRNDIQSEKWSISKHTQLSPTDAFGTIEFQGGGHSNKAMYVRVSFDTKPDLLLHLMTKEWQLELPKLLISVHGGLQNFELQPKLKQVFGKGLIKAAMTTGAWIFTGGVNTGVIRHVGDALKDHASKSRGKICTIGIAPWGIVENQEDLIGRDVVRPYQTMSNPMSKLTVLNSMHSHFILADNGTTGKYGAEVKLRRQLEKHISLQKINTRIGQGVPVVALIVEGGPNVISIVLEYLRDTPPVPVVVCDGSGRASDILAFGHKYSEEGGLINESLRDQLLVTIQKTFTYTRTQAQHLFIILMECMKKKELITVFRMGSEGHQDIDLAILTALLKGANASAPDQLSLALAWNRVDIARSQIFIYGQQWPVGSLEQAMLDALVLDRVDFVKLLIENGVSMHRFLTISRLEELYNTRHGPSNTLYHLVRDVKKGNLPPDYRISLIDIGLVIEYLMGGAYRCNYTRKRFRTLYHNLFGPKRPKALKLLGMEDDIPLRRGRKTTKKREEEVDIDLDDPEINHFPFPFHELMVWAVLMKRQKMALFFWQHGEEAMAKALVACKLCKAMAHEASENDMVDDISQELNHNSRDFGQLAVELLDQSYKQDEQLAMKLLTYELKNWSNATCLQLAVAAKHRDFIAHTCSQMLLTDMWMGRLRMRKNSGLKVILGILLPPSILSLEFKNKDDMPYMSQAQEIHLQEKEAEEPEKPTKEKEEEDMELTAMLGRNNGESSRKKDEEEVQSKHRLIPLGRKIYEFYNAPIVKFWFYTLAYIGYLMLFNYIVLVKMERWPSTQEWIVISYIFTLGIEKMREILMSEPGKLLQKVKVWLQEYWNVTDLIAILLFSVGMILRLQDQPFRSDGRVIYCVNIIYWYIRLLDIFGVNKYLGPYVMMIGKMMIDMMYFVIIMLVVLMSFGVARQAILFPNEEPSWKLAKNIFYMPYWMIYGEVFADQIDPPCGQNETREDGKIIQLPPCKTGAWIVPAIMACYLLVANILLVNLLIAVFNNTFFEVKSISNQVWKFQRYQLIMTFHERPVLPPPLIIFSHMTMIFQHLCCRWRKHESDPDERDYGLKLFITDDELKKVHDFEEQCIEEYFREKDDRFNSSNDERIRVTSERVENMSMRLEEVNEREHSMKASLQTVDIRLAQLEDLIGRMATALERLTGLERAESNKIRSRTSSDCTDAAYIVRQSSFNSQEGNTFKLQESIDPAEHPLYSV

SEQ ID NO: 8332 - protein, 1734 aa, Homo sapiens
MGKKWRDAAEMERGCSDREDNAESRRRSRSASRGRFAESWKRLSSKQGSTKRSGLPSQQTPAQKSWIERAFYKRECVHIIPSTKDPHRCCCGRLIGQHVGLTPSISVLQNEKNESRLSRNDIQSEKWSISKHTQLSPTDAFGTIEFQGGGHSNKAMYVRVSFDTKPDLLLHLMTKEWQLELPKLLISVHGGLQNFELQPKLKQVFGKGLIKAAMTTGAWIFTGGVNTGVIRHVGDALKDHASKSRGKICTIGIAPWGIVENQEDLIGRDVVRPYQTMSNPMSKLTVLNSMHSHFILADNGTTGKYGAEVKLRRQLEKHISLQKINTRCLPFFSLDSRLFYSFWGSCQLDSVGIGQGVPVVALIVEGGPNVISIVLEYLRDTPPVPVVVCDGSGRASDILAFGHKYSEEGGLINESLRDQLLVTIQKTFTYTRTQAQHLFIILMECMKKKELITVFRMGSEGHQDIDLAILTALLKGANASAPDQLSLALAWNRVDIARSQIFIYGQQWPVGSLEQAMLDALVLDRVDFVKLLIENGVSMHRFLTISRLEELYNTRHGPSNTLYHLVRDVKKGNLPPDYRISLIDIGLVIEYLMGGAYRCNYTRKRFRTLYHNLFGPKRPKALKLLGMEDDIPLRRGRKTTKKREEEVDIDLDDPEINHFPFPFHELMVWAVLMKRQKMALFFWQHGEEAMAKALVACKLCKAMAHEASENDMVDDISQELNHNSRDFGQLAVELLDQSYKQDEQLAMKLLTYELKNWSNATCLQLAVAAKHRDFIAHTCSQMLLTDMWMGRLRMRKNSGLKVILGILLPPSILSLEFKNKDDMPYMSQAQEIHLQEKEAEEPEKPTKEKEEEDMELTAMLGRNNGESSRKKDEEEVQSKHRLIPLGRKIYEFYNAPIVKFWFYTLAYIGYLMLFNYIVLVKMERWPSTQEWIVISYIFTLGIEKMREILMSEPGKLLQKVKVWLQEYWNVTDLIAILLFSVGMILRLQDQPFRSDGRVIYCVNIIYWYIRLLDIFGVNKYLGPYVMMIGKMMIDMMYFVIIMLVVLMSFGVARQAILFPNEEPSWKLAKNIFYMPYWMIYGEVFADQIDPPCGQNETREDGKIIQLPPCKTGAWIVPAIMACYLLVANILLVNLLIAVFNNTFFEVKSISNQVWKFQRYQLIMTFHERPVLPPPLIIFSHMTMIFQHLCCRWRKHESDPDERDYGLKLFITDDELKKVHDFEEQCIEEYFREKDDRFNSSNDERIRVTSERVENMSMRLEEVNEREHSMKASLQTVDIRLAQLEDLIGRMATALERLTGLERAESNKIRSRTSSDCTDAAYIVRQSSFNSQEGNTFKLQESIDPAGEETMSPTSPTLMPRMRSHSFYSVNMKDKGGIEKLESIFKERSLSLHRATSSHSVAKEPKAPAAPANTLAIVPDSRRPSSCIDIYVSAMDELHCDIDPLDNSVNILGLGEPSFSTPVPSTAPSSSAYATLAPTDRPPSRSIDFEDITSMDTRSFSSDYTHLPECQNPWDSEPPMYHTIERSKSSRYLATTPFLLEEAPIVKSHSFMFSPSRSYYANFGVPVKTAEYTSITDCIDTRCVNAPQAIADRAAFPGGLGDKVEDLTCCHPEREAELSHPSSDSEENEAKGRRATIAISSQEGDNSERTLSNNITVPKIERANSYSAEEPSAPYAHTRKSFSISDKLDRQRNTASLRNPFQRSKSSKPEGRGDSLSMRRLSRTSAFQSFESKHN

SEQ ID NO: 8333 - protein, 230 aa, Homo sapiens
MYVRVSFDTKPDLLLHLMTKEWQLELPKLLISVHGGLQNFELQPKLKQVFGKGLIKAAMTTGAWIFTGGVNTGVIRHVGDALKDHASKSRGKICTIGIAPWGIVENQEDLIGRDVVRPYQTMSNPMSKLTVLNSMHSHFILADNGTTGKYGAEVKLRRQLEKHISLQKINTRIGQGVPVVALIVEGGPNVISIVLEYLRDTPPVPVVVCDGSGRASDILAFGHKYSEEGG

SEQ ID NO: 8334 - protein, 793 aa, Homo sapiens
MMAALYPSTDLSGASSSSLPSSPSSSSPNEVMALKDVREVKEENTLNEKLFLLACDKGDYYMVKKILEENSSGDLNINCVDVLGRNAVTITIENENLDILQLLLDYGCQSADALLVAIDSEVVGAVDILLNHRPKRSSRPTIVKLMERIQNPEYSTTMDVAPVILAAHRNNYEILTMLLKQDVSLPKPHAVGCECTLCSAKNKKDSLRHSRFRLDIYRCLASPALIMLTEEDPILRAFELSADLKELSLVEVEFRNDYEELARQCKMFAKDLLAQARNSRELEVILNHTSSDEPLDKRGLLEERMNLSRLKLAIKYNQKEFVSQSNCQQFLNTVWFGQMSGYRRKPTCKKIMTVLTVGIFWPVLSLCYLIAPKSQFGRIIHTPFMKFIIHGASYFTFLLLLNLYSLVYNEDKKNTMGPALERIDYLLILWIIGMIWSDIKRLWYEGLEDFLEESRNQLSFVMNSLYLATFALKVVAHNKFHDFADRKDWDAFHPTLVAEGLFAFANVLSYLRLFFMYTTSSILGPLQISMGQMLQDFGKFLGMFLLVLFSFTIGLTQLYDKGYTSKEQKDCVGIFCEQQSNDTFHSFIGTCFALFWYIFSLAHVAIFVTRFSYGEELQSFVGAVIVGTYNVVVVIVLTKLLVAMLHKSFQLIANHEDKEWKFARAKLWLSYFDDKCTLPPPFNIIPSPKTICYMISSLSKWICSHTSKGKVKRQNSLKEWRNLKQKRDENYQKVMCCLVHRYLTSMRQKMQSTDQATVENLNELRQDLSKFRNEIRDLLGFRTSKYAMFYPRN

SEQ ID NO: 8335 - protein, 759 aa, Homo sapiens
MMAALYPSTDLSGASSSSLPSSPSSSSPNEVMALKDVREVKEENTLNEKLFLLACDKGDYYMVKKILEENSSGDLNINCVDVLGRNAVTITIENENLDILQLLLDYGCQKLMERIQNPEYSTTMDVAPVILAAHRNNYEILTMLLKQDVSLPKPHAVGCECTLCSAKNKKDSLRHSRFRLDIYRCLASPALIMLTEEDPILRAFELSADLKELSLVEVEFRNDYEELARQCKMFAKDLLAQARNSRELEVILNHTSSDEPLDKRGLLEERMNLSRLKLAIKYNQKEFVSQSNCQQFLNTVWFGQMSGYRRKPTCKKIMTVLTVGIFWPVLSLCYLIAPKSQFGRIIHTPFMKFIIHGASYFTFLLLLNLYSLVYNEDKKNTMGPALERIDYLLILWIIGMIWSDIKRLWYEGLEDFLEESRNQLSFVMNSLYLATFALKVVAHNKFHDFADRKDWDAFHPTLVAEGLFAFANVLSYLRLFFMYTTSSILGPLQISMGQMLQDFGKFLGMFLLVLFSFTIGLTQLYDKGYTSKEQKDCVGIFCEQQSNDTFHSFIGTCFALFWYIFSLAHVAIFVTRFSYGEELQSFVGAVIVGTYNVVVVIVLTKLLVAMLHKSFQLIANHEDKEWKFARAKLWLSYFDDKCTLPPPFNIIPSPKTICYMISSLSKWICSHTSKGKVKRQNSLKEWRNLKQKRDENYQKVMCCLVHRYLTSMRQKMQSTDQATVENLNELRQDLSKFRNEIRDLLGFRTSKYAMFYPRN

SEQ ID NO: 8336 - protein, 770 aa, Homo sapiens
MDRDLLRQSLNCHGSSLLSLLRSEQQDNPHFRSLLGSAAEPARGPPPQHPLQGRKEKRVDNIEIQKFISKKADLLFALSWKSDAPATSEINEDSEDHYAIMPPLEQFMEIPSMDRRELFFRDIERGDIVIGRISSIREFGFFMVLICLGSGIMRDIAHLEITALCPLRDVPSHSNHGDPLSYYQTGDIIRAGIKDIDRYHEKLAVSLYSSSLPPHLSGIKLGVISSEELPLYYRRSVELNSNSLESYENVMQSSLGFVNPGVVEFLLEKLGIDESNPPSLMRGLQSKNFSEDDFASALRKKQSASWALKCVKIGVDYFKVGRHVDAMNEYNKALEIDKQNVEALVARGALYATKGSLNKAIEDFELALENCPTHRNARKYLCQTLVERGGQLEEEEKFLNAESYYKKALALDETFKDAEDALQKLHKYMQKSLELREKQAEKEEKQKTKKIETSAEKLRKLLKEEKRLKKKRRKSTSSSSVSSADESVSSSSSSSSSGHKRHKKHKRNRSESSRSSRRHSSRASSNQIDQNRKDECYPVPANTSASFLNHKQEVEKLLGKQDRLQYEKTQIKEKDRCPLSSSSLEIPDDFGGRSEDPRDFYNSYKTQAGSSKTEKPYKSERHFSSRRNSSDSFCRNSEDKIYGYRRFEKDIEGRKEHYRRWEPGSVRHSTSPASSEYSWKSVEKYKKYAHSGSRDFSRHEQRYRLNTNQGEYEREDNYGEDIKTEVPEEDALSSKEHSESSVKKNLPQNLLNIFNQIAEFEKEKGNKSKN

SEQ ID NO: 8337 - protein, 653 aa, Homo sapiens
MDRDLLRQSLNCHGSSLLSLLRSEQQDNPHFRSLLGSAAEPARGPPPQHPLQGRKEKRVDNIEIQKFISKKADLLFALSWKSDAPATSEINEDSEDHYAIMPPLEQFMEIPSMDRRELFFRDIERGDIVIGRISSIREFGFFMVLICLGSGIMRDIAHLEITALCPLRDVPSHSNHGDPLSYYQTGDIIRAGIKDIDRYHEKLAVSLYSSSLPPHLSGIKLGVISSEELPLYYRRSVELNSNSLESYENVMQSSLGFVNPGVVEFLLEKLGIDESNPPSLMRGLQSKNFSEDDFASALRKKQSASWALKCVKIGVDYFKVGRHVDAMNEYNKALEIDKQNVEALVARGALYATKGSLNKAIEDFELALENCPTHRNARKYLCQTLVERGGQLEEEEKFLNAESYYKKALALDETFKDAEDALQKLHKYMQKSLELREKQAEKEEKQKTKKIETSAEKLRKLLKEEKRLKKKRRKSTSSSSVSSADESVSSSSSSSSSGHKRHKKHKRNRSESSRSSRRHSSRASSNQIDQNRKDECYPVPANTSASFLNHKQEVEKLLGKQDRLQYEKTQIKEKDRCPLSSSSLEIPDDFGVYSYLFKKLTIKQPQAGPSGDIPEEGIVIIDDSSIHVTDPEDLQVGQDMEVEDSGIDDPDHG

SEQ ID NO: 8338 - protein, 439 aa, Homo sapiens
MDRDLLRQSLNCHGSSLLSLLRSEQQDNPHFRSLLGSAAEPARGPPPQHPLQGRKEKRVDNIEIQKFISKKADLLFALSWKSDAPATSEINEDSEDHYAIMPPLEQFMEIPSMDRRELFFRDIERGDIVIGRISSIREFGFFMVLICLGSGIMRDIAHLEITALCPLRDVPSHSNHGDPLSYYQTGDIIRAGIKDIDRYHEKLAVSLYSSSLPPHLSGIKLGVISSEELPLYYRRSVELNSNSLESYENVMQSSLGFVNPGVVEFLLEKLGIDESNPPSLMRGLQSKNFSEDDFASALRKKQSASWALKCVKIGVDYFKVGRHVDAMNEYNKALEIDKQNVEALVARGALYATKGSLNKAIEDFELALENCPTHRNARKYLCQTLVERGGQLEEEEKFLNAESYYKKALALDETFKDAEDALQKLHKYMQVIPYFLLEI

SEQ ID NO: 8339 - protein, 469 aa, Homo sapiens
MAAASPLRDCQAWKDARLPLSTTSNEACKLFDATLTQYVKWTNDKSLGGIEGCLSKLKAADPTFVMGHAMATGLVLIGTGSSVKLDKELDLAVKTMVEISRTQPLTRREQLHVSAVETFANGNFPKACELWEQILQDHPTDMLALKFSHDAYFYLGYQEQMRDSVARIYPFWTPDIPLSSYVKGIYSFGLMETNFYDQAEKLAKEALSINPTDAWSVHTVAHIHEMKAEIKDGLEFMQHSETFWKDSDMLACHNYWHWALYLIEKGEYEAALTIYDTHILPSLQANDAMLDVVDSCSMLYRLQMEGVSVGQRWQDVLPVARKHSRDHILLFNDAHFLMASLGAHDPQTTQELLTTLRDASESPGENCQHLLARDVGLPLCQALVEAEDGNPDRVLELLLPIRYRIVQLGGSNAQRDVFNQLLIHAALNCTSSVHKNVARSLLMERDALKPNSPLTERLIRKAATVHLMQ

SEQ ID NO: 8340 - protein, 410 aa, Homo sapiens
MSLPESPHSPATLDYALEDPHQGQRSREKSKATEVMADMFDGRLEPIVFPPPRLPEEGVAPQDPADGGHTFHILVDAGRSHGAIKAGQEVTPPPAEGLEAASASLTTDGSLKNGFPGEETHGLGGEKALETCGAGRSESEVIAEGKAEDVKPEECAMFSAPVDEKPGGEEMDVAEENRAIDEVNREAGPGPGPGPLNVGLHLNPLESIQLELDSVNAEADRALLQVERRFGQIHEYYLEQRNDIIRNIPGFWVTAFRHHPQLSAMIRGQDAEMLSYLTNLEVKELRHPRTGCKFKFFFQRNPYFRNKLIVKVYEVRSFGQVVSFSTLIMWRRGHGPQSFIHRNRHVICSFFTWFSDHSLPESDRIAQIIKEDLWSNPLQYYLLGEDAHRARRRLVREPVEIPRPFGFQCG

SEQ ID NO: 8341 - protein, 914 aa, Homo sapiens
MGDSRDLCPHLDSIGEVTKEDLLLKSKGTCQSCGVTGPNLWACLQVACPYVGCGESFADHSTIHAQAKKHNLTVNLTTFRLWCYACEKEVFLEQRLAAPLLGSSSKFSEQDSPPPSHPLKAVPIAVADEGESESEDDDLKPRGLTGMKNLGNSCYMNAALQALSNCPPLTQFFLECGGLVRTDKKPALCKSYQKLVSEVWHKKRPSYVVPTSLSHGIKLVNPMFRGYAQQDTQEFLRCLMDQLHEELKEPVVATVALTEARDSDSSDTDEKREGDRSPSEDEFLSCDSSSDRGEGDGQGRGGGSSQAETELLIPDEAGRAISEKERMKDRKFSWGQQRTNSEQVDEDADVDTAMAALDDQPAEAQPPSPRSSSPCRTPEPDNDAHLRSSSRPCSPVHHHEGHAKLSSSPPRASPVRMAPSYVLKKAQVLSAGSRRRKEQRYRSVISDIFDGSILSLVQCLTCDRVSTTVETFQDLSLPIPGKEDLAKLHSAIYQNVPAKPGACGDSYAAQGWLAFIVEYIRRFVVSCTPSWFWGPVVTLEDCLAAFFAADELKGDNMYSCERCKKLRNGVKYCKVLRLPEILCIHLKRFRHEVMYSFKINSHVSFPLEGLDLRPFLAKECTSQITTYDLLSVICHHGTAGSGHYIAYCQNVINGQWYEFDDQYVTEVHETVVQNAEGYVLFYRKSSEEAMRERQQVVSLAAMREPSLLRFYVSREWLNKFNTFAEPGPITNQTFLCSHGGIPPHKYHYIDDLVVILPQNVWEHLYNRFGGGPAVNHLYVCSICQVEIEALAKRRRIEIDTFIKLNKAFQAEESPGVIYCISMQWFREWEAFVKGKDNEPPGPIDNSRIAQVKGSGHVQLKQGADYGQISEETWTYLNSLYGGGPEIAIRQSVAQPLGPENLHGEQKIEAETRAV

SEQ ID NO: 8342 - protein, 335 aa, Homo sapiens
MGHPPLLPLLLLLHTCVPASWGLRCMQCKTNGDCRVEECALGQDLCRTTIVRLWEEGEELELVEKSCTHSEKTNRTLSYRTGLKITSLTEVVCGLDLCNQGNSGRAVTYSRSRYLECISCGSSDMSCERGRHQSLQCRSPEEQCLDVVTHWIQEGEEGRPKDDRHLRGCGYLPGCPGSNGFHNNDTFHFLKCCNTTKCNEGPILELENLPQNGRQCYSCKGNSTHGCSSEETFLIDCRGPMNQCLVATGTHEPKNQSYMVRGCATASMCQHAHLGDAFSMNHIDVSCCTKSGCNHPDLDVQYRSGAAPQPGPAHLSLTITLLMTARLWGGTLLWT

SEQ ID NO: 8343 - protein, 281 aa, Homo sapiens
MGHPPLLPLLLLLHTCVPASWGLRCMQCKTNGDCRVEECALGQDLCRTTIVRLWEEGEELELVEKSCTHSEKTNRTLSYRTGLKITSLTEVVCGLDLCNQGNSGRAVTYSRSRYLECISCGSSDMSCERGRHQSLQCRSPEEQCLDVVTHWIQEGEEGRPKDDRHLRGCGYLPGCPGSNGFHNNDTFHFLKCCNTTKCNEGPILELENLPQNGRQCYSCKGNSTHGCSSEETFLIDCRGPMNQCLVATGTHERSLWGSWLPCKSTTALRPPCCEEAQATHV

SEQ ID NO: 8344 - protein, 290 aa, Homo sapiens
MGHPPLLPLLLLLHTCVPASWGLRCMQCKTNGDCRVEECALGQDLCRTTIVRLWEEGEELELVEKSCTHSEKTNRTLSYRTGLKITSLTEVVCGLDLCNQGNSGRAVTYSRSRYLECISCGSSDMSCERGRHQSLQCRSPEEQCLDVVTHWIQEGEEVLELENLPQNGRQCYSCKGNSTHGCSSEETFLIDCRGPMNQCLVATGTHEPKNQSYMVRGCATASMCQHAHLGDAFSMNHIDVSCCTKSGCNHPDLDVQYRSGAAPQPGPAHLSLTITLLMTARLWGGTLLWT

SEQ ID NO: 8345 - protein, 183 aa, Homo sapiens
MIKLFSLKQQKKEEESAGGTKGSSKKASAAQLRIQKDINELNLPKTCDISFSDPDDLLNFKLVICPDEGFYKSGKFVFSFKVGQGYPHDPPKVKCETMVYHPNIDLEGNVCLNILREDWKPVLTINSIIYGLQYLFLEPNPEDPLNKEAAEVLQNNRRLFEQNVQRSMRGGYIGSTYFERCLK

SEQ ID NO: 8346 - protein, 553 aa, Homo sapiens
MEDDSLYLGGEWQFNHFSKLTSSRPDAAFAEIQRTSLPEKSPLSCETRVDLCDDLAPVARQLAPREKLPLSSRRPAAVGAGLQNMGNTCYVNASLQCLTYTPPLANYMLSREHSQTCHRHKGCMLCTMQAHITRALHNPGHVIQPSQALAAGFHRGKQEDAHEFLMFTVDAMKKACLPGHKQVDHHSKDTTLIHQIFGGYWRSQIKCLHCHGISDTFDPYLDIALDIQAAQSVQQALEQLVKPEELNGENAYHCGVCLQRAPASKTLTLHTSAKVLILVLKRFSDVTGNKIDKNVQYPECLDMKLYMSQTNSGPLVYVLYAVLVHAGWSCHNGHYFSYVKAQEGQWYKMDDAEVTASSITSVLSQQAYVLFYIQKSEWERHSESVSRGREPRALGAEDTDRRATQGELKRDHPCLQAPELDEHLVERATQESTLDHWKFLQEQNKTKPEFNVRKVEGTLPPDVLVIHQSKYKCGMKNHHPEQQSSLLNLSSTTPTHQESMNTGTLASLRGRARRSKGKNKHSKRALLVCQWSQWKYRPTRRGAHTHAHTQTHT

SEQ ID NO: 8347 - protein, 226 aa, Homo sapiens
MEADASVDMFSKVLEHQLLQTTKLVEEHLDSEIQKLDQMDEDELERLKEKRLQALRKAQQQKQEWLSKGHGEYREIPSERDFFQEVKESENVVCHFYRDSTFRCKILDRHLAILSKKHLETKFLKLNVEKAPFLCERLHIKVIPTLALLKDGKTQDYVVGFTDLGNTDDFTTETLEWRLGSSDILNYSGNLMEPPFQNQKKFGTNFTKLEKKTIRGKKYDSDSDDD

SEQ ID NO: 8348 - protein, 188 aa, Homo sapiens
MEADASVDMFSKVLEHQLLQTTKLVEEHLDSEIQKLDQMDEDELERLKEKRLQALRKAQQQKQEWLSKGHGEYREIPSERDFFQEVKESENVVCHFYRDSTFRCKILDRHLAILSKKHLETKFLKLNVEKAPFLCERLHIKVIPTLALLKDGKTQDYVVGFTDLGNTDDFTTETLEWRLGSSDILNYR

SEQ ID NO: 8349 - protein, 528 aa, Homo sapiens
MSMKWTSALLLIQLSCYFSSGSCGKVLVWPTEFSHWMNIKTILDELVQRGHEVTVLASSASISFDPNSPSTLKFEVYPVSLTKTEFEDIIKQLVKRWAELPKDTFWSYFSQVQEIMWTFNDILRKFCKDIVSNKKLMKKLQESRFDVVLADAVFPFGELLAELLKIPFVYSLRFSPGYAIEKHSGGLLFPPSYVPVVMSELSDQMTFIERVKNMIYVLYFEFWFQIFDMKKWDQFYSEVLGRPTTLSETMAKADIWLIRNYWDFQFPHPLLPNVEFVGGLHCKPAKPLPKEMEEFVQSSGENGVVVFSLGSMVSNTSEERANVIASALAKIPQKVLWRFDGNKPDTLGLNTRLYKWIPQNDLLGHPKTRAFITHGGANGIYEAIYHGIPMVGVPLFADQPDNIAHMKAKGAAVSLDFHTMSSTDLLNALKTVINDPLYKENAMKLSRIHHDQPVKPLDRAVFWIEFVMRHKGAKHLRVAAHDLTWFQYHSLDVTGFLLACVATVIFIITKCLFCVWKFVRTGKKGKRD

SEQ ID NO: 8350 - protein, 392 aa, Homo sapiens
MFFALLHVSSTNGLDAVFPFGELLAELLKIPFVYSLRFSPGYAIEKHSGGLLFPPSYVPVVMSELSDQMTFIERVKNMIYVLYFEFWFQIFDMKKWDQFYSEVLGRPTTLSETMAKADIWLIRNYWDFQFPHPLLPNVEFVGGLHCKPAKPLPKEMEEFVQSSGENGVVVFSLGSMVSNTSEERANVIASALAKIPQKVLWRFDGNKPDTLGLNTRLYKWIPQNDLLGHPKTRAFITHGGANGIYEAIYHGIPMVGVPLFADQPDNIAHMKAKGAAVSLDFHTMSSTDLLNALKTVINDPLYKENAMKLSRIHHDQPVKPLDRAVFWIEFVMRHKGAKHLRVAAHDLTWFQYHSLDVTGFLLACVATVIFIITKCLFCVWKFVRTGKKGKRD

SEQ ID NO: 8351 - protein, 369 aa, Homo sapiens
MSMKWTSALLLIQLSCYFSSGSCGKVLVWPTEFSHWMNIKTILDELVQRGHEVTVLASSASISFDPNSPSTLKFEVYPVSLTKTEFEDIIKQLVKRWAELPKDTFWSYFSQVQEIMWTFNDILRKFCKDIVSNKKLMKKLQESRFDVVLADAVFPFGELLAELLKIPFVYSLRFSPGYAIEKHSGGLLFPPSYVPVVMSELSDQMTFIERVKNMIYVLYFEFWFQIFDMKKWDQFYSEVLGRPTTLSETMAKADIWLIRNYWDFQFPHPLLPNVEFVGGLHCKPAKPLPKEMEEFVQSSGENGVVVFSLGSMVSNTSEERANVIASALAKIPQKVLWRFDGNKPDTLGLNTRLYKWIPQNDLLDIKRML

SEQ ID NO: 8352 - protein, 391 aa, Homo sapiens
MVMFKKIKSFEVVFNDPEKVYGSGEKVAGRVIVEVCEVTRVKAVRILACGVAKVLWMQGSQQCKQTSEYLRYEDTLLLEDQPTGENEMVIMRPGNKYEYKFGFELPQGPLGTSFKGKYGCVDYWVKAFLDRPSQPTQETKKNFEVVDLVDVNTPDLMAPVSAKKEKKVSCMFIPDGRVSVSARIDRKGFCEGDEISIHADFENTCSRIVVPKAAIVARHTYLANGQTKVLTQKLSSVRGNHIISGTCASWRGKSLRVQKIRPSILGCNILRVEYSLLIYVSVPGSKKVILDLPLVIGSRSGLSSRTSSMASRTSSEMSWVDLNIPDTPEAPPCYMDVIPEDHRLESPTTPLLDDMDGSQDSPIFMYAPEFKFMPPPTYTEVDPCILNNNVQ

SEQ ID NO: 8353 - protein, 336 aa, Homo sapiens
MPPKHSLSHRCILSVTASLMATRFSFPSGENEMVIMRPGNKYEYKFGFELPQGPLGTSFKGKYGCVDYWVKAFLDRPSQPTQETKKNFEVVDLVDVNTPDLMAPVSAKKEKKVSCMFIPDGRVSVSARIDRKGFCEGDEISIHADFENTCSRIVVPKAAIVARHTYLANGQTKVLTQKLSSVRGNHIISGTCASWRGKSLRVQKIRPSILGCNILRVEYSLLIYVSVPGSKKVILDLPLVIGSRSGLSSRTSSMASRTSSEMSWVDLNIPDTPEAPPCYMDVIPEDHRLESPTTPLLDDMDGSQDSPIFMYAPEFKFMPPPTYTEVDPCILNNNVQ

SEQ ID NO: 8354 - protein, 540 aa, Homo sapiens
MAWVLKMDEVIESGLVHDFDASLSGIGQELGAGAYSMSDVLALPIFKQEDSSLPLDGETEHPPFQYVMCAATSPAVKLHDETLTYLNQGQSYEIRMLDNRKMGDMPEINGKLVKSIIRVVFHDRRLQYTEHQQLEGWKWNRPGDRLLDLDIPMSVGIIDTRTNPSQLNAVEFLWDPAKRTSAFIQVHCISTEFTPRKHGGEKGVPFRIQVDTFKQNENGEYTDHLHSASCQIKVFKPKGADRKQKTDREKMEKRTAHEKEKYQPSYDTTILTEMRLEPIIEDAVEHEQKKSSKRTLPADYGDSLAKRGSCSPWPDAPTAYVNNSPSPAPTFTSPQQSTCSVPDSNSSSPNHQGDGASQTSGEQIQPSATIQETQQWLLKNRFSSYTRLFSNFSGADLLKLTKEDLVQICGAADGIRLYNSLKSRSVRPRLTIYVCREQPSSTVLQGQQQAASSASENGSGAPYVYHAIYLEEMIASEVARKLALVFNIPLHQINQVYRQGPTGIHILVSDQMVQNFQDESCFLFSTVKAESSDGIHIILK

SEQ ID NO: 8355 - protein, 504 aa, Homo sapiens
MAWVLKMDEVIESGLVHDFDASLSGIGQELGAGAYSMSDVLALPIFKQEDSSLPLDGETEHPPFQYVMCAATSPAVKLHDETLTYLNQGQSYEIRMLDNRKMGDMPEINGKLVKSIIRVVFHDRRLQYTEHQQLEGWKWNRPGDRLLDLDIPMSVGIIDTRTNPSQLNAVEFLWDPAKRTSAFIQVHCISTEFTPRKHGGEKGVPFRIQVDTFKQNENGEYTDHLHSASCQIKVFKPKGADRKQKTDREKMEKRTAHEKEKYQPSYDTTILTECSPWPDAPTAYVNNSPSPAPTFTSPQQSTCSVPDSNSSSPNHQGDGASQTSGEQIQPSATIQETQQWLLKNRFSSYTRLFSNFSGADLLKLTKEDLVQICGAADGIRLYNSLKSRSVRPRLTIYVCREQPSSTVLQGQQQAASSASENGSGAPYVYHAIYLEEMIASEVARKLALVFNIPLHQINQVYRQGPTGIHILVSDQMVQNFQDESCFLFSTVKAESSDGIHIILK

SEQ ID NO: 8356 - protein, 1888 aa, Homo sapiens
MAAAAAAAVGGQQPSQPELPAPGLALDKAATAAHLKAALSRPDNRAGAEELQALLERVLSAERPLAAAAGGEDAAAAGGGGGPGAAEEEALEWCKCLLAGGGGYDEFCAAVRAYDPAALCGLVWTANFVAYRCRTCGISPCMSLCAECFHQGDHTGHDFNMFRSQAGGACDCGDSNVMRESGFCKRHQIKSSSNIPCVPKDLLMMSEFVLPRFIFCLIQYLREGYNEPAADGPSEKDLNKVLQLLEPQISFLEDLTKMGGAMRSVLTQVLTNQQNYKDLTSGLGENACVKKSHEKYLIALKSSGLTYPEDKLVYGVQEPSAGTSSLAVQGFIGATGTLGQVDSSDEDDQDGSQGLGKRKRVKLSSGTKDQSIMDVLKHKSFLEELLFWTIKYEFPQKMVTFLLNMLPDQEYKVAFTKTFVQHYAFIMKTLKKSHESDTMSNRIVHISVQLFSNEELARQVTEECQLLDIMVTVLLYMMESCLIKSELQDEENSLHVVVNCGEALLKNNTYWPLVSDFINILSHQSVAKRFLEDHGLLVTWMNFVSFFQGMNLNKRELNEHVEFESQTYYAAFAAELEACAQPMWGLLSHCKVRETQEYTRNVVRYCLEALQDWFDAINFVDEPAPNQVTFHLPLHRYYAMFLSKAVKCQELDLDSVLPDQEMLMKLMIHPLQIQASLAEIHSNMWVRNGLQIKGQAMTYVQSHFCNSMIDPDIYLLQVCASRLDPDYFISSVFERFKVVDLLTMASQHQNTVLDAEHERSMLEGALTFLVILLSLRLHLGMSDDEILRAEMVAQLCMNDRTHSSLLDLIPENPNPKSGIIPGSYSFESVLSAVADFKAPVFEPGGSMQQGMYTPKAEVWDQEFDPVMVILRTVYRRDVQSAMDRYTAFLKQSGKFPGNPWPPYKKRTSLHPSYKGLMRLLHCKTLHIVLFTLLYKILMDHQNLSEHVLCMVLYLIELGLENSAEEESDEEASVGGPERCHDSWFPGSNLVSNMRHFINYVRVRVPETAPEVKRDSPASTSSDNLGSLQNSGTAQVFSLVAERRKKFQEIINRSSSEANQVVRPKTSSKWSAPGSAPQLTTAILEIKESILSLLIKLHHKLSGKQNSYYPPWLDDIEILIQPEIPKYSHGDGITAVERILLKAASQSRMNKRIIEEICRKVTPPVPPKKVTAAEKKTLDKEERRQKARERQQKLLAEFASRQKSFMETAMDVDSPENDIPMEITTAEPQVSEAVYDCVICGQSGPSSEDRPTGLVVLLQASSVLGQCRDNVEPKKLPISEEEQIYPWDTCAAVHDVRLSLLQRYFKDSSCLLAVSIGWEGGVYVQTCGHTLHIDCHKSYMESLRNDQVLQGFSVDKGEFTCPLCRQFANSVLPCYPGSNVENNPWQRPSNKSIQDLIKEVEELQGRPGAFPSETNLSKEMESVMKDIKNTTQKKYRDYSKTPGSPDNDFLFMYSVARTNLELELIHRGGNLCSGGASTAGKRSCLNQLFHVLALHMRLYSIDSEYNPWRKLTQLEEMNPQLGYEEQQPEVPILYHDVTSLLLIQILMMPQPLRKDHFTCIVKVLFTLLYTQALAALSVKCSEEDRSAWKHAGALKKSTCDAEKSYEVLLSFVISELFKGKLYHEEGTQECAMVNPIAWSPESMEKCLQDFCLPFLRITSLLQHHLFGEDLPSCQEEEEFSVLASCLGLLPTFYQTEHPFISASCLDWPVPAFDIITQWCFEIKSFTERHAEQGKALLIQESKWKLPHLLQLPENYNTIFQYYHRKTCSVCTKVPKDPAVCLVCGTFVCLKGLCCKQQSYCECVLHSQNCGAGTGIFLLINASVIIIIRGHRFCLWGSVYLDAHGEEDRDLRRGKPLYICKERYKVLEQQWISHTFDHINKRWGPHYNGL

SEQ ID NO: 8357 - protein, 709 aa, Homo sapiens
MIASKQRQFTEVFRIMSSTFSQSRFLYAAVVTDSPENDIPMEITTAEPQVSEAVYDCVICGQSGPSSEDRPTGLVVLLQASSVLGQCRDNVEPKKLPISEEEQIYPWDTCAAVHDVRLSLLQRYFKDSSCLLAVSIGWEGGVYVQTCGHTLHIDCHKSYMESLRNDQVLQGFSVDKGEFTCPLCRQFANSVLPCYPGSNVENNPWQRPSNKSIQDLIKEVEELQGRPGAFPSETNLSKEMESVMKDIKNTTQKKYRDYSKTPGSPDNDFLFMYSVARTNLELELIHRGGNLCSGGASTAGKRSCLNQLFHVLALHMRLYSIDSEYNPWRKLTQLEEMNPQLGYEEQQPEVPILYHDVTSLLLIQILMMPQPLRKDHFTCIVKVLFTLLYTQALAALSVKCSEEDRSAWKHAGALKKSTCDAEKSYEVLLSFVISELFKGKLYHEEGTQECAMVNPIAWSPESMEKCLQDFCLPFLRITSLLQHHLFGEDLPSCQEEEEFSVLASCLGLLPTFYQTEHPFISASCLDWPVPAFDIITQWCFEIKSFTERHAEQGKALLIQESKWKLPHLLQLPENYNTIFQYYHRKTCSVCTKVPKDPAVCLVCGTFVCLKGLCCKQQSYCECVLHSQNCGAGTGIFLLINASVIIIIRGHRFCLWGSVYLDAHGEEDRDLRRGKPLYICKERYKVLEQQWISHTFDHINKRWGPHYNGL

SEQ ID NO: 8358 - protein, 394 aa, Homo sapiens
MRLYSIDSEYNPWRKLTQLEEMNPQLGYEEQQPEVPILYHDVTSLLLIQILMMPQPLRKDHFTCIVKVLFTLLYTQALAALSVKCSEEDRSAWKHAGALKKSTCDAEKSYEVLLSFVISELFKGKLYHEEGTQECAMVNPIAWSPESMEKCLQDFCLPFLRITSLLQHHLFGEDLPSCQEEEEFSVLASCLGLLPTFYQTEHPFISASCLDWPVPAFDIITQWCFEIKSFTERHAEQGKALLIQESKWKLPHLLQLPENYNTIFQYYHRKTCSVCTKVPKDPAVCLVCGTFVCLKGLCCKQQSYCECVLHSQNCGAGTGIFLLINASVIIIIRGHRFCLWGSVYLDAHGEEDRDLRRGKPLYICKERYKVLEQQWISHTFDHINKRWGPHYNGL

SEQ ID NO: 8359 - protein, 1917 aa, Homo sapiens
MAAAAAAAVGGQQPSQPELPAPGLALDKAATAAHLKAALSRPDNRAGAEELQALLERVLSAERPLAAAAGGEDAAAAGGGGGPGAAEEEALEWCKCLLAGGGGYDEFCAAVRAYDPAALCGLVWTANFVAYRCRTCGISPCMSLCAECFHQGDHTGHDFNMFRSQAGGACDCGDSNVMRESGFCKRHQIKSSSNIPCVPKDLLMMSEFVLPRFIFCLIQYLREGYNEPAADGPSEKDLNKVLQLLEPQISFLEDLTKMGGAMRSVLTQVLTNQQNYKDLTSGLGENACVKKSHEKYLIALKSSGLTYPEDKLVYGVQEPSAGTSSLAVQGFIGATGTLGQVDSSDEDDQDGSQGLGKRKRVKLSSGTKDQSIMDVLKHKSFLEELLFWTIKYEFPQKMVTFLLNMLPDQEYKVAFTKTFVQHYAFIMKTLKKSHESDTMSNRIVHISVQLFSNEELARQVTEECQLLDIMVTVLLYMMESCLIKSELQDEENSLHVVVNCGEALLKNNTYWPLVSDFINILSHQSVAKRFLEDHGLLVTWMNFVSFFQGMNLNKRELNEHVEFESQTYYAAFAAELEACAQPMWGLLSHCKVRETQEYTRNVVRYCLEALQDWFDAINFVDEPAPNQVTFHLPLHRYYAMFLSKAVKCQELDLDSVLPDQEMLMKLMIHPLQIQASLAEIHSNMWVRNGLQIKGQAMTYVQSHFCNSMIDPDIYLLQVCASRLDPDYFISSVFERFKVVDLLTMASQHQNTVLDAEHERSMLEGALTFLVILLSLRLHLGMSDDEILRAEMVAQLCMNDRTHSSLLDLIPENPNPKSGIIPGSYSFESVLSAVADFKAPVFEPGGSMQQGMYTPKAEVWDQEFDPVMVILRTVYRRDVQSAMDRYTAFLKQSGKFPGNPWPPYKKRTSLHPSYKGLMRLLHCKTLHIVLFTLLYKILMDHQNLSEHVLCMVLYLIELGLENSAEEESDEEASVGGPERCHDSWFPGSNLVSNMRHFINYVRVRVPETAPEVKRDSPASTSSDNLGSLQNSGTAQVFSLVAERRKKFQEIINRSSSEANQVVRPKTSSKWSAPGSAPQLTTAILEIKESILSLLIKLHHKLSGKQNSYYPPWLDDIEILIQPEIPKYSHGDGITAVERILLKAASQSRMNKRIIEEICRKVTPPVPPKKVTAAEKKTLDKEERRQKARERQQKLLAEFASRQKSFMETAMDVDSPENDIPMEITTAEPQVSEAVYDCVICGQSGPSSEDRPTGLVVLLQASSVLGQCRDNVEPKKLPISEEEQIYPWDTCAAVHDVRLSLLQRYFKDSSCLLAVSIGWEGGVYVQTCGHTLHIDCHKSYMESLRNDQVLQGFSVDKGEFTCPLCRQFANSVLPCYPGSNVENNPWQRPSNKSIQDLIKEVEELQGRPGAFPSETNLSKEMESVMKDIKNTTQKKYRDYSKTPGSPDNDFLFMYSVARTNLELELIHRGGNLCSGGASTAGKRSCLNFCFIISPFTKSEIILCQYRKSHDKVYPKYQLFHVLALHMRLYSIDSEYNPWRKLTQLEEMNPQLGYEEQQPEVPILYHDVTSLLLIQILMMPQPLRKDHFTCIVKVLFTLLYTQALAALSVKCSEEDRSAWKHAGALKKSTCDAEKSYEVLLSFVISELFKGKLYHEEGTQECAMVNPIAWSPESMEKCLQDFCLPFLRITSLLQHHLFGEDLPSCQEEEEFSVLASCLGLLPTFYQTEHPFISASCLDWPVPAFDIITQWCFEIKSFTERHAEQGKALLIQESKWKLPHLLQLPENYNTIFQYYHRKTCSVCTKVPKDPAVCLVCGTFVCLKGLCCKQQSYCECVLHSQNCGAGTGIFLLINASVIIIIRGHRFCLWGSVYLDAHGEEDRDLRRGKPLYICKERYKVLEQQWISHTFDHINKRWGPHYNGL

SEQ ID NO: 8360 - protein, 240 aa, Homo sapiens
MAEYLASIFGTEKDKVNCSFYFKIGACRHGDRCSRLHNKPTFSQTIALLNIYRNPQNSSQSADGLRCAVSDVEMQEHYDEFFEEVFTEMEEKYGEVEEMNVCDNLGDHLVGNVYVKFRREEDAEKAVIDLNNRWFNGQPIHAELSPVTDFREACCRQYEMGECTRGGFCNFMHLKPISRELRRELYGRRRKKHRSRSRSRERRSRSRDRGRGGGGGGGGGGGGRERDRRRSRDRERSGRF

SEQ ID NO: 8361 - protein, 240 aa, Homo sapiens
MAEYLASIFGTEKDKVNCSFYFKIGACRHGDRCSRLHNKPTFSQTILIQNIYRNPQNSAQTADGSHCAVSDVEMQEHYDEFFEEVFTEMEEKYGEVEEMNVCDNLGDHLVGNVYVKFRREEDAEKAVIDLNNRWFNGQPIHAELSPVTDFREACCRQYEMGECTRGGFCNFMHLKPISRELRRELYGRRRKKHRSRSRSRERRSRSRDRGRGGGGGGGGGGGGRERDRRRSRDRERSGRF

SEQ ID NO: 8362 - protein, 75 aa, Homo sapiens
MAEYLASIFGTEKDKVNCSFYFKIGACRHGDRCSRLHNKPTFSQTILIQNIYRNPQNSAQTADGSHYHCPLEHLP

SEQ ID NO: 8363 - protein, 167 aa, Homo sapiens
MQEHYDEFFEEVFTEMEEKYGEVEEMNVCDNLGDHLVGNVYVKFRREEDAEKAVIDLNNRWFNGQPIHAELSPVTDFREACCRQYEMGECTRGGFCNFMHLKPISRELRRELYGRRRKKHRSRSRSRERRSRSRDRGRGGGGGGGGGGGGRERDRRRSRDRERSGRF

SEQ ID NO: 8364 - protein, 5202 aa, Homo sapiens
MNCPVLSLGSGFLFQVIEMLIFAYFASISLTESRGLFPRLENVGAFKKVSIVPTQAVCGLPDRSTFCHSSAAAESIQFCTQRFCIQDCPYRSSHPTYTALFSAGLSSCITPDKNDLHPNAHSNSASFIFGNHKSCFSSPPSPKLMASFTLAVWLKPEQQGVMCVIEKTVDGQIVFKLTISEKETMFYYRTVNGLQPPIKVMTLGRILVKKWIHLSVQVHQTKISFFINGVEKDHTPFNARTLSGSITDFASGTVQIGQSLNGLEQFVGRMQDFRLYQVALTNREILEVFSGDLLRLHAQSHCRCPGSHPRVHPLAQRYCIPNDAGDTADNRVSRLNPEAHPLSFVNDNDVGTSWVSNVFTNITQLNQGVTISVDLENGQYQVFYIIIQFFSPQPTEIRIQRKKENSLDWEDWQYFARNCGAFGMKNNGDLEKPDSVNCLQLSNFTPYSRGNVTFSILTPGPNYRPGYNNFYNTPSLQEFVKATQIRFHFHGQYYTTETAVNLRHRYYAVDEITISGRCQCHGHADNCDTTSQPYRCLCSQESFTEGLHCDRCLPLYNDKPFRQGDQVYAFNCKPCQCNSHSKSCHYNISVDPFPFEHFRGGGGVCDDCEHNTTGRNCELCKDYFFRQVGADPSAIDVCKPCDCDTVGTRNGSILCDQIGGQCNCKRHVSGRQCNQCQNGFYNLQELDPDGCSPCNCNTSGTVDGDITCHQNSGQCKCKANVIGLRCDHCNFGFKFLRSFNDVGCEPCQCNLHGSVNKFCNPHSGQCECKKEAKGLQCDTCRENFYGLDVTNCKACDCDTAGSLPGTVCNAKTGQCICKPNVEGRQCNKCLEGNFYLRQNNSFLCLPCNCDKTGTINGSLLCNKSTGQCPCKLGVTGLRCNQCEPHRYNLTIDNFQHCQMCECDSLGTLPGTICDPISGQCLCVPNRQGRRCNQCQPGFYISPGNATGCLPCSCHTTGAVNHICNSLTGQCVCQDASIAGQRCDQCKDHYFGFDPQTGRCQPCNCHLSGALNETCHLVTGQCFCKQFVTGSKCDACVPSASHLDVNNLLGCSKTPFQQPPPRGQVQSSSAINLSWSPPDSPNAHWLTYSLLRDGFEIYTTEDQYPYSIQYFLDTDLLPYTKYSYYIETTNVHGSTRSVAVTYKTKPGVPEGNLTLSYIIPIGSDSVTLTWTTLSNQSGPIEKYILSCAPLAGGQPCVSYEGHETSATIWNLVPFAKYDFSVQACTSGGCLHSLPITVTTAQAPPQRLSPPKMQKISSTELHVEWSPPAELNGIIIRYELYMRRLRSTKETTSEESRVFQSSGWLSPHSFVESANENALKPPQTMTTITGLEPYTKYEFRVLAVNMAGSVSSAWVSERTGESAPVFMIPPSVFPLSSYSLNISWEKPADNVTRGKVVGYDINMLSEQSPQQSIPMAFSQLLHTAKSQELSYTVEGLKPYRIYEFTITLCNSVGCVTSASGAGQTLAAAPAQLRPPLVKGINSTTIHLRWFPPEELNGPSPIYQLERRESSLPALMTTMMKGIRFIGNGYCKFPSSTHPVNTDFTGIKASFRTKVPEGLIVFAASPGNQEEYFALQLKKGRLYFLFDPQGSPVEVTTTNDHGKQYSDGKWHEIIAIRHQAFGQITLDGIYTGSSAILNGSTVIGDNTGVFLGGLPRSYTILRKDPEIIQKGFVGCLKDVHFMKNYNPSAIWEPLDWQSSEEQINVYNSWEGCPASLNEGAQFLGAGFLELHPYMFHGGMNFEISFKFRTDQLNGLLLFVYNKDGPDFLAMELKSGILTFRLNTSLAFTQVDLLLGLSYCNGKWNKVIIKKEGSFISASVNGLMKHASESGDQPLVVNSPVYVGGIPQELLNSYQHLCLEQGFGGCMKDVKFTRGAVVNLASVSSGAVRVNLDGCLSTDSAVNCRGNDSILVYQGKEQSVYEGGLQPFTEYLYRVIASHEGGSVYSDWSRGRTTGAAPQSVPTPSRVRSLNGYSIEVTWDEPVVRGVIEKYILKAYSEDSTRPPRMPSASAEFVNTSNLTGILTGLLPFKNYAVTLTACTLAGCTESSHALNISTPQEAPQEVQPPVAKSLPSSLLLSWNPPKKANGIITQYCLYMDGRLIYSGSEENYIVTDLAVFTPHQFLLSACTHVGCTNSSWVLLYTAQLPPEHVDSPVLTVLDSRTIHIQWKQPRKISGILERYVLYMSNHTHDFTIWSVIYNSTELFQDHMLQYVLPGNKYLIKLGACTGGGCTVSEASEALTDEDIPEGVPAPKAHSYSPDSFNVSWTEPEYPNGVITSYGLYLDGILIHNSSELSYRAYGFAPWSLHSFRVQACTAKGCALGPLVENRTLEAPPEGTVNVFVKTQGSRKAHVRWEAPFRPNGLLTHSVLFTGIFYVDPVGNNYTLLNVTKVMYSGEETNLWVLIDGLVPFTNYTVQVNISNSQGSLITDPITIAMPPGAPDGVLPPRLSSATPTSLQVVWSTPARNNAPGSPRYQLQMRSGDSTHGFLELFSNPSASLSYEVSDLQPYTEYMFRLVASNGFGSAHSSWIPFMTAEDKPGPVVPPILLDVKSRMMLVTWQHPRKSNGVITHYNIYLHGRLYLRTPGNVTNCTVMHLHPYTAYKFQVEACTSKGCSLSPESQTVWTLPGAPEGIPSPELFSDTPTSVIISWQPPTHPNGLVENFTIERRVKGKEEVTTLVTLPRSHSMRFIDKTSALSPWTKYEYRVLMSTLHGGTNSSAWVEVTTRPSRPAGVQPPVVTVLEPDAVQVTWKPPLIQNGDILSYEIHMPDPHITLTNVTSAVLSQKVTHLIPFTNYSVTIVACSGGNGYLGGCTESLPTYVTTHPTVPQNVGPLSVIPLSESYVVISWQPPSKPNGPNLRYELLRRKIQQPLASNPPEDLNRWHNIYSGTQWLYEDKGLSRFTTYEYMLFVHNSVGFTPSREVTVTTLAGLPERGANLTASVLNHTAIDVRWAKPTVQDLQGEVEYYTLFWSSATSNDSLKILPDVNSHVIGHLKPNTEYWIFISVFNGVHSINSAGLHATTCDGEPQGMLPPEVVIINSTAVRVIWTSPSNPNGVVTEYSIYVNNKLYKTGMNVPGSFILRDLSPFTIYDIQVEVCTIYACVKSNGTQITTVEDTPSDIPTPTIRGITSRSLQIDWVSPRKPNGIILGYDLLWKTWYPCAKTQKLVQDQSDELCKAVRCQKPESICGHICYSSEAKVCCNGVLYNPKPGHRCCEEKYIPFVLNSTGVCCGGRIQEAQPNHQCCSGYYARILPGEVCCPDEQHNRVSVGIGDSCCGRMPYSTSGNQICCAGRLHDGHGQKCCGRQIVSNDLECCGGEEGVVYNRLPGMFCCGQDYVNMSDTICCSASSGESKAHIKKNDPVPVKCCETELIPKSQKCCNGVGYNPLKYVCSDKISTGMMMKETKECRILCPASMEATEHCGRCDFNFTSHICTVIRGSHNSTGKASIEEMCSSAEETIHTGSVNTYSYTDVNLKPYMTYEYRISAWNSYGRGLSKAVRARTKEDVPQGVSPPTWTKIDNLEDTIVLNWRKPIQSNGPIIYYILLRNGIERFRGTSLSFSDKEGIQPFQEYSYQLKACTVAGCATSSKVVAATTQGVPESILPPSITALSAVALHLSWSVPEKSNGVIKEYQIRQVGKGLIHTDTTDRRQHTVTGLQPYTNYSFTLTACTSAGCTSSEPFLGQTLQAAPEGVWVTPRHIIINSTTVELYWSLPEKPNGLVSQYQLSRNGNLLFLGGSEEQNFTDKNLEPNSRYTYKLEVKTGGGSSASDDYIVQTPMSTPEEIYPPYNITVIGPYSIFVAWIPPGILIPEIPVEYNVLLNDGSVTPLAFSVGHHQSTLLENLTPFTQYEIRIQACQNGSCGVSSRMFVKTPEAAPMDLNSPVLKALGSACIEIKWMPPEKPNGIIINYFIYRRPAGIEEESVLFVWSEGALEFMDEGDTLRPFTLYEYRVRACNSKGSVESLWSLTQTLEAPPQDFPAPWAQATSAHSVLLNWTKPESPNGIISHYRVVYQERPDDPTFNSPTVHAFTVKGTSHQAHLYGLEPFTTYRIGVVAANHAGEILSPWTLIQTLESSPSGLRNFIVEQKENGRALLLQWSEPMRTNGVIKTYNIFSDGFLEYSGLNRQFLFRRLDPFTLYTLTLEACTRAGCAHSAPQPLWTDEAPPDSQLAPTVHSVKSTSVELSWSEPVNPNGKIIRYEVIRRCFEGKAWGNQTIQADEKIVFTEYNTERNTFMYNDTGLQPWTQCEYKIYTWNSAGHTCSSWNVVRTLQAPPEGLSPPVISYVSMNPQKLLISWIPPEQSNGIIQSYRLQRNEMLYPFSFDPVTFNYTDEELLPFSTYSYALQACTSGGCSTSKPTSITTLEAAPSEVSPPDLWAVSATQMNVCWSPPTVQNGKITKYLVRYDNKESLAGQGLCLLVSHLQPYSQYNFSLVACTNGGCTASVSKSAWTMEALPENMDSPTLQVTGSESIEITWKPPRNPNGQIRSYELRRDGTIVYTGLETRYRDFTLTPGVEYSYTVTASNSQGGILSPLVKDRTSPSAPSGMEPPKLQARGPQEILVNWDPPVRTNGDIINYTLFIRELFERETKIIHINTTHNSFGMQSYIVNQLKPFHRYEIRIQACTTLGCASSDWTFIQTPEIAPLMQPPPHLEVQMAPGGFQPTVSLLWTGPLQPNGKVLYYELYRRQIATQPRKSNPVLIYNGSSTSFIDSELLPFTEYEYQVWAVNSAGKAPSSWTWCRTGPAPPEGLRAPTFHVISSTQAVVNISAPGKPNGIVSLYRLFSSSAHGAETVLSEGMATQQTLHGLQAFTNYSIGVEACTCFNCCSKGPTAELRTHPAPPSGLSSPQIGTLASRTASFRWSPPMFPNGVIHSYELQFHVACPPDSALPCTPSQIETKYTGLGQKASLGGLQPYTTYKLRVVAHNEVGSTASEWISFTTQKELPQYRAPFSVDSNLSVVCVNWSDTFLLNGQLKEYVLTDGGRRVYSGLDTTLYIPRTADKTFFFQVICTTDEGSVKTPLIQYDTSTGLGLVLTTPGKKKGSRSKSTEFYSELWFIVLMAMLGLILLAIFLSLILQRKIHKEPYIRERPPLVPLQKRMSPLNVYPPGENHMGLADTKIPRSGTPVSIRSNRSACVLRIPSQNQTSLTYSQGSLHRSVSQLMDIQDKKVLMDNSLWEAIMGHNSGLYVDEEDLMNAIKDFSSVTKERTTFTDTHL

SEQ ID NO: 8365 - protein, 1546 aa, Homo sapiens
MNCPVLSLGSGFLFQVIEMLIFAYFASISLTESRGLFPRLENVGAFKKVSIVPTQAVCGLPDRSTFCHSSAAAESIQFCTQRFCIQDCPYRSSHPTYTALFSAGLSSCITPDKNDLHPNAHSNSASFIFGNHKSCFSSPPSPKLMASFTLAVWLKPEQQGVMCVIEKTVDGQIVFKLTISEKETMFYYRTVNGLQPPIKVMTLGRILVKKWIHLSVQVHQTKISFFINGVEKDHTPFNARTLSGSITDFASGTVQIGQSLNGLEQFVGRMQDFRLYQVALTNREILEVFSGDLLRLHAQSHCRCPGSHPRVHPLAQRYCIPNDAGDTADNRVSRLNPEAHPLSFVNDNDVGTSWVSNVFTNITQLNQGVTISVDLENGQYQVFYIIIQFFSPQPTEIRIQRKKENSLDWEDWQYFARNCGAFGMKNNGDLEKPDSVNCLQLSNFTPYSRGNVTFSILTPGPNYRPGYNNFYNTPSLQEFVKATQIRFHFHGQYYTTETAVNLRHRYYAVDEITISGRCQCHGHADNCDTTSQPYRCLCSQESFTEGLHCDRCLPLYNDKPFRQGDQVYAFNCKPCQCNSHSKSCHYNISVDPFPFEHFRGGGGVCDDCEHNTTGRNCELCKDYFFRQVGADPSAIDVCKPCDCDTVGTRNGSILCDQIGGQCNCKRHVSGRQCNQCQNGFYNLQELDPDGCSPCNCNTSGTVDGDITCHQNSGQCKCKANVIGLRCDHCNFGFKFLRSFNDVGCEPCQCNLHGSVNKFCNPHSGQCECKKEAKGLQCDTCRENFYGLDVTNCKACDCDTAGSLPGTVCNAKTGQCICKPNVEGRQCNKCLEGNFYLRQNNSFLCLPCNCDKTGTINGSLLCNKSTGQCPCKLGVTGLRCNQCEPHRYNLTIDNFQHCQMCECDSLGTLPGTICDPISGQCLCVPNRQGRRCNQCQPGFYISPGNATGCLPCSCHTTGAVNHICNSLTGQCVCQDASIAGQRCDQCKDHYFGFDPQTGRCQPCNCHLSGALNETCHLVTGQCFCKQFVTGSKCDACVPSASHLDVNNLLGCSKTPFQQPPPRGQVQSSSAINLSWSPPDSPNAHWLTYSLLRDGFEIYTTEDQYPYSIQYFLDTDLLPYTKYSYYIETTNVHGSTRSVAVTYKTKPGVPEGNLTLSYIIPIGSDSVTLTWTTLSNQSGPIEKYILSCAPLAGGQPCVSYEGHETSATIWNLVPFAKYDFSVQACTSGGCLHSLPITVTTAQAPPQRLSPPKMQKISSTELHVEWSPPAELNGIIIRYELYMRRLRSTKETTSEESRVFQSSGWLSPHSFVESANENALKPPQTMTTITGLEPYTKYEFRVLAVNMAGSVSSAWVSERTGESAPVFMIPPSVFPLSSYSLNISWEKPADNVTRGKVVGYDINMLSEQSPQQSIPMAFSQLLHTAKSQELSYTVEGLKPYRIYEFTITLCNSVGCVTSASGAGQTLAAAPAQLRPPLVKGINSTTIHLRWFPPEELNGPSPIYQLERRESSLPALMTTMMKGIRFIGNGYCKFPSSTHPVNTDFTGKCV

SEQ ID NO: 8366 - protein, 5226 aa, Homo sapiens
MNCPVLSLGSGFLFQVIEMLIFAYFASISLTESRGLFPRLENVGAFKKVSIVPTQAVCGLPDRSTFCHSSAAAESIQFCTQRFCIQDCPYRSSHPTYTALFSAGLSSCITPDKNDLHPNAHSNSASFIFGNHKSCFSSPPSPKLMASFTLAVWLKPEQQGVMCVIEKTVDGQIVFKLTISEKETMFYYRTVNGLQPPIKVMTLGRILVKKWIHLSVQVHQTKISFFINGVEKDHTPFNARTLSGSITDFASGTVQIGQSLNGLEQFVGRMQDFRLYQVALTNREILEVFSGDLLRLHAQSHCRCPGSHPRVHPLAQRYCIPNDAGDTADNRVSRLNPEAHPLSFVNDNDVGTSWVSNVFTNITQLNQGVTISVDLENGQYQVFYIIIQFFSPQPTEIRIQRKKENSLDWEDWQYFARNCGAFGMKNNGDLEKPDSVNCLQLSNFTPYSRGNVTFSILTPGPNYRPGYNNFYNTPSLQEFVKATQIRFHFHGQYYTTETAVNLRHRYYAVDEITISGRCQCHGHADNCDTTSQPYRCLCSQESFTEGLHCDRCLPLYNDKPFRQGDQVYAFNCKPCQCNSHSKSCHYNISVDPFPFEHFRGGGGVCDDCEHNTTGRNCELCKDYFFRQVGADPSAIDVCKPCDCDTVGTRNGSILCDQIGGQCNCKRHVSGRQCNQCQNGFYNLQELDPDGCSPCNCNTSGTVDGDITCHQNSGQCKCKANVIGLRCDHCNFGFKFLRSFNDVGCEPCQCNLHGSVNKFCNPHSGQCECKKEAKGLQCDTCRENFYGLDVTNCKACDCDTAGSLPGTVCNAKTGQCICKPNVEGRQCNKCLEGNFYLRQNNSFLCLPCNCDKTGTINGSLLCNKSTGQCPCKLGVTGLRCNQCEPHRYNLTIDNFQHCQMCECDSLGTLPGTICDPISGQCLCVPNRQGRRCNQCQPGFYISPGNATGCLPCSCHTTGAVNHICNSLTGQCVCQDASIAGQRCDQCKDHYFGFDPQTGRCQPCNCHLSGALNETCHLVTGQCFCKQFVTGSKCDACVPSASHLDVNNLLGCSKTPFQQPPPRGQVQSSSAINLSWSPPDSPNAHWLTYSLLRDGFEIYTTEDQYPYSIQYFLDTDLLPYTKYSYYIETTNVHGSTRSVAVTYKTKPGVPEGNLTLSYIIPIGSDSVTLTWTTLSNQSGPIEKYILSCAPLAGGQPCVSYEGHETSATIWNLVPFAKYDFSVQACTSGGCLHSLPITVTTAQAPPQRLSPPKMQKISSTELHVEWSPPAELNGIIIRYELYMRRLRSTKETTSEESRVFQSSGWLSPHSFVESANENALKPPQTMTTITGLEPYTKYEFRVLAVNMAGSVSSAWVSERTGESAPVFMIPPSVFPLSSYSLNISWEKPADNVTRGKVVGYDINMLSEQSPQQSIPMAFSQLLHTAKSQELSYTVEGLKPYRIYEFTITLCNSVGCVTSASGAGQTLAAAPAQLRPPLVKGINSTTIHLRWFPPEELNGPSPIYQLERRESSLPALMTTMMKGIRFIGNGYCKFPSSTHPVNTDFTGIKASFRTKVPEGLIVFAASPGNQEEYFALQLKKGRLYFLFDPQGSPVEVTTTNDHGKQYSDGKWHEIIAIRHQAFGQITLDGIYTGSSAILNGSTVIGDNTGVFLGGLPRSYTILRKDPEIIQKGFVGCLKDVHFMKNYNPSAIWEPLDWQSSEEQINVYNSWEGCPASLNEGAQFLGAGFLELHPYMFHGGMNFEISFKFRTDQLNGLLLFVYNKDGPDFLAMELKSGILTFRLNTSLAFTQVDLLLGLSYCNGKWNKVIIKKEGSFISASVNGLMKHASESGDQPLVVNSPVYVGGIPQELLNSYQHLCLEQGFGGCMKDVKFTRGAVVNLASVSSGAVRVNLDGCLSTDSAVNCRGNDSILVYQGKEQSVYEGGLQPFTEYLYRVIASHEGGSVYSDWSRGRTTGAAPQSVPTPSRVRSLNGYSIEVTWDEPVVRGVIEKYILKAYSEDSTRPPRMPSASAEFVNTSNLTGILTGLLPFKNYAVTLTACTLAGCTESSHALNISTPQEAPQEVQPPVAKSLPSSLLLSWNPPKKANGIITQYCLYMDGRLIYSGSEENYIVTDLAVFTPHQFLLSACTHVGCTNSSWVLLYTAQLPPEHVDSPVLTVLDSRTIHIQWKQPRKISGILERYVLYMSNHTHDFTIWSVIYNSTELFQDHMLQYVLPGNKYLIKLGACTGGGCTVSEASEALTDEDIPEGVPAPKAHSYSPDSFNVSWTEPEYPNGVITSYGLYLDGILIHNSSELSYRAYGFAPWSLHSFRVQACTAKGCALGPLVENRTLEAPPEGTVNVFVKTQGSRKAHVRWEAPFRPNGLLTHSVLFTGIFYVDPVGNNYTLLNVTKVMYSGEETNLWVLIDGLVPFTNYTVQVNISNSQGSLITDPITIAMPPGAPDGVLPPRLSSATPTSLQVVWSTPARNNAPGSPRYQLQMRSGDSTHGFLELFSNPSASLSYEVSDLQPYTEYMFRLVASNGFGSAHSSWIPFMTAEDKPGPVVPPILLDVKSRMMLVTWQHPRKSNGVITHYNIYLHGRLYLRTPGNVTNCTVMHLHPYTAYKFQVEACTSKGCSLSPESQTVWTLPGAPEGIPSPELFSDTPTSVIISWQPPTHPNGLVENFTIERRVKGKEEVTTLVTLPRSHSMRFIDKTSALSPWTKYEYRVLMSTLHGGTNSSAWVEVTTRPSRPAGVQPPVVTVLEPDAVQVTWKPPLIQNGDILSYEIHMPDPHITLTNVTSAVLSQKVTHLIPFTNYSVTIVACSGGNGYLGGCTESLPTYVTTHPTVPQNVGPLSVIPLSESYVVISWQPPSKPNGPNLRYELLRRKIQQPLASNPPEDLNRWHNIYSGTQWLYEDKGLSRFTTYEYMLFVHNSVGFTPSREVTVTTLAGLPERGANLTASVLNHTAIDVRWAKPTVQDLQGEVEYYTLFWSSATSNDSLKILPDVNSHVIGHLKPNTEYWIFISVFNGVHSINSAGLHATTCDGEPQGMLPPEVVIINSTAVRVIWTSPSNPNGVVTEYSIYVNNKLYKTGMNVPGSFILRDLSPFTIYDIQVEVCTIYACVKSNGTQITTVEDTPSDIPTPTIRGITSRSLQIDWVSPRKPNGIILGYDLLWKTWYPCAKTQKLVQDQSDELCKAVRCQKPESICGHICYSSEAKVCCNGVLYNPKPGHRCCEEKYIPFVLNSTGVCCGGRIQEAQPNHQCCSGYYARILPGEVCCPDEQHNRVSVGIGDSCCGRMPYSTSGNQICCAGRLHDGHGQKCCGRQIVSNDLECCGGEEGVVYNRLPGMFCCGQDYVNMSDTICCSASSGESKAHIKKNDPVPVKCCETELIPKSQKCCNGVGYNPLKYVCSDKISTGMMMKETKECRILCPASMEATEHCGRCDFNFTSHICTVIRGSHNSTGKASIEEMCSSAEETIHTGSVNTYSYTDVNLKPYMTYEYRISAWNSYGRGLSKAVRARTKEDVPQGVSPPTWTKIDNLEDTIVLNWRKPIQSNGPIIYYILLRNGIERFRGTSLSFSDKEGIQPFQEYSYQLKACTVAGCATSSKVVAATTQGVPESILPPSITALSAVALHLSWSVPEKSNGVIKEYQIRQVGKGLIHTDTTDRRQHTVTGLQPYTNYSFTLTACTSAGCTSSEPFLGQTLQAAPEGVWVTPRHIIINSTTVELYWSLPEKPNGLVSQYQLSRNGNLLFLGGSEEQNFTDKNLEPNSRYTYKLEVKTGGGSSASDDYIVQTPMSTPEEIYPPYNITVIGPYSIFVAWIPPGILIPEIPVEYNVLLNDGSVTPLAFSVGHHQSTLLENLTPFTQYEIRIQACQNGSCGVSSRMFVKTPEAAPMDLNSPVLKALGSACIEIKWMPPEKPNGIIINYFIYRRPAGIEEESVLFVWSEGALEFMDEGDTLRPFTLYEYRVRACNSKGSVESLWSLTQTLEAPPQDFPAPWAQATSAHSVLLNWTKPESPNGIISHYRVVYQERPDDPTFNSPTVHAFTVKGTSHQAHLYGLEPFTTYRIGVVAANHAGEILSPWTLIQTLESSPSGLRNFIVEQKENGRALLLQWSEPMRTNGVIKTYNIFSDGFLEYSGLNRQFLFRRLDPFTLYTLTLEACTRAGCAHSAPQPLWTDEAPPDSQLAPTVHSVKSTSVELSWSEPVNPNGKIIRYEVIRRCFEGKAWGNQTIQADEKIVFTEYNTERNTFMYNDTGLQPWTQCEYKIYTWNSAGHTCSSWNVVRTLQAPPEGLSPPVISYVSMNPQKLLISWIPPEQSNGIIQSYRLQRNEMLYPFSFDPVTFNYTDEELLPFSTYSYALQACTSGGCSTSKPTSITTLEAAPSEVSPPDLWAVSATQMNVCWSPPTVQNGKITKYLVRYDNKESLAGQGLCLLVSHLQPYSQYNFSLVACTNGGCTASVSKSAWTMEALPENMDSPTLQVTGSESIEITWKPPRNPNGQIRSYELRRDGTIVYTGLETRYRDFTLTPGVEYSYTVTASNSQGGILSPLVKDRTSPSAPSGMEPPKLQARGPQEILVNWDPPVRTNGDIINYTLFIRELFERETKIIHINTTHNSFGMQSYIVNQLKPFHRYEIRIQACTTLGCASSDWTFIQTPEIAPLMQPPPHLEVQMAPGGFQPTVSLLWTGPLQPNGKVLYYELYRRQIATQPRKSNPVLIYNGSSTSFIDSELLPFTEYEYQVWAVNSAGKAPSSWTWCRTGPAPPEGLRAPTFHVISSTQAVVNISAPGKPNGIVSLYRLFSSSAHGAETVLSEGMATQQTLHGLQAFTNYSIGVEACTCFNCCSKGPTAELRTHPAPPSGLSSPQIGTLASRTASFRWSPPMFPNGVIHSYELQFHVACPPDSALPCTPSQIETKYTGLGQKASLGGLQPYTTYKLRVVAHNEVGSTASEWISFTTQKELPQYRAPFSVDSNLSVVCVNWSDTFLLNGQLKEYVLTDGGRRVYSGLDTTLYIPRTADKTFFFQVICTTDEGSVKTPLIQYDTSTGLGLVLTTPGKKKGSRSKSTEFYSELWFIVLMAMLGLILLAIFLSLILQRKIHKEPYIRERPPLVPLQKRMSPLNVYPPGENHMFDSVADISDVSSNVTLKSYTMHFEGLADTKIPRSGTPVSIRSNRSACVLRIPSQNQTSLTYSQGSLHRSVSQLMDIQDKKVLMDNSLWEAIMGHNSGLYVDEEDLMNAIKDFSSVTKERTTFTDTHL

SEQ ID NO: 8367 - protein, 2245 aa, Homo sapiens
MPEMTENETPTKKQHRKKNRETHNAVERHRKKKINAGINRIGELIPCSPALKQSKNMILDQAFKYITELKRQNDELLLNGGNNEQAEEIKKLRKQLEEIQKENGRYIELLKANDICLYDDPTIHWKGNLKNSKVSVVIPSDQVQKKIIVYSNGNQPGGNSQGTAVQGITFNVSHNLQKQTANVVPVQRTCNLVTPVSISGVYPSENKPWHQTTVPALATNQPVPLCLPAAISAQSILELPTSESESNVLGATSGSLIAVSIESEPHQHHSLHTCLNDQNSSENKNGQENPKVLKKMTPCVTNIPHSSSATATKVHHGNKSCLSIQDFRGDFQNTFVVSVTTTVCSQPPRTAGDSSPMSISKSADLTSTATVVASSAPGVGKATIPISTLSGNPLDNGWTLSCSLPSSSVSTSDLKNINSLTRISSAGNTQTTWTTLQLAGNTIQPLSQTPSSAVTPVLNESGTSPTTSNHSRYVATDINLNNSFPADGQPVEQVVVTLPSCPSLPMQPLIAQPQVKSQPPKNILPLNSAMQVIQMAQPVGSAVNSAPTNQNVIILQPPSTTPCPTVMRAEVSNQTVGQQIVIIQAANQNPLPLLPAPPPGSVRLPINGANTVIGSNNSVQNVPTPQTFGGKHLVHILPRPSSLSASNSTQTFSVTMSNQQPQTISLNGQLFALQPVMSSSGTTNQTPMQIIQPTTSEDPNTNVALNTFGALASLNQSISQMAGQSCVQLSISQPANSQTAANSQTTTANCVSLTTTAAPPVTTDSSATLASTYNLVSTSSMNTVACLPNMKSKRLNKKPGGRKHLAANKSACPLNSVRDVSKLDCPNTEGSAEPPCNDGLLESFPAVLPSVSVSQANSVSVSASHSLGVLSSESLIPESVSKSKSAEKSSPPSQESVTSEHFAMAAAKSKDSTPNLQQETSQDKPPSSLALSDAAKPCASANVLIPSPSDPHILVSQVPGLSSTTSTTSTDCVSEVEIIAEPCRVEQDSSDTMQTTGLLKGQGLTTLLSDLAKKKNPQKSSLSDQMDHPDFSSENPKIVDSSVNLHPKQELLLMNNDDRDPPQHHSCLPDQEVINGSLINGRQADSPMSTSSGSSRSFSVASMLPETTREDVTSNATTNTCDSCTFVEQTDIVALAARAIFDQENLEKGRVGLQADIREVASKPSEASLLEGDPPFKSQIPKESGTGQAEATPNEFNSQGSIEATMERPLEKPSCSLGIKTSNASLQDSTSQPPSITSLSVNNLIHQSSISHPLASCAGLSPTSEQTTVPATVNLTVSSSSYGSQPPGPSLMTEYSQEQLNTMTSTIPNSQIQEPLLKPSHESRKDSAKRAVQDDLLLSSAKRQKHCQPAPLRLESMSLMSRTPDTISDQTQMMVSQIPPNSSNSVVPVSNPAHGDGLTRLFPPSNNFVTPALRQTEVQCGSQPSVAEQQQTQASQHLQALQQHVPAQGVSHLHSNHLYIKQQQQQQQQQQQQQQQQQAGQLRERHHLYQMQHHVPHAESSVHSQPHNVHQQRTLQQEVQMQKKRNLVQGTQTSQLSLQPKHHGTDQSRSKTGQPHPHHQQMQQQMQQHFGSSQTEKSCENPSTSRNHHNHPQNHLNQDIMHQQQDVGSRQQGSGVSSEHVSGHNPMQRLLTSRGLEQQMVSQPSIVTRSSDMTCTPHRPERNRVSSYSAEALIGKTSSNSEQRMGISIQGSRVSDQLEMRSYLDVPRNKSLAIHNMQGRVDHTVASDIRLSDCQTFKPSGASQQPQSNFEVQSSRNNEIGNPVSSLRSMQSQAFRISQNTGPPPIDRQKRLSYPPVQSIPTGNGIPSRDSENTCHQSFMQSLLAPHLSDQVIGSQRSLSEHQRNTQCGPSSAIEYNCPPTHENVHIRRESESQNRESCDMSLGAINTRNSTLNIPFSSSSSSGDIQGRNTSPNVSVQKSNPMRITESHATKGHMNPPVTTNMHGVARPALPHPSVSHGNGDQGPAVRQANSSVPQRSRHPLQDSSGSKIRQPERNRSGNQRQSTVFDPSLPHLPLSTGGSMILGRQQPATEKRGSIVRFMPDSPQVPNDNSGPDQHTLSQNFGFSFIPEGGMNPPINANASFIPQVTQPSATRTPALIPVDPQNTLPSFYPPYSPAHPTLSNDISIPYFPNQMFSNPSTEKVNSGSLNNRFGSILSPPRPVGFAQPSFPLLPDMPPMHMTNSHLSNFNMTSLFPEIATALPDGSAMSPLLTIANSSASDSSKQSSNRPAHNISHILGHDCSSAV

SEQ ID NO: 8368 - protein, 116 aa, Homo sapiens
MSATAATAPPAAPAGEGGPPAPPPNLTSNRRLQQTQAQVDEVVDIMRVNVDKVLERDQKLSELDDRADALQAGASQFETSAAKLKRKYWWKNLKMMIILGVICAIILIIIIVYFST

SEQ ID NO: 8369 - protein, 419 aa, Homo sapiens
MHLLGFFSVACSLLAAALLPGPREAPAAAAAFESGLDLSDAEPDAGEATAYASKDLEEQLRSVSSVDELMTVLYPEYWKMYKCQLRKGGWQHNREQANLNSRTEETIKFAAAHYNTEILKSIDNEWRKTQCMPREVCIDVGKEFGVATNTFFKPPCVSVYRCGGCCNSEGLQCMNTSTSYLSKTLFEITVPLSQGPKPVTISFANHTSCRCMSKLDVYRQVHSIIRRSLPATLPQCQAANKTCPTNYMWNNHICRCLAQEDFMFSSDAGDDSTDGFHDICGPNKELDEETCQCVCRAGLRPASCGPHKELDRNSCQCVCKNKLFPSQCGANREFDENTCQCVCKRTCPRNQPLNPGKCACECTESPQKCLLKGKKFHHQTCSCYRRPCTNRQKACEPGFSYSEEVCRCVPSYWKRPQMS

SEQ ID NO: 8370 - protein, 350 aa, Homo sapiens
MGCFFSKRRKADKESRPENEEERPKQYSWDQREKVDPKDYMFSGLKDETVGRLPGTVAGQQFLIQDCENCNIYIFDHSATVTIDDCTNCIIFLGPVKGSVFFRNCRDCKCTLACQQFRVRDCRKLEVFLCCATQPIIESSSNIKFGCFQWYYPELAFQFKDAGLSIFNNTWSNIHDFTPVSGELNWSLLPEDAVVQDYVPIPTTEELKAVRVSTEANRSIVPISRGQRQKSSDESCLVVLFAGDYTIANARKLIDEMVGKGFFLVQTKEVSMKAEDAQRVFREKAPDFLPLLNKGPVIALEFNGDGAVEVCQLIVNEIFNGTKMFVSESKETASGDVDSFYNFADIQMGI

SEQ ID NO: 8371 - protein, 514 aa, Homo sapiens
MALSELALVRWLQESRRSRKLILFIVFLALLLDNMLLTVVVPIIPSYLYSIKHEKNATEIQTARPVHTASISDSFQSIFSYYDNSTMVTGNATRDLTLHQTATQHMVTNASAVPSDCPSEDKDLLNENVQVGLLFASKATVQLITNPFIGLLTNRIGYPIPIFAGFCIMFVSTIMFAFSSSYAFLLIARSLQGIGSSCSSVAGMGMLASVYTDDEERGNVMGIALGGLAMGVLVGPPFGSVLYEFVGKTAPFLVLAALVLLDGAIQLFVLQPSRVQPESQKGTPLTTLLKDPYILIAAGSICFANMGIAMLEPALPIWMMETMCSRKWQLGVAFLPASISYLIGTNIFGILAHKMGRWLCALLGMIIVGVSILCIPFAKNIYGLIAPNFGVGFAIGMVDSSMMPIMGYLVDLRHVSVYGSVYAIADVAFCMGYAIGPSAGGAIAKAIGFPWLMTIIGIIDILFAPLCFFLRSPPAKEEKMAILMDHNCPIKTKMYTQNNIQSYPIGEDEESESD

SEQ ID NO: 8372 - protein, 209 aa, Homo sapiens
MALSELALVRWLQESRRSRKLILFIVFLALLLDNMLLTVVVPIIPSYLYSIKHEKNATEIQTARPVHTASISDSFQSIFSYYDNSTMVTGNATRDLTLHQTATQHMVTNASAVPSDCPSEDKDLLNENVQVGLLFASKATVQLITNPFIGLLTNRIGYPIPIFAGFCIMFVSTIMFAFSSSYAFLLIARSLQGIGSSCSSVAGRCGMPE

SEQ ID NO: 8373 - protein, 650 aa, Homo sapiens
MAAKSDGRLKMKKSSDVAFTPLQNSDHSGSVQGLAPGLPSGSGAEDEEAAGGGCCPDGGGCSRCCCCCAGSGGSAGSGGSGGVAGPGGGGAGSAALCLRLGREQRRYSLWDCLWILAAVAVYFADVGTDVWLAVDYYLRGQRWWFGLTLFFVVLGSLSVQVFSFRWFVHDFSTEDSATAAAASSCPQPGADCKTVVGGGSAAGEGEARPSTPQRQASNASKSNIAAANSGSNSSGATRASGKHRSASCSFCIWLLQSLIHILQLGQIWRYFHTIYLGIRSRQSGENDRWRFYWKMVYEYADVSMLHLLATFLESAPQLVLQLCIIVQTHSLQALQGFTAAASLVSLAWALASYQKALRDSRDDKKPISYMAVIIQFCWHFFTIAARVITFALFASVFQLYFGIFIVLHWCIMTFWIVHCETEFCITKWEEIVFDMVVGIIYIFSWFNVKEGRTRCRLFIYYFVILLENTALSALWYLYKAPQIADAFAIPALCVVFSSFLTGVVFMLMYYAFFHPNGPRFGQSPSCACEDPAAAFTLPPDVATSTLRSISNNRSVVSDRDQKFAERDGCVPVFQVRPTAPSTPSSRPPRIEESVIKIDLFRNRYPAWERHVLDRSLRKAILAFECSPSPPRLQYKDDALIQERLEYETTL

SEQ ID NO: 8374 - protein, 378 aa, Homo sapiens
MDPGDDWLVESLRLYQDFYAFDLSGATRVLEWIDDKGVFVAGYESLKKNEILHLKLPLRLSVKENKGLFPERDFKVRHGGFSDRSIFDLKHVPHTRLLVTSGLPGCYLQVWQVAEDSDVIKAVSTIAVHEKEESLWPRVAVFSTLAPGVLHGARLRSLQVVDLESRKTTYTSDVSDSEELSSLQVLDADTFAFCCASGRLGLVDTRQKWAPLENRSPGPGSGGERWCAEVGSWGQGPGPSIASLGSDGRLCLLDPRDLCHPVSSVQCPVSVPSPDPELLRVTWAPGLKNCLAISGFDGTVQVYDATSWDGTRSQDGTRSQVEPLFTHRGHIFLDGNGMDPAPLVTTHTWHPCRPRTLLSATNDASLHVWDWVDLCAPR

SEQ ID NO: 8375 - protein, 122 aa, Homo sapiens
MEPWWPRGTGANAPWVLVAVPPGLFPSLLGACCTLTSSSWLQPRFWGLGWRVEVGLEGAGGSSQNYQAALPSFFCLAASPASRPAIFGILAAEPPSASPQAPWPKPGCASPHGSHWPSILIC

SEQ ID NO: 8376 - protein, 599 aa, Homo sapiens
MAAALRAPTQQVFVAFEDVAIYFSQEEWELLDEMQRLLYRDVMLENFAVMASLGCWCGAVDEGTPSAESVSVEELSQGRTPKADTSTDKSHPCEICTPVLRDILQMIELHASPCGQKLYLGGASRDFWMSSNLHQLQKLDNGEKLFKVDGDQASFMMNCRFHVSGKPFTFGEVGRDFSATSGLLQHQVTPTIERPHSRIRHLRVPTGRKPLKYTESRKSFREKSVFIQHQRADSGERPYKCSECGKSFSQSSGFLRHRKAHGRTRTHECSECGKSFSRKTHLTQHQRVHTGERPYDCSECGKSFRQVSVLIQHQRVHTGERPYECSECGKSFSHSTNLYRHRSAHTSTRPYECSECGKSFSHSTNLFRHWRVHTGVRPYECSECGKAFSCNIYLIHHQRFHTGERPYVCSECGKSFGQKSVLIQHQRVHTGERPYECSECGKVFSQSSGLFRHRRAHTKTKPYECSECEKSFSCKTDLIRHQTVHTGERPYECSVCGKSFIRKTHLIRHQTVHTNERPYECDECGKSYSQSSALLQHRRVHTGERPYECRECGKSFTRKNHLIQHKTVHTGERPYECSECGKSFSQSSGLLRHRRVHVQ

SEQ ID NO: 8377 - protein, 436 aa, Homo sapiens
MDSVAFEDVAVNFTQEEWALLSPSQKNLYRDVTLETFRNLASVGIQWKDQDIENLYQNLGIKLRSLVERLCGRKEGNEHRETFSQIPDCHLNKKSQTGVKPCKCSVCGKVFLRHSFLDRHMRAHAGHKRSECGGEWRETPRKQKQHGKASISPSSGARRTVTPTRKRPYECKVCGKAFNSPNLFQIHQRTHTGKRSYKCREIVRAFTVSSFFRKHGKMHTGEKRYECKYCGKPIDYPSLFQIHVRTHTGEKPYKCKQCGKAFISAGYLRTHEIRSHALEKSHQCQECGKKLSCSSSLHRHERTHSGGKLYECQKCAKVFRCPTSLQAHERAHTGERPYECNKCGKTFNYPSCFRRHKKTHSGEKPYECTRCGKAFGWCSSLRRHEMTHTGEKPFDCKQCGKVFTFSNYLRLHERTHLAGRSQCFGRRQGDHLSPGV

SEQ ID NO: 8378 - protein, 316 aa, Homo sapiens
MRAHAGHKRSECGGEWRETPRKQKQHGKASISPSSGARRTVTPTRKRPYECKVCGKAFNSPNLFQIHQRTHTGKRSYKCREIVRAFTVSSFFRKHGKMHTGEKRYECKYCGKPIDYPSLFQIHVRTHTGEKPYKCKQCGKAFISAGYLRTHEIRSHALEKSHQCQECGKKLSCSSSLHRHERTHSGGKLYECQKCAKVFRCPTSLQAHERAHTGERPYECNKCGKTFNYPSCFRRHKKTHSGEKPYECTRCGKAFGWCSSLRRHEMTHTGEKPFDCKQCGKVFTFSNYLRLHERTHLAGRSQCFGRRQGDHLSPGV

SEQ ID NO: 8379 - protein, 803 aa, Homo sapiens
MDFPQHSQHVLEQLNQQRQLGLLCDCTFVVDGVHFKAHKAVLAACSEYFKMLFVDQKDVVHLDISNAAGLGQVLEFMYTAKLSLSPENVDDVLAVATFLQMQDIITACHALKSLAEPATSPGGNAEALATEGGDKRAKEEKVATSTLSRLEQAGRSTPIGPSRDLKEERGGQAQSAASGAEQTEKADAPREPPPVELKPDPTSGMAAAEAEAALSESSEQEMEVEPARKGEEEQKEQEEQEEEGAGPAEVKEEGSQLENGEAPEENENEESAGTDSGQELGSEARGLRSGTYGDRTESKAYGSVIHKCEDCGKEFTHTGNFKRHIRIHTGEKPFSCRECSKAFSDPAACKAHEKTHSPLKPYGCEECGKSYRLISLLNLHKKRHSGEARYRCEDCGKLFTTSGNLKRHQLVHSGEKPYQCDYCGRSFSDPTSKMRHLETHDTDKEHKCPHCDKKFNQVGNLKAHLKIHIADGPLKCRECGKQFTTSGNLKRHLRIHSGEKPYVCIHCQRQFADPGALQRHVRIHTGEKPCQCVMCGKAFTQASSLIAHVRQHTGEKPYVCERCGKRFVQSSQLANHIRHHDNIRPHKCSVCSKAFVNVGDLSKHIIIHTGEKPYLCDKCGRGFNRVDNLRSHVKTVHQGKAGIKILEPEEGSEVSVVTVDDMVTLATEALAATAVTQLTVVPVGAAVTADETEVLKAEISKAVKQVQEEDPNTHILYACDSCGDKFLDANSLAQHVRIHTAQALVMFQTDADFYQQYGPGGTWPAGQVLQAGELVFRPRDGAEGQPALAETSPTAPECPPPAE

SEQ ID NO: 8380 - protein, 810 aa, Homo sapiens
MDFPQHSQHVLEQLNQQRQLGLLCDCTFVVDGVHFKAHKAVLAACSEYFKMLFVDQKDVVHLDISNAAGLGQVLEFMYTAKLSLSPENVDDVLAVATFLQMQDIITACHALKSLAEPATSPGGNAEALATEGGDKRAKEEKVATSTLSRLEQAGRSTPIGPSRDLKEERGGQAQSAASGAEQTEKADAPREPPPVELKPDPTSGMAAAEAEAALSESSEQEMEVEPARKGEEEQKEQEEQEEEGAGPAEVKEEGSQLENGEAPEENENEESAGTDSGQELGSEARGLRSGTYGDRTESKAYGSVIHKCEDCGKEFTHTGNFKRHIRIHTGEKPFSCRECSKAFSDPAACKAHEKTHSPLKPYGCEECGKSYRLISLLNLHKKRHSGEARYRCEDCGKLFTTSGNLKRHQLVHSGEKPYQCDYCGRSFSDPTSKMRHLETHDTDKEHKCPHCDKKFNQVGNLKAHLKIHIADGPLKCRECGKQFTTSGNLKRHLRIHSGEKPYVCIHCQRQFADPGALQRHVRIHTGEKPCQCVMCGKAFTQASSLIAHVRQHTGEKPYVCERCGKRFVQSSQLANHIRHHDNIRPHKCSVCSKAFVNVGDLSKHIIIHTGEKPYLCDKCGRGFNRVDNLRSHVKTVHQGKAGIKILEPEEGSEVSVVTVDDMVTLATEALAATAVTQLTGPATLPAVVPVGAAVTADETEVLKAEISKAVKQVQEEDPNTHILYACDSCGDKFLDANSLAQHVRIHTAQALVMFQTDADFYQQYGPGGTWPAGQVLQAGELVFRPRDGAEGQPALAETSPTAPECPPPAE

SEQ ID NO: 8381 - protein, 721 aa, Homo sapiens
MMCWPWPLSSKCRTSSRPAMPSSHLLSRLPALGEMRRPWPQKVCPVPSPGGDKRAKEEKVATSTLSRLEQAGRSTPIGPSRDLKEERGGQAQSAASGAEQTEKADAPREPPPVELKPDPTSGMAAAEAEAALSESSEQEMEVEPARKGEEEQKEQEEQEEEGAGPAEVKEEGSQLENGEAPEENENEESAGTDSGQELGSEARGLRSGTYGDRTESKAYGSVIHKCEDCGKEFTHTGNFKRHIRIHTGEKPFSCRECSKAFSDPAACKAHEKTHSPLKPYGCEECGKSYRLISLLNLHKKRHSGEARYRCEDCGKLFTTSGNLKRHQLVHSGEKPYQCDYCGRSFSDPTSKMRHLETHDTDKEHKCPHCDKKFNQVGNLKAHLKIHIADGPLKCRECGKQFTTSGNLKRHLRIHSGEKPYVCIHCQRQFADPGALQRHVRIHTGEKPCQCVMCGKAFTQASSLIAHVRQHTGEKPYVCERCGKRFVQSSQLANHIRHHDNIRPHKCSVCSKAFVNVGDLSKHIIIHTGEKPYLCDKCGRGFNRVDNLRSHVKTVHQGKAGIKILEPEEGSEVSVVTVDDMVTLATEALAATAVTQLTVVPVGAAVTADETEVLKAEISKAVKQVQEEDPNTHILYACDSCGDKFLDANSLAQHVRIHTAQALVMFQTDADFYQQYGPGGTWPAGQVLQAGELVFRPRDGAEGQPALAETSPTAPECPPPAE

SEQ ID NO: 8382 - protein, 562 aa, Homo sapiens
MDPQPPPPAQGSPPHRGRGRGRGRGRGRGRGRGRGGAGAPRAPLPCPTCGRLFRFPYYLSRHRLSHSGLRPHACPLCPKAFRRPAHLSRHLRGHGPQPPLRCAACPRTFPEPAQLRRHLAQEHAGGEVELAIERVAKETAEPSWGPQDEGSEPPTTAAAGATEEEAVAAWPETWPAGEPSTLAAPTSAAEPRESESEEAEAGAAELRAELALAAGRQEEKQVLLQADWTLLCLRCREAFATKGELKAHPCLRPEGEQEGEGGPPPRPKRHQCSICLKAFARPWSLSRHRLVHSTDRPFVCPDCGLAFRLASYLRQHRRVHGPLSLLAPLPAAGKKDDKASGARNSAKGPEGGEGAECGGASEGGEGQNGGDAAPARPPAGEPRFWCPECGKGFRRRAHLRQHGVTHSGARPFQCVRCQREFKRLADLARHAQVHAGGPAPHPCPRCPRRFSRAYSLLRHQRCHRAELERAAALQALQAQAPTSPPPPPPPLKAEQEEEGLPLPLANIKEEPPSPGTPPQSPPAPPVFLSASCFDSQDHSAFEMEEEEVDSKAHLRGLGGLAS

SEQ ID NO: 8383 - protein, 619 aa, Homo sapiens [sequence omitted]

SEQ ID NO: 8384 - protein, 642 aa, Homo sapiens
MSEPGMLGRKDVWVPRETPFTKAMEVEAAEARSPAPGYKRSGRRYKCVSCTKTFPNAPRAARHAATHGPADCSEEVAEVKPKPETEAKAEEASGEKVSGSAAKPRPYACPLCPKAYKTAPELRSHGRSHTGEKPFPCPECGRRFMQPVCLRVHLASHAGELPFRCAHCPKAYGALSKLKIHQRGHTGERPYACADCGKSFADPSVFRKHRRTHAGLRPYSCERCGKAYAELKDLRNHERSHTGERPFLCSECGKSFSRSSSLTCHQRIHAAQKPYRCPACGKGFTQLSSYQSHERTHSGEKPFLCPRCGRMFSDPSSFRRHQRAHEGVKPYHCEKCGKDFRQPADLAMHRRVHTGDRPFKCLQCDKTFVASWDLKRHALVHSGQRPFRCEECGRAFAERASLTKHSRVHSGERPFHCNACGKSFVVSSSLRKHERTHRSSEAAGVPPAQELVVGLALPVGVAGESSAAPAAGAGLGDPPAGLLGLPPESGGVMATQWQVVGMTVEHVECQDAGVREAPGPLEGAGEAGGEEADEKPPQFVCRECKETFSTMTLLRRHERSHPELRPFPCTQCGKSFSDRAGLRKHSRTHSSVRPYTCPHCPKAFLSASDLRKHERTHPVPMGTPTPLEPLVALLGMPEEGPA

SEQ ID NO: 8385 - protein, 623 aa, Homo sapiens
MAHKYVGLQYHGSVTFEDVAIAFSQQEWESLDSSQRGLYRDVMLENYRNLVSMGHSRSKPHVIALLEQWKEPEVTVRKDGRRWCTDLQLEDDTIGCKEMPTSENCPSFALHQKISRQKPRECQEYGKTLCQDSKPVQHERIHSSEKPNRCKECGKNFSNGHQLTIHQRLHVGEKPYKYEKCGKAFISGSAFVKHGRIHTGEKPLKCKQCGKTISGSYQLTVHKSIHTGKKPYECGECGKAFLVYGKLTRHQSTHTGEKPFGCEECGKAFSTFSYLVQHQRIHTSEKPYECKECGKAFSTSSPLAKHQRIHTGEKPYECKECGKSFTVYGQLTRHQSIHTGEKPFECKECGKAFRLSSFLHAHQRIHAEIKPYGCKECGRTFSRASYLVQHGRLHTGEKPYECKECGKAFSTGSYLVQHQRIHTGEKPYECKECGKAFISRHQLTVHQRVHTGEKPYECKECGKAFRVHVHLTQHRKIHTDVKPYECKECGKTFSRASYLVQHSRIHTGKKPYECKECGKAFSSGSYLVQHQRIHTGEKPYECNKCGKAFTVYGQLIGHQSVHTGEKPFECKECGKAFRLNSFLTEHQRVHTGEKPFKCKKCGKTFRYSSALKVHLRKHMSVIP

SEQ ID NO: 8386 - protein, 624 aa, Homo sapiens
MAHKYVGLQYHGSVTFEDVAIAFSQQEWESLDSSQRGLYRDVMLENYRNLVSMAGHSRSKPHVIALLEQWKEPEVTVRKDGRRWCTDLQLEDDTIGCKEMPTSENCPSFALHQKISRQKPRECQEYGKTLCQDSKPVQHERIHSSEKPNRCKECGKNFSNGHQLTIHQRLHVGEKPYKYEKCGKAFISGSAFVKHGRIHTGEKPLKCKQCGKTISGSYQLTVHKSIHTGKKPYECGECGKAFLVYGKLTRHQSTHTGEKPFGCEECGKAFSTFSYLVQHQRIHTSEKPYECKECGKAFSTSSPLAKHQRIHTGEKPYECKECGKSFTVYGQLTRHQSIHTGEKPFECKECGKAFRLSSFLHAHQRIHAEIKPYGCKECGRTFSRASYLVQHGRLHTGEKPYECKECGKAFSTGSYLVQHQRIHTGEKPYECKECGKAFISRHQLTVHQRVHTGEKPYECKECGKAFRVHVHLTQHRKIHTDVKPYECKECGKTFSRASYLVQHSRIHTGKKPYECKECGKAFSSGSYLVQHQRIHTGEKPYECNKCGKAFTVYGQLIGHQSVHTGEKPFECKECGKAFRLNSFLTEHQRVHTGEKPFKCKKCGKTFRYSSALKVHLRKHMSVIP

SEQ ID NO: 8387 - protein, 86 aa, Homo sapiens
MAHKYVGLQYHGSVTFEDVAIAFSQQEWESLDSSQRGLYRDVMLENYRNLVSMGHSRSKPHVIALLEQWKEPEVTVRKDGRRWCTG

SEQ ID NO: 8388 - protein, 581 aa, Homo sapiens
MAMSQESLTFKDVFVDFTLEEWQQLDSAQKNLYRDVMLENYSHLVSVGHLVGKPDVIFRLGPGDESWMADGGTPVRTCAGEDRPEVWEVDEQIDHYKESQDKFLWQAAFIGKETLKDESGQECKICRKIIYLNTDFVSVKQRLPKYYSWERCSKHHLNFLGQNRSYVRKKDDGCKAYWKVCLHYNLHKAQPAERFFDPNQRGKALHQKQALRKSQRSQTGEKLYKCTECGKVFIQKANLVVHQRTHTGEKPYECCECAKAFSQKSTLIAHQRTHTGEKPYECSECGKTFIQKSTLIKHQRTHTGEKPFVCDKCPKAFKSSYHLIRHEKTHIRQAFYKGIKCTTSSLIYQRIHTSEKPQCSEHGKASDEKPSPTKHWRTHTKENIYECSKCGKSFRGKSHLSVHQRIHTGEKPYECSICGKTFSGKSHLSVHHRTHTGEKPYECRRCGKAFGEKSTLIVHQRMHTGEKPYKCNECGKAFSEKSPLIKHQRIHTGERPYECTDCKKAFSRKSTLIKHQRIHTGEKPYKCSECGKAFSVKSTLIVHHRTHTGEKPYECRDCGKAFSGKSTLIKHQRSHTGDKNL

SEQ ID NO: 8389 - protein, 575 aa, Homo sapiens
MAMSQESLTFKDVFVDFTLEEWQQLDSAQKNLYRDVMLENYSHLVSVGHLVGKPDVIFRLGPGDESWMADGGTPVRTCAVWEVDEQIDHYKESQDKFLWQAAFIGKETLKDESGQECKICRKIIYLNTDFVSVKQRLPKYYSWERCSKHHLNFLGQNRSYVRKKDDGCKAYWKVCLHYNLHKAQPAERFFDPNQRGKALHQKQALRKSQRSQTGEKLYKCTECGKVFIQKANLVVHQRTHTGEKPYECCECAKAFSQKSTLIAHQRTHTGEKPYECSECGKTFIQKSTLIKHQRTHTGEKPFVCDKCPKAFKSSYHLIRHEKTHIRQAFYKGIKCTTSSLIYQRIHTSEKPQCSEHGKASDEKPSPTKHWRTHTKENIYECSKCGKSFRGKSHLSVHQRIHTGEKPYECSICGKTFSGKSHLSVHHRTHTGEKPYECRRCGKAFGEKSTLIVHQRMHTGEKPYKCNECGKAFSEKSPLIKHQRIHTGERPYECTDCKKAFSRKSTLIKHQRIHTGEKPYKCSECGKAFSVKSTLIVHHRTHTGEKPYECRDCGKAFSGKSTLIKHQRSHTGDKNL

SEQ ID NO: 8390 - protein, 892 aa, Homo sapiens
MTDPFCVGGRRLPGSSKSGPGKDGSRKEVRLPMLHDPPKMGMPVVRGGQTVPGQAPLCFDPGSPASDKTEGKKKGRPKAENQALRDIPLSLMNDWKDEFKAHSRVKCPNSGCWLEFPSIYGLKYHYQRCQGGAISDRLAFPCPFCEAAFTSKTQLEKHRIWNHMDRPLPASKPGPISRPVTISRPVGVSKPIGVSKPVTIGKPVGVSKPIGISKPVSVGRPMPVTKAIPVTRPVPVTKPVTVSRPMPVTKAMPVTKPITVTKSVPVTKPVPVTKPITVTKLVTVTKPVPVTKPVTVSRPIVVSKPVTVSRPIAISRHTPPCKMVLLTRSENKAPRATGRNSGKKRAADSLDTCPIPPKQARPENGEYGPSSMGQSSAFQLSADTSSGSLSPGSRPSGGMEALKAAGPASPPEEDPERTKHRRKQKTPKKFTGEQPSISGTFGLKGLVKAEDKARVHRSKKQEGPGPEDARKKVPAAPITVSKEAPAPVAHPAPGGPEEQWQRAIHERGEAVCPTCNVVTRKTLVGLKKHMEVCQKLQDALKCQHCRKQFKSKAGLNYHTMAEHSAKPSDAEASEGGEQEERERLRKVLKQMGRLRCPQEGCGAAFSSLMGYQYHQRRCGKPPCEVDSPSFPCTHCGKTYRSKAGHDYHVRSEHTAPPPEEPTDKSPEAEDPLGVERTPSGRVRRTSAQVAVFHLQEIAEDELARDWTKRRMKDDLVPETARLNYTRPGLPTLNPQLLEAWKNEVKEKGHVNCPNDCCEAIYSSVSGLKAHLASCSKGAHLAGKYRCLLCPKEFSSESGVKYHILKTHAENWFRTSADPPPKHRSQDSLVPKKEKKKNLAGGKKRGRKPKERTPEEPVAKLPPRRDDWPPGCRDKGARGSTGRKVGVSKAPEK

SEQ ID NO: 8391 - protein, 606 aa, Homo sapiens
MSHTASSCQELVENCAVHVAGMAQEDSRRGQVPSSFYHGANQELDLSTKVYKRESGSPYSVLVDTKMSKPHLHETEEQPYFRETRAVSDVHAVKEDRENSDDTEEEEEEVSYKREQIIVEVNLNNQTLNVSKGEKGVSSQSKETPVLKTSSEEEEEESEEEATDDSNDYGENEKQKKKEKIVEKVSVTQRRTRRAASVAAATTSPTPRTTRGRRKSVEPPKRKKRATKEPKAPVQKAKCEEKETLTCEKCPRVFNTRWYLEKHMNVTHRRMQICDKCGKKFVLESELSLHQQTDCEKNIQCVSCNKSFKKLWSLHEHIKIVHGYAEKKFSCEICEKKFYTMAHVRKHMVAHTKDMPFTCETCGKSFKRSMSLKVHSLQHSGEKPFRCENCDERFQYKYQLRSHMSIHIGHKQFMCQWCGKDFNMKQYFDEHMKTHTGEKPFICEICGKSFTSRPNMKRHRRTHTGEKPYPCDVCGQRFRFSNMLKAHKEKCFRVTSPVNVPPAVQIPLTTSPATPVPSVVNTATTPTPPINMNPVSTLPPRPIPHPFSHLHIHPHPHHPHHLPIPPVPHLPPPPALFKSEPLNHRGQSEDNFLRHLAEKNSSAQHH

SEQ ID NO: 8392 - protein, 499 aa, Homo sapiens
MLSLSPILLYTCEMFQDPVAFKDVAVNFTQEEWALLDISQKNLYREVMLETFWNLTSIGKKWKDQNIEYEYQNPRRNFRSVTEEKVNEIKEDSHCGETFTPVPDDRLNFQKKKASPEVKSCDSFVCEVGLGNSSSNMNIRGDTGHKACECQEYGPKPWKSQQPKKAFRYHPSLRTQERDHTGKKPYACKECGKNIIYHSSIQRHMVVHSGDGPYKCKFCGKAFHCLSLYLIHERTHTGEKPYECKQCGKSFSYSATHRIHERTHIGEKPYECQECGKAFHSPRSCHRHERSHMGEKAYQCKECGKAFMCPRYVRRHERTHSRKKLYECKQCGKALSSLTSFQTHIRMHSGERPYECKTCGKGFYSAKSFQRHEKTHSGEKPYKCKQCGKAFTRSGSFRYHERTHTGEKPYECKQCGKAFRSAPNLQLHGRTHTGEKPYQCKECGKAFRSASQLRIHRRIHTGEKPYECKKCGKAFRYVQNFRFHERTQTHKNALWRKTL

SEQ ID NO: 8393 - protein, 1322 aa, Homo sapiens
MAWMTYISNWFEQDDWYEGLQRANMSQVRQVGLLAAGCQPWNKDVCAASGDRFAYCATLAIYIYQLDHRYNEFKLHAIMSEHKKTITAISWCPHNPDLFASGSTDNLVIIWNVAEQKVIAKLDSTKGIPASLSWCWNAEDVVAFVSHRGPLFIWTISGPDSGVIVHKDAHSFLSDICMFRWHTHQKGKVVFGHIDGSLSIFHPGNKNQKHVLRPESLEGTDEEDPVTALEWDPLSTDYLLVVNLHYGIRLVDSESLSCITTFNLPSAAASVQCLAWVPSAPGMFITGDSQVGVLRIWNVSRTTPIDNLKLKKTGFHCLHVLNSPPRKKFSVQSPTKNHYTSSTSEAVPPPTLTQNQAFSLPPGHAVCCFLDGGVGLYDMGAKKWDFLRDLGHVETIFDCKFKPDDPNLLATASFDGTIKVWDINTLTAVYTSPGNEGVIYSLSWAPGGLNCIAGGTSRNGAFIWNVQKGKIIQRFNEHGTNGIFCIAWSHKDSKRIATCSSDGFCIIRTIDGKVLHKYKHPAAVFGCDWSQNNKDMIATGCEDTNVRVYYVATSSDQPLKVFSGHTAKVFHVKWSPLREGILCSGSDDGTVRIWDYTQDACINILNGHTAPVRGLMWNTEIPYLLISGSWDYTIKVWDTREGTCVDTVYDHGADVYGLTCHPSRPFTMASCSRDSTVRLWSLTALVTPVQINILADRSWEEIIGNTDYAIEPGTPPLLCGKVSRDIRQEIEKLTANSQVKKLRWFSECLSPPGGSDNLWNLVAVIKGQDDSLLPQNYCKGIMHLKHLIKFRTSEAQELTTVKMSKFGGGIGVPAKEERLKEAAEIHLRLGQIQRYCELMVELGEWDKALSIAPGVSVKYWKKLMQRRADQLIQEDKDDVIPYCIAIGDVKKLVHFFMSRGQLKEALLVAQAACEGNMQPLHVSVPKGASYSDDIYKEDFNELLHKVSKELAEWYFQDGRAVLAACCHLAIDNIELAMAYLIRGNELELAVCVGTVLGESAAPATHYALELLARKCMMISVCFPCVGYSVPFCYVNRNLAADLLLMIPDNELHLIKLCAFYPGCTEEINDLHDKCKLPTVEECMQLAETARADDNIFETVKYYLLSQEPEKALPIGISFVKEYISSSDWTLDTIYPVLDLLSYIRTEKLLLHTCTEARNELLILCGYIGALLAIRRQYQSIVPALYEYTSQLLKRREVSVPLKIEYLSEELDAWRACTQSTNRSLEDSPYTPPSDSQRMIYATLLKRLKEESLKGIIGPDYVTGSNLPSHSDIHISCLTGLKIQGPVFFLEDGKSAISLNDALMWAKVNPFSPLGTGIRLNPF

SEQ ID NO: 8394 - protein, 1283 aa, Homo sapiens
MSQVRQVGLLAAGCQPWNKDVCAASGDRFAYCATLAIYIYQLDHRYNEFKLHAIMSEHKKTITAISWCPHNPDLFASGSTDNLVIIWNVAEQKVIAKLDSTKGIPASLSWCWNAEDVVAFVSHRGPLFIWTISGPDSGVIVHKDAHSFLSDICMFRWHTHQKGKVVFGHIDGSLSIFHPGNKNQKHVLRPESLEGTDEEDPVTALEWDPLSTDYLLVVNLHYGIRLVDSESLSCITTFNLPSAAASVQCLAWVPSAPGMFITGDSQVGVLRIWNVSRTTPIDNLKLKKTGFHCLHVLNSPPRKKFSVQSPTKNHYTSSTSEAVPPPTLTQNQAFSLPPGHAVCCFLDGGVGLYDMGAKKWDFLRDLGHVETIFDCKFKPDDPNLLATASFDGTIKVWDINTLTAVYTSPGNEGVIYSLSWAPGGLNCIAGGTSRNGAFIWNVQKGKIIQRFNEHGTNGIFCIAWSHKDSKRIATCSSDGFCIIRTIDGKVLHKYKHPAAVFGCDWSQNNKDMIATGCEDTNVRVYYVATSSDQPLKVFSGHTAKVFHVKWSPLREGILCSGSDDGTVRIWDYTQDACINILNGHTAPVRGLMWNTEIPYLLISGSWDYTIKVWDTREGTCVDTVYDHGADVYGLTCHPSRPFTMASCSRDSTVRLWSLTALVTPVQINILADRSWEEIIGNTDYAIEPGTPPLLCGKVSRDIRQEIEKLTANSQVKKLRWFSECLSPPGGSDNLWNLVAVIKGQDDSLLPQNYCKGIMHLKHLIKFRTSEAQELTTVKMSKFGGGIGVPAKEERLKEAAEIHLRLGQIQRYCELMVELGEWDKALSIAPGVSVKYWKKLMQRRADQLIQEDKDDVIPYCIAIGDVKKLVHFFMSRGQLKEALLVAQAACEGNMQPLHVSVPKGASYSDDIYKEDFNELLHKVSKELAEWYFQDGRAVLAACCHLAIDNIELAMAYLIRGNELELAVCVGTVLGESAAPATHYALELLARKCMMISVWNLAADLLLMIPDNELHLIKLCAFYPGCTEEINDLHDKCKLPTVEECMQLAETARADDNIFETVKYYLLSQEPEKALPIGISFVKEYISSSDWTLDTIYPVLDLLSYIRTEKLLLHTCTEARNELLILCGYIGALLAIRRQYQSIVPALYEYTSQLLKRREVSVPLKIEYLSEELDAWRACTQSTNRSLEDSPYTPPSDSQRMIYATLLKRLKEESLKGIIGPDYVTGSNLPSHSDIHISCLTGLKIQGPVFFLEDGKSAISLNDALMWAKVNPFSPLGTGIRLNPF

SEQ ID NO: 8395 - protein, 342 aa, Homo sapiens
MPFLLGLRQDKEACVGTNNQSYICDTGHCCGQSQCCNYYYELWWFWLVWTIIIILSCCCVCHHRRAKHRLQAQQRQHEINLIAYREAHNYSALPFYFRFLPNYLLPPYEEVVNRPPTPPPPYSAFQLQQQQLLPPQCGPAGGSPPGIDPTRGSQGAQSSPLSEPSRSSTRPPSIADPDPSDLPVDRAATKAPGMEPSGSVAGLGELDPGAFLDKDAECREELLKDDSSEHGAPDSKEKTPGRHRRFTGDSGIEVCVCNRGHHDDDLKEFNTLIDDALDGPLDFCDSCHVRPPGDEEEGLCQSSEEQAREPGHPHLPRPPACLLLNTINEQDSPNSQSSSSPS

SEQ ID NO: 8396 - protein, 363 aa, Homo sapiens
MERRRLLGGMALLLLQALPSPLSARAEPPQDKEACVGTNNQSYICDTGHCCGQSQCCNYYYELWWFWLVWTIIIILSCCCVCHHRRAKHRLQAQQRQHEINLIAYREAHNYSALPFYFRFLPNYLLPPYEEVVNRPPTPPPPYSAFQLQQQQLLPPQCGPAGGSPPGIDPTRGSQGAQSSPLSEPSRSSTRPPSIADPDPSDLPVDRAATKAPGMEPSGSVAGLGELDPGAFLDKDAECREELLKDDSSEHGAPDSKEKTPGRHRRFTGDSGIEVCVCNRGHHDDDLKEFNTLIDDALDGPLDFCDSCHVRPPGDEEEGLCQSSEEQAREPGHPHLPRPPACLLLNTINEQDSPNSQSSSSPS

SEQ ID NO: 8397 - protein, 156 aa, Homo sapiens
WASQVSENRPVCKAIIQGKQFEGLVDTGADVSIIALNQWPKNWPKQKAVTGLVGISTASEVYQSTEILHCLGPDNQESTVQPMITSIPLNLWGRDLLQQWGVEITMPAPLYSPTSQKIMTKMGYIPGKGLGKNEDGIKVPVEAKINQEREGIGYPF

SEQ ID NO: 8398 - protein, 341 aa, Homo sapiens
MRLCLIPWNTGTPQRVLPPVVWSPPSRKKPVLSARNSRMFGYLSPVRIPRLRGKFNLQLPSLDEQVIPARLPKMEVRAEEPKEATEVKDQVQTQEQEDNKRGPCSNGEAASTSRPLETQGNLTSSWYNPRPLEGNVHLKSLTENNQTDKAQVHAVSFYSKGHGVASSHSPAGGILPFGKPDPLPTVLPAPVPGCSLWPEKAALKVLGKDHLPSSPGLLTVGEDMQPKDPAALGSSRSSPPRAAGHRSRKRKLSGPPLQLQPTPPLQLRWERDERPPPAKLPCLSPEALLVGQASQREGRLQQGNMRKNMRVLSRTSKFRRLRQLLRRRKKRQQVRSISACT

SEQ ID NO: 8399 - protein, 473 aa, Homo sapiens
METPTPLPPVPASPTCNPAPRTIQIEFPQHSSSLLESLNRHRLEGKFCDVSLLVQGRELRAHKAVLAAASPYFHDKLLLGDAPRLTLPSVIEADAFEGLLQLIYSGRLRLPLDALPAHLLVASGLQMWQVVDQCSEILRELETSGGGISARGGNSYHALLSTTSSTGGWCIRSSPFQTPVQSSASTESPASTESPVGGEGSELGEVLQIQVEEEEEEEEDDDDEDQGSATLSQTPQPQRVSGVFPRPHGPHPLPMTATPRKLPEGESAPLELPAPPALPPKIFYIKQEPFEPKEEISGSGTQPGGAKEETKVFSGGDTEGNGELGFLLPSGPGPTSGGGGPSWKPVDLHGNEILSGGGGPGGAGQAVHGPVKLGGTPPADGKRFGCLCGKRFAVKPKRDRHIMLTFSLRPFGCGICNKRFKLKHHLTEHMKTHAGALHACPHCGRRFRVHACFLRHRDLCKGQGWATAHWTYK

SEQ ID NO: 8400 - protein, 495 aa, Homo sapiens
MEMQSYYAKLLGELNEQRKRDFFCDCSIIVEGRIFKAHRNILFANSGYFRALLIHYIQDSGRHSTASLDIVTSDAFSIILDFLYSGKLDLCGENVIEVMSAASYLQMNDVVNFCKTYIRSSLDICRKMEKEAAVAAAVAAAAAAAAAAAAAAAHQVDSESPSSGREGTSCGTKSLVSSPAEGEKSVECLRESPCGDCGDCHPLELVVRDSLGGGSADSNLSTPPKRIEPKVEFDADEVEVDVGEQLQQYAAPLNLAHVEEALPSGQAVDLAYSNYHVKQFLEALLRNSAAPSKDDADHHFSRSLEGRPEGAGVAMSSMMDVQADWYGEDSGDVLVVPIKLHKCPFCPYTAKQKGILKRHIRSHTGERPYPCETCGKRFTRQEHLRSHALSVHRSNRPIICKGCRRTFTSHLSQGLRRFGLCDSCTCVTDTPDDDDDLMPINLSLVEASSESQEKSDTDNDWPIYVESGEENDPAGDDSDDKPQIQPNLSDRETLT

SEQ ID NO: 8401 - protein, 512 aa, Homo sapiens
MEMQSYYAKLLGELNEQRKRDFFCDCSIIVEGRIFKAHRNILFANSGYFRALLIHYIQDSGRHSTASLDIVTSDAFSIILDFLYSGKLDLCGENVIEVMSAASYLQMNDVVNFCKTYIRSSLDICRKMEKEAAVAAAVAAAAAAAAAAAAAAAHQVDSESPSSGREGTSCGTKSLVSSPAEGEKSVECLRESPCGDCGDCHPLELVVRDSLGGGSADSNLSTPPKRIEPKVEFDADEVEVDVGEQLQQYAAPLNLAHVEEALPSGQAVDLAYSNYHVKQFLEALLRNSAAPSKDDADHHFSRSLEGRPEGAGVAMSSMMDVQADWYGEDSGDVLVVPIKLHKCPFCPYTAKQKGILKRHIRSHTGERPYPCETCGKRFTRQEHLRSHALSVHRSNRPIICKGCRRTFTSHLSQGLRRFGLCDSCTCVTDTPDDDDDLMPINLSLVEASSESQEKSDTDNDWPIYVESEIGSHYVAQASLELLALSQPPASASQSAGITDGVSLCCPGRSTVA

SEQ ID NO: 8402 - protein, 584 aa, Homo sapiens
MAGGVDGPIGIPFPDHSSDILSGLNEQRTQGLLCDVVILVEGREFPTHRSVLAACSQYFKKLFTSGAVVDQQNVYEIDFVSAEALTALMDFAYTATLTVSTANVGDILSAARLLEIPAVSHVCADLLDRQILAADAGADAGQLDLVDQIDQRNLLRAKEYLEFFQSNPMNSLPPAAAAAAASFPWSAFGASDDDLDATKEAVAAAVAAVAAGDCNGLDFYGPGPPAERPPTGDGDEGDSNPGLWPERDEDAPTGGLFPPPVAPPAATQNGHYGRGGEEEAASLSEAAPEPGDSPGFLSGAAEGEDGDGPDVDGLAASTLLQQMMSSVGRAGAAAGDSDEESRADDKGVMDYYLKYFSGAHDGDVYPAWSQKVEKKIRAKAFQKCPICEKVIQGAGKLPRHIRTHTGEKPYECNICKVRFTRQDKLKVHMRKHTGEKPYLCQQCGAAFAHNYDLKNHMRVHTGLRPYQCDSCCKTFVRSDHLHRHLKKDGCNGVPSRRGRKPRVRGGAPDPSPGATATPGAPAQPSSPDARRNGQEKHFKDEDEDEDVASPDGLGRLNVAGAGGGGDSGGGPGAATDGNFTAGLA

SEQ ID NO: 8403 - protein, 481 aa, Homo sapiens
MAAGWLTTWSQNSVTFQEVAVDFSQEEWALLDPAQKNLYKDVMLENFRNLASVGYQLCRHSLISKVDQEQLKTDERGILQGDCADWETQLKPKDTIAMQNIPGGKTSNGINTAENQPGEHSLECNHCGKFRKNTRFICTRYCKGEKCYKYIKYSKVFNHPSTLRSHVSIHIGEKTLEFTDCRKAFNQESSLRKHLRTPTGQKFQEYEQCDMSFSLHSSCSVREQIPTGEKGDECSDYGKISPLSVHTKTGSVEEGLECNEHEKTFTDPLSLQNCVRTHSGEMPYECSDCGKAFIFQSSLKKHMRSHTGEKPYECDHCGKSFSQSSHLNVHKRTHTGEKPYDCKECGKAFTVPSSLQKHVRTHTGEKPYECSDCGKAFIDQSSLKKHTRSHTGEKPYECNQCGKSFSTGSYLIVHKRTHTGEKTYECKECGKAFRNSSCLRVHVRTHTGEKPYKCIQCEKAFSTSTNLIMHKRIHNGQKLHE

SEQ ID NO: 8404 - protein, 321 aa, Homo sapiens
MAAGWLTTWSQNSVTFQEVAVDFSQEEWALLDPAQKNLYKDVMLENFRNLASVGYQLCRHSLISKVDQEQLKTDERGILQGDCADWETQLKPKDTIAMQNIPGGKTSNGINTNCVRTHSGEMPYECSDCGKAFIFQSSLKKHMRSHTGEKPYECDHCGKSFSQSSHLNVHKRTHTGEKPYDCKECGKAFTVPSSLQKHVRTHTGEKPYECSDCGKAFIDQSSLKKHTRSHTGEKPYECNQCGKSFSTGSYLIVHKRTHTGEKTYECKECGKAFRNSSCLRVHVRTHTGEKPYKCIQCEKAFSTSTNLIMHKRIHNGQKLHE

SEQ ID NO: 8405 - protein, 120 aa, Homo sapiens
MAAGWLTTWSQNSVTFQEVAVDFSQEEWALLDPAQKNLYKDVMLENFRNLASVGYQLCRHSLISKVDQEQLKTDERGILQGDCADWETQLKPKDTIAMQNIPGGKTSNGINTNPHGREFL

SEQ ID NO: 8406 - protein, 135 aa, Homo sapiens
MAAATETGQAAVPSRKRRRGRRPPASDPQTLARLAAGPWLPGTLTCPERTGGDAATRSARPPVLPPPPRPPQRRCRHLVSRAGTPRCACAGTASEGPRRGRAAILSVAGSAGSSHPACFRPPPLLPIRPCCSLWR

SEQ ID NO: 8407 - protein, 639 aa, Homo sapiens
MTPASASGEDSGSFYSWQKAKREQGLVTFEDVAVDFTQEEWQYLNPPQRTLYRDVMLETYSNLVFVGQQVTKPNLILKLEVEECPAEGKIPFWNFPEVCQVDEQIERQHQDDQDKCLLMQVGFSDKKTIITKSARDCHEFGNILHLSTNLVASIQRPDKHESFGNNMVDNLDLFSRSSAENKYDNGCAKLFFHTEYEKTNPGMKPYGYKECGKGLRRKKGLSLHQRIKNGEKPFECTACRKTFSKKSHLIVHWRTHTGEKPFGCTECGKAFSQKSQLIIHLRTHTGERPFECPECGKAFREKSTVIIHYRTHTGEKPYECNECGKAFTQKSNLIVHQKTHTGEKTYECTKCGESFIQKLDLIIHHSTHTGKKPHECNECKKTFSDKSTLIIHQRTHTGEKPHKCTECGKSFNEKSTLIVHQRTHTGEKPYECDVCGKTFTQKSNLGVHQRTHSGEKPFECNECEKAFSQKSYLMLHQRGHTGEKPYECNECEKAFSQKSYLIIHQRTHTEEKPYKCNECGKAFREKSKLIIHQRIHTGEKPYECPVCWKAFSQKSQLIIHQRTHTGEKPYACTECGKAFREKSTFTVHQRTHTGEKPYKCTECGKAFTQKSNLIVHQRTHAGKKAHGRGHTRKSKFMAH

SEQ ID NO: 8408 - protein, 620 aa, Homo sapiens
MAKPQGLVTFEDVAVDFTQEEWQYLNPPQRTLYRDVMLETYSNLVFVGQQVTKPNLILKLEVEECPAEGKIPFWNFPEVCQVDEQIERQHQDDQDKCLLMQVGFSDKKTIITKSARDCHEFGNILHLSTNLVASIQRPDKHESFGNNMVDNLDLFSRSSAENKYDNGCAKLFFHTEYEKTNPGMKPYGYKECGKGLRRKKGLSLHQRIKNGEKPFECTACRKTFSKKSHLIVHWRTHTGEKPFGCTECGKAFSQKSQLIIHLRTHTGERPFECPECGKAFREKSTVIIHYRTHTGEKPYECNECGKAFTQKSNLIVHQKTHTGEKTYECTKCGESFIQKLDLIIHHSTHTGKKPHECNECKKTFSDKSTLIIHQRTHTGEKPHKCTECGKSFNEKSTLIVHQRTHTGEKPYECDVCGKTFTQKSNLGVHQRTHSGEKPFECNECEKAFSQKSYLMLHQRGHTGEKPYECNECEKAFSQKSYLIIHQRTHTEEKPYKCNECGKAFREKSKLIIHQRIHTGEKPYECPVCWKAFSQKSQLIIHQRTHTGEKPYACTECGKAFREKSTFTVHQRTHTGEKPYKCTECGKAFTQKSNLIVHQRTHAGKKAHGRGHTRKSKFMAH

SEQ ID NO: 8409 - protein, 948 aa, Homo sapiens
MEEKEILRRQIRLLQGLIDDYKTLHGNAPAPGTPAASGWQPPTYHSGRAFSARYPRPSRRGYSSHHGPSWRKKYSLVNRPPGPSDPPADHAVRPLHGARGGQPPVPQQHVLERQVQLSQGQNVVIKVKPPSKSGSASASGAQRGSLEEFEETPWSDQRPREGEGEPPRGQLQPSRPTRARGTCSVEDPLLVCQKEPGKPRMVKSVGSVGDSPREPRRTVSESVIAVKASFPSSALPPRTGVALGRKLGSHSVASCAPQLLGDRRVDAGHTDQPVPSGSVGGPARPASGPRQAREASLVVTCRTNKFRKNNYKWVAASSKSPRVARRALSPRVAAENVCKASAGMANKVEKPQLIADPEPKPRKPATSSKPGSAPSKYKWKASSPSASSSSSFRWQSEASSKDHASQLSPVLSRSPSGDRPAVGHSGLKPLSGETPLSAYKVKSRTKIIRRRSSTSLPGDKKSGTSPAATAKSHLSLRRRQALRGKSSPVLKKTPNKGLVQVTTHRLCRLPPSRAHLPTKEASSLHAVRTAPTSKVIKTRYRIVKKTPASPLSAPPFPLSLPSWRARRLSLSRSLVLNRLRPVASGGGKAQPGSPWWRSKGYRCIGGVLYKVSANKLSKTSGQPSDAGSRPLLRTGRLDPAGSCSRSLASRAVQRSLAIIRQARQRREKRKEYCMYYNRFGRCNRGERCPYIHDPEKVAVCTRFVRGTCKKTDGTCPFSHHVSKEKMPVCSYFLKGICSNSNCPYSHVYVSRKAEVCSDFLKGYCPLGAKCKKKHTLLCPDFARRGACPRGAQCQLLHRTQKRHSRRAATSPAPGPSDATARSRVSASHGPRKPSASQRPTRQTPSSAALTAAAVAAPPHCPGGSASPSSSKASSSSSSSSSPPASLDHEAPSLQEAALAAACSNRLCKLPSFISLQSSPSPGAQPRVRAPRAPLTKDSGKPLHIKPRL

SEQ ID NO: 8410 - protein, 335 aa, Homo sapiens
MEPGGEPTGAKESSTLMESLAGRLDPAGSCSRSLASRAVQRSLAIIRQARQRREKRKEYCMYYNRFGRCNRGERCPYIHDPEKVAVCTRFVRGTCKKTDGTCPFSHHVSKEKMPVCSYFLKGICSNSNCPYSHVYVSRKAEVCSDFLKGYCPLGAKCKKKHTLLCPDFARRGACPRGAQCQLLHRTQKRHSRRAATSPAPGPSDATARSRVSASHGPRKPSASQRPTRQTPSSAALTAAAVAAPPHCPGGSASPSSSKASSSSSSSSSPPASLDHEAPSLQEAALAAACSNRLCKLPSFISLQSSPSPGAQPRVRAPRAPLTKDSGKPLHIKPRL

SEQ ID NO: 8411 - protein, 641 aa, Homo sapiens
MDSVVFEDVAVNFTQEEWALLGPSQKKLYRDVMQETFVNLASIGENWEEKNIEDHKNQGRKLRSHMVERLCERKEGSQFGETISQTPNPKPNKKTFTRVKPYECSVCGKDYMCHSSLNRHMRSHTEHRSYEYHKYGEKSYECKECGKRFSFRSSFRIHERTHTGEKPYKCKQCGKAFSWPSSFQIHERTHTGEKPYECKECGKAFIYHTTFRGHMRMHTGEKPYKCKECGKTFSHPSSFRNHERTHSGEKPYECKQCGKAFRYYQTFQIHERTHTGEKPYQCKQCGKALSCPTSFRSHERIHTGEKPYKCKKCGKAFSFPSSFRKHERIHTGEKPYDCKECGKAFISLPSYRRHMIMHTGNGPYKCKECGKAFDCPSSFQIHERTHTGEKPYECKQCGKAFSCSSSFRMHERTHTGEKPHECKQCGKAFSCSSSVRIHERTHTGEKPYECKQCGKAFSCSSSFRMHERIHTGEKPYECKQCGKAFSFSSSFRMHERTHTGEKPYECKQCGKAFSCSSSFRMHERTHTGEKPYECKQCGKAFSCSSSIRIHERTHTGEKPYECKQCGKAFSCSSSVRMHERTHTGVKPYECKQCDKAFSCSRSFRIHERTHTGEKPYACQQCGKAFKCSRSFRIHERVHSGE

SEQ ID NO: 8412 - protein, 3567 aa, Homo sapiens
METCDSPPISRQENGQSTSKLCGTTQLDNEVPEKVAGMEPDRENSSTDDNLKTDERKSEALLGFSVENAAATQVTSAKEIPCNECATSFPSLQKYMEHHCPNARLPVLKDDNESEISELEDSDVENLTGEIVYQPDGSAYIIEDSKESGQNAQTGANSKLFSTAMFLDSLASAGEKSDQSASAPMSFYPQIINTFHIASSLGKPFTADQAFPNTSALAGVGPVLHSFRVYDLRHKREKDYLTSDGSAKNSCVSKDVPNNVDLSKFDGCVSDGKRKPVLMCFLCKLSFGYIRSFVTHAVHDHRMTLNDEEQKLLSNKCVSAIIQGIGKDKEPLISFLEPKKSTSVYPHFSTTNLIGPDPTFRGLWSAFHVENGDSLPAGFAFLKGSASTSSSAEQPLGITQMPKAEVNLGGLSSLVVNTPITSVSLSHSSSESSKMSESKDQENNCERPKESNVLHPNGECPVKSEPTEPGDEDEEDAYSNELDDEEVLGELTDSIGNKDFPLLNQSISPLSSSVLKFIEKGTSSSSATVSDDTEKKKQTAAVRASGSVASNYGISGKDFADASASKDSATAAHPSEIARGDEDSSATPHQHGFTPSTPGTPGPGGDGSPGSGIECPKCDTVLGSSRSLGGHMTMMHSRNSCKTLKCPKCNWHYKYQQTLEAHMKEKHPEPGGSCVYCKTGQPHPRLARGESYTCGYKPFRCEVCNYSTTTKGNLSIHMQSDKHLNNVQNLQNGNGEQVFGHSAPAPNTSLSGCGTPSPSKPKQKPTWRCEVCDYETNVARNLRIHMTSEKHMHNMMLLQQNMKQIQHNLHLGLAPAEAELYQYYLAQNIGLTGMKLENPADPQLMINPFQLDPATAAALAPGLGELSPYISDPALKLFQCAVCNKFTSDSLEALSVHVSSERSLPEEEWRAVIGDIYQCKLCNYNTQLKANFQLHCKTDKHMQKYQLVAHIKEGGKSNEWRLKCIAIGNPVHLKCNACDYYTNSVDKLRLHTTNHRHEAALKLYKHLQKQEGAVNPESCYYYCAVCDYTTKVKLNLVQHVRSVKHQQTEGLRKLQLHQQGLAPEEDNLSEIFFVKDCPPNELETASLGARTCDDDLTEQHEEAEGAIKPTAVAEDDEKDTSERDNSEGKNSNKDSVSVAGGTQPLLLAKEEDVATKRSKPTEDNKFCHEQFYQCPYCNYNSRDQSRIQMHVLSQHSVQPVICCPLCQDVLSNKMHLQLHLTHLHSVSPDCVEKLLMTVPVPDVMMPNSMLLPAAASEKSERDTPAAVTAEGSGKYSGESPMDDKSMAGLEDSKANVEVKNEEQKPTKEPLEVSEWNKNSSKDVKIPDTLQDQLNEQQKRQPLSVSDRHVYKYRCNHCSLAFKTMQKLQIHSQYHAIRAATMCNLCQRSFRTFQALKKHLEAGHPELSEAELQQLYASLPVNGELWAESETMSQDDHGLEQEMEREYEVDHEGKASPVGSDSSSIPDDMGSEPKRTLPFRKGPNFTMEKFLDPSRPYKCTVCKESFTQKNILLVHYNSVSHLHKLKKVLQEASSPVPQETNSNTDNKPYKCSICNVAYSQSSTLEIHMRSVLHQTKARAAKLEPSGHVAGGHSIAANVNSPGQGMLDSMSLAAVNSKDTHLDAKELNKKQTPDLISAQPAHHPPQSPAQIQMQLQHELQQQAAFFQPQFLNPAFLPHFPMTPEALLQFQQPQFLFPFYIPGTEFSLGPDLGLPGSATFGMPGMTGMAGSLLEDLKQQIQTQHHVGQTQLQILQQQAQQYQATQPQLQPQKQQQQPPPPQQQQQQQASKLLKQEQSNIVSADCQIMKDVPSYKEAEDISEKPEKPKQEFISEGEGLKEGKDTKKQKSLEPSIPPPRIASGARGNAAKALLENFGFELVIQYNENRQKVQKKGKSGEGENTDKLECGTCGKLFSNVLILKSHQEHVHGQFFPYAALEKFARQYREAYDKLYPISPSSPETPPPPPPPPPLPPAPPQPSSMGPVKIPNTVSTPLQAPPPTPPPPPPPPPPPPPPPPPPPPSAPPQVQLPVSLDLPLFPSIMMQPVQHPALPPQLALQLPQMDALSADLTQLCQQQLGLDPNFLRHSQFKRPRTRITDDQLKILRAYFDINNSPSEEQIQEMAEKSGLSQKVIKHWFRNTLFKERQRNKDSPYNFSNPPITVLEDIRIDPQPTSLEHYKSDASFSKRSSRTRFTDYQLRVLQDFFDTNAYPKDDEIEQLSTVLNLPTRVIVVWFQNARQKARKSYENQAETKDNEKRELTNERYIRTSNMQYQCKKCNVVFPRIFDLITHQKKQCYKDEDDDAQDESQTEDSMDATDQVVYKHCTVSGQTDAAKNAAAPAASSGSGTSTPLIPSPKPEPEKTSPKPEYPAEKPKQSDPSPPSQGTKPALPLASTSSDPPQASTAQPQPQPQPPKQPQLIGRPPSASQTPVPSSPLQISMTSLQNSLPPQLLQYQCDQCTVAFPTLELWQEHQHMHFLAAQNQFLHSPFLERPMDMPYMIFDPNNPLMTGQLLGSSLTQMPPQASSSHTTAPTTVAASLKRKLDDKEDNNCSEKEGGNSGEDQHRDKRLRTTITPEQLEILYEKYLLDSNPTRKMLDHIAREVGLKKRVVQVWFQNTRARERKGQFRAVGPAQSHKRCPFCRALFKAKSALESHIRSRHWNEGKQAGYSLPPSPLISTEDGGESPQKYIYFDYPSLPLTKIDLSSENELASTVSTPVSKTAELSPKNLLSPSSFKAECSEDVENLNAPPAEAGYDQNKTDFDETSSINTAISDATTGDEGNTEMESTTGSSGDVKPALSPKEPKTLDTLPKPATTPTTEVCDDKFLFSLTSPSIHFNDKDGDHDQSFYITDDPDDNADRSETSSIADPSSPNPFGSSNPFKSKSNDRPGHKRFRTQMSNLQLKVLKACFSDYRTPTMQECEMLGNEIGLPKRVVQVWFQNARAKEKKFKINIGKPFMINQGGTEGTKPECTLCGVKYSARLSIRDHIFSKQHISKVRETVGSQLDREKDYLAPTTVRQLMAQQELDRIKKASDVLGLTVQQPGMMDSSSLHGISLPTAYPGLPGLPPVLLPGMNGPSSLPGFPQNSNISAGMLGFPTSATSSPALSLSSAPTKPLLQTPPPPPPPPPPPPSSSLSGQQTEQQNKESEKKQTKPNKVKKIKEEELEATKPEKHPKKEEKISSALSVLGKVVGETHVDPIQLQALQNAIAGDPASFIGGQFLPYFIPGFASYFTPQLPGTVQGGYFPPVCGMESLFPYGPTMPQTLAGLSPGALLQQYQQYQQNLQESLQKQQKQQQEQQQKPVQAKTSKVESDQPQNSNDASETKEDKSTATESTKEEPQLESKSADFSDTYVVPFVKYEFICRKCQMMFTDEDAAVNHQKSFCYFGQPLIDPQETVLRVPVSKYQCLACDVAISGNEALSQHLQSSLHKEKTIKQAMRNAKEHVRLLPHSVCSPNPNTTSTSQSAASSNNTYPHLSCFSMKSWPNILFQASARRAASPPSSPPSLSLPSTVTSSLCSTSGVQTSLPTESCSDESDSELSQKLEDLDNSLEVKAKPASGLDGNFNSIRMDMFSV

SEQ ID NO: 8413 - protein, 3599 aa, Homo sapiens
METCDSPPISRQENGQSTSKLCGTTQLDNEVPEKVAGMEPDRENSSTDDNLKTDERKSEALLGFSVENAAATQVTSAKEIPCNECATSFPSLQKYMEHHCPNARLPVLKDDNESEISELEDSDVENLTGEIVYQPDGSAYIIEDSKESGQNAQTGANSKLFSTAMFLDSLASAGEKSDQSASAPMSFYPQIINTFHIASSLGKPFTADQAFPNTSALAGVGPVLHSFRVYDLRHKREKDYLTSDGSAKNSCVSKDVPNNVDLSKFDGCVSDGKRKPVLMCFLCKLSFGYIRSFVTHAVHDHRMTLNDEEQKLLSNKCVSAIIQGIGKDKEPLISFLEPKKSTSVYPHFSTTNLIGPDPTFRGLWSAFHVENGDSLPAGFAFLKGSASTSSSAEQPLGITQMPKAEVNLGGLSSLVVNTPITSVSLSHSSSESSKMSESKDQENNCERPKESNVLHPNGECPVKSEPTEPGDEDEEDAYSNELDDEEVLGELTDSIGNKDFPLLNQSISPLSSSVLKFIEKGTSSSSATVSDDTEKKKQTAAVRASGSVASNYGISGKDFADASASKDSATAAHPSEIARGDEDSSATPHQHGFTPSTPGTPGPGGDGSPGSGIECPKCDTVLGSSRSLGGHMTMMHSRNSCKTLKCPKCNWHYKYQQTLEAHMKEKHPEPGGSCVYCKTGQPHPRLARGESYTCGYKPFRCEVCNYSTTTKGNLSIHMQSDKHLNNVQNLQNGNGEQVFGHSAPAPNTSLSGCGTPSPSKPKQKPTWRCEVCDYETNVARNLRIHMTSEKHMHNMMLLQQNMKQIQHNLHLGLAPAEAELYQYYLAQNIGLTGMKLENPADPQLMINPFQLDPATAAALAPGLVNNELPPEIRLASGQLMGDDLSLLTAGELSPYISDPALKLFQCAVCNKFTSDSLEALSVHVSSERSLPEEEWRAVIGDIYQCKLCNYNTQLKANFQLHCKTDKHMQKYQLVAHIKEGGKSNEWRLKCIAIGNPVHLKCNACDYYTNSVDKLRLHTTNHRHEAALKLYKHLQKQEGAVNPESCYYYCAVCDYTTKVKLNLVQHVRSVKHQQTEGLRKLQLHQQGLAPEEDNLSEIFFVKDCPPNELETASLGARTCDDDLTEQQLRSTSEEQSEEAEGAIKPTAVAEDDEKDTSERDNSEGKNSNKDSGIITPEKELKVSVAGGTQPLLLAKEEDVATKRSKPTEDNKFCHEQFYQCPYCNYNSRDQSRIQMHVLSQHSVQPVICCPLCQDVLSNKMHLQLHLTHLHSVSPDCVEKLLMTVPVPDVMMPNSMLLPAAASEKSERDTPAAVTAEGSGKYSGESPMDDKSMAGLEDSKANVEVKNEEQKPTKEPLEVSEWNKNSSKDVKIPDTLQDQLNEQQKRQPLSVSDRHVYKYRCNHCSLAFKTMQKLQIHSQYHAIRAATMCNLCQRSFRTFQALKKHLEAGHPELSEAELQQLYASLPVNGELWAESETMSQDDHGLEQEMEREYEVDHEGKASPVGSDSSSIPDDMGSEPKRTLPFRKGPNFTMEKFLDPSRPYKCTVCKESFTQKNILLVHYNSVSHLHKLKKVLQEASSPVPQETNSNTDNKPYKCSICNVAYSQSSTLEIHMRSVLHQTKARAAKLEPSGHVAGGHSIAANVNSPGQGMLDSMSLAAVNSKDTHLDAKELNKKQTPDLISAQPAHHPPQSPAQIQMQLQHELQQQAAFFQPQFLNPAFLPHFPMTPEALLQFQQPQFLFPFYIPGTEFSLGPDLGLPGSATFGMPGMTGMAGSLLEDLKQQIQTQHHVGQTQLQILQQQAQQYQATQPQLQPQKQQQQPPPPQQQQQQQASKLLKQEQSNIVSADCQIMKDVPSYKEAEDISEKPEKPKQEFISEGEGLKEGKDTKKQKSLEPSIPPPRIASGARGNAAKALLENFGFELVIQYNENRQKVQKKGKSGEGENTDKLECGTCGKLFSNVLILKSHQEHVHGQFFPYAALEKFARQYREAYDKLYPISPSSPETPPPPPPPPPLPPAPPQPSSMGPVKIPNTVSTPLQAPPPTPPPSAPPQVQLPVSLDLPLFPSIMMQPVQHPALPPQLALQLPQMDALSADLTQLCQQQLGLDPNFLRHSQFKRPRTRITDDQLKILRAYFDINNSPSEEQIQEMAEKSGLSQKVIKHWFRNTLFKERQRNKDSPYNFSNPPITVLEDIRIDPQPTSLEHYKSDASFSKRSSRTRFTDYQLRVLQDFFDTNAYPKDDEIEQLSTVLNLPTRVIVVWFQNARQKARKSYENQAETKDNEKRELTNERYIRTSNMQYQCKKCNVVFPRIFDLITHQKKQCYKDEDDDAQDESQTEDSMDATDQVVYKHCTVSGQTDAAKNAAAPAASSGSGTSTPLIPSPKPEPEKTSPKPEYPAEKPKQSDPSPPSQGTKPALPLASTSSDPPQASTAQPQPQPQPPKQPQLIGRPPSASQTPVPSSPLQISMTSLQNSLPPQLLQYQCDQCTVAFPTLELWQEHQHMHFLAAQNQFLHSPFLERPMDMPYMIFDPNNPLMTGQLLGSSLTQMPPQASSSHTTAPTTVAASLKRKLDDKEDNNCSEKEGGNSGEDQHRDKRLRTTITPEQLEILYEKYLLDSNPTRKMLDHIAREVGLKKRVVQVWFQNTRARERKGQFRAVGPAQSHKRCPFCRALFKAKSALESHIRSRHWNEGKQAGYSLPPSPLISTEDGGESPQKYIYFDYPSLPLTKIDLSSENELASTVSTPVSKTAELSPKNLLSPSSFKAECSEDVENLNAPPAEAGYDQNKTDFDETSSINTAISDATTGDEGNTEMESTTGSSGDVKPALSPKEPKTLDTLPKPATTPTTEVCDDKFLFSLTSPSIHFNDKDGDHDQSFYITDDPDDNADRSETSSIADPSSPNPFGSSNPFKSKSNDRPGHKRFRTQMSNLQLKVLKACFSDYRTPTMQECEMLGNEIGLPKRVVQVWFQNARAKEKKFKINIGKPFMINQGGTEGTKPECTLCGVKYSARLSIRDHIFSKQHISKVRETVGSQLDREKDYLAPTTVRQLMAQQELDRIKKASDVLGLTVQQPGMMDSSSLHGISLPTAYPGLPGLPPVLLPGMNGPSSLPGFPQNSNTLTPPGAGMLGFPTSATSSPALSLSSAPTKPLLQTPPPPPPPPPPPPSSSLSGQQTEQQNKESEKKQTKPNKVKKIKEEELEATKPEKHPKKEEKISSALSVLGKVVGETHVDPIQLQALQNAIAGDPASFIGGQFLPYFIPGFASYFTPQLPGTVQGGYFPPVCGMESLFPYGPTMPQTLAGLSPGALLQQYQQYQQNLQESLQKQQKQQQEQQQKPVQAKTSKVESDQPQNSNDASETKEDKSTATESTKEEPQLESKSADFSDTYVVPFVKYEFICRKCQMMFTDEDAAVNHQKSFCYFGQPLIDPQETVLRVPVSKYQCLACDVAISGNEALSQHLQSSLHKEKTIKQAMRNAKEHVRLLPHSVCSPNPNTTSTSQSAASSNNTYPHLSCFSMKSWPNILFQASARRAASPPSSPPSLSLPSTVTSSLCSTSGVQTSLPTESCSDESDSELSQKLEDLDNSLEVKAKPASGLDGNFNSIRMDMFSV

SEQ ID NO: 8414 - protein, 1049 aa, Homo sapiens
METCDSPPISRQENGQSTSKLCGTTQLDNEVPEKVAGMEPDRENSSTDDNLKTDERKSEALLGFSVENAAATQVTSAKEIPCNECATSFPSLQKYMEHHCPNARLPVLKDDNESEISELEDSDVENLTGEIVYQPDGSAYIIEDSKESGQNAQTGANSKLFSTAMFLDSLASAGEKSDQSASAPMSFYPQIINTFHIASSLGKPFTADQAFPNTSALAGVGPVLHSFRVYDLRHKREKDYLTSDGSAKNSCVSKDVPNNVDLSKFDGCVSDGKRKPVLMCFLCKLSFGYIRSFVTHAVHDHRMTLNDEEQKLLSNKCVSAIIQGIGKDKEPLISFLEPKKSTSVYPHFSTTNLIGPDPTFRGLWSAFHVENGDSLPAGFAFLKGSASTSSSAEQPLGITQMPKAEVNLGGLSSLVVNTPITSVSLSHSSSESSKMSESKDQENNCERPKESNVLHPNGECPVKSEPTEPGDEDEEDAYSNELDDEEVLGELTDSIGNKDFPLLNQSISPLSSSVLKFIEKGTSSSSATVSDDTEKKKQTAAVRASGSVASNYGISGKDFADASASKDSATAAHPSEIARGDEDSSATPHQHGFTPSTPGTPGPGGDGSPGSGIECPKCDTVLGSSRSLGGHMTMMHSRNSCKTLKCPKCNWHYKYQQTLEAHMKEKHPEPGGSCVYCKTGQPHPRLARGESYTCGYKPFRCEVCNYSTTTKGNLSIHMQSDKHLNNVQNLQNGNGEQVFGHSAPAPNTSLSGCGTPSPSKPKQKPTWRCEVCDYETNVARNLRIHMTSEKHMHNMMLLQQNMKQIQHNLHLGLAPAEAELYQYYLAQNIGLTGMKLENPADPQLMINPFQLDPATAAALAPGLGELSPYISDPALKLFQCAVCNKFTSDSLEALSVHVSSERSLPEEEWRAVIGDIYQCKLCNYNTQLKANFQLHCKTDKHMQKYQLVAHIKEGGKSNEWRLKCIAIGNPVHLKCNACDYYTNSVDKLRLHTTNHRHEAALKLYKVSSDIHFRWHRVEKGINSFRAWSTSLQLKEKKREKTSKGRGHSF

SEQ ID NO: 8415 - protein, 3571 aa, Homo sapiens
METCDSPPISRQENGQSTSKLCGTTQLDNEVPEKVAGMEPDRENSSTDDNLKTDERKSEALLGFSVENAAATQVTSAKEIPCNECATSFPSLQKYMEHHCPNARLPVLKDDNESEISELEDSDVENLTGEIVYQPDGSAYIIEDSKESGQNAQTGANSKLFSTAMFLDSLASAGEKSDQSASAPMSFYPQIINTFHIASSLGKPFTADQAFPNTSALAGVGPVLHSFRVYDLRHKREKDYLTSDGSAKNSCVSKDVPNNVDLSKFDGCVSDGKRKPVLMCFLCKLSFGYIRSFVTHAVHDHRMTLNDEEQKLLSNKCVSAIIQGIGKDKEPLISFLEPKKSTSVYPHFSTTNLIGPDPTFRGLWSAFHVENGDSLPAGFAFLKGSASTSSSAEQPLGITQMPKAEVNLGGLSSLVVNTPITSVSLSHSSSESSKMSESKDQENNCERPKESNVLHPNGECPVKSEPTEPGDEDEEDAYSNELDDEEVLGELTDSIGNKDFPLLNQSISPLSSSVLKFIEKGTSSSSATVSDDTEKKKQTAAVRASGSVASNYGISGKDFADASASKDSATAAHPSEIARGDEDSSATPHQHGFTPSTPGTPGPGGDGSPGSGIECPKCDTVLGSSRSLGGHMTMMHSRNSCKTLKCPKCNWHYKYQQTLEAHMKEKHPEPGGSCVYCKTGQPHPRLARGESYTCGYKPFRCEVCNYSTTTKGNLSIHMQSDKHLNNVQNLQNGNGEQVFGHSAPAPNTSLSGCGTPSPSKPKQKPTWRCEVCDYETNVARNLRIHMTSEKHMHNMMLLQQNMKQIQHNLHLGLAPAEAELYQYYLAQNIGLTGMKLENPADPQLMINPFQLDPATAAALAPGLGELSPYISDPALKLFQCAVCNKFTSDSLEALSVHVSSERSLPEEEWRAVIGDIYQCKLCNYNTQLKANFQLHCKTDKHMQKYQLVAHIKEGGKSNEWRLKCIAIGNPVHLKCNACDYYTNSVDKLRLHTTNHRHEAALKLYKHLQKQEGAVNPESCYYYCAVCDYTTKVKLNLVQHVRSVKHQQTEGLRKLQLHQQGLAPEEDNLSEIFFVKDCPPNELETASLGARTCDDDLTEQHEEAEGAIKPTAVAEDDEKDTSERDNSEGKNSNKDSVSVAGGTQPLLLAKEEDVATKRSKPTEDNKFCHEQFYQCPYCNYNSRDQSRIQMHVLSQHSVQPVICCPLCQDVLSNKMHLQLHLTHLHSVSPDCVEKLLMTVPVPDVMMPNSMLLPAAASEKSERDTPAAVTAEGSGKYSGESPMDDKSMAGLEDSKANVEVKNEEQKPTKEPLEVSEWNKNSSKDVKIPDTLQDQLNEQQKRQPLSVSDRHVYKYRCNHCSLAFKTMQKLQIHSQYHAIRAATMCNLCQRSFRTFQALKKHLEAGHPELSEAELQQLYASLPVNGELWAESETMSQDDHGLEQEMEREYEVDHEGKASPVGSDSSSIPDDMGSEPKRTLPFRKGPNFTMEKFLDPSRPYKCTVCKESFTQKNILLVHYNSVSHLHKLKKVLQEASSPVPQETNSNTDNKPYKCSICNVAYSQSSTLEIHMRSVLHQTKARAAKLEPSGHVAGGHSIAANVNSPGQGMLDSMSLAAVNSKDTHLDAKELNKKQTPDLISAQPAHHPPQSPAQIQMQLQHELQQQAAFFQPQFLNPAFLPHFPMTPEALLQFQQPQFLFPFYIPGTEFSLGPDLGLPGSATFGMPGMTGMAGSLLEDLKQQIQTQHHVGQTQLQILQQQAQQYQATQPQLQPQKQQQQPPPPQQQQQQQASKLLKQEQSNIVSADCQIMKDVPSYKEAEDISEKPEKPKQEFISEGEGLKEGKDTKKQKSLEPSIPPPRIASGARGNAAKALLENFGFELVIQYNENRQKVQKKGKSGEGENTDKLECGTCGKLFSNVLILKSHQEHVHGQFFPYAALEKFARQYREAYDKLYPISPSSPETPPPPPPPPPLPPAPPQPSSMGPVKIPNTVSTPLQAPPPTPPPPPPPPPPPPPPPPPPPPSAPPQVQLPVSLDLPLFPSIMMQPVQHPALPPQLALQLPQMDALSADLTQLCQQQLGLDPNFLRHSQFKRPRTRITDDQLKILRAYFDINNSPSEEQIQEMAEKSGLSQKVIKHWFRNTLFKERQRNKDSPYNFSNPPITVLEDIRIDPQPTSLEHYKSDASFSKRSSRTRFTDYQLRVLQDFFDTNAYPKDDEIEQLSTVLNLPTRVIVVWFQNARQKARKSYENQAETKDNEKRELTNERYIRTSNMQYQCKKCNVVFPRIFDLITHQKKQCYKDEDDDAQDESQTEDSMDATDQVVYKHCTVSGQTDAAKNAAAPAASSGSGTSTPLIPSPKPEPEKTSPKPEYPAEKPKQSDPSPPSQGTKPALPLASTSSDPPQASTAQPQPQPQPPKQPQLIGRPPSASQTPVPSSPLQISMTSLQNSLPPQLLQYQCDQCTVAFPTLELWQEHQHMHFLAAQNQFLHSPFLERPMDMPYMIFDPNNPLMTGQLLGSSLTQMPPQASSSHTTAPTTVAASLKRKLDDKEDNNCSEKEGGNSGEDQHRDKRLRTTITPEQLEILYEKYLLDSNPTRKMLDHIAREVGLKKRVVQVWFQNTRARERKGQFRAVGPAQSHKRCPFCRALFKAKSALESHIRSRHWNEGKQAGYSLPPSPLISTEDGGESPQKYIYFDYPSLPLTKIDLSSENELASTVSTPVSKTAELSPKNLLSPSSFKAECSEDVENLNAPPAEAGYDQNKTDFDETSSINTAISDATTGDEGNTEMESTTGSSGDVKPALSPKEPKTLDTLPKPATTPTTEVCDDKFLFSLTSPSIHFNDKDGDHDQSFYITDDPDDNADRSETSSIADPSSPNPFGSSNPFKSKSNDRPGHKRFRTQMSNLQLKVLKACFSDYRTPTMQECEMLGNEIGLPKRVVQVWFQNARAKEKKFKINIGKPFMINQGGTEGTKPECTLCGVKYSARLSIRDHIFSKQHISKVRETVGSQLDREKDYLAPTTVRQLMAQQELDRIKKASDVLGLTVQQPGMMDSSSLHGISLPTAYPGLPGLPPVLLPGMNGPSSLPGFPQNSNTLTPPGAGMLGFPTSATSSPALSLSSAPTKPLLQTPPPPPPPPPPPPSSSLSGQQTEQQNKESEKKQTKPNKVKKIKEEELEATKPEKHPKKEEKISSALSVLGKVVGETHVDPIQLQALQNAIAGDPASFIGGQFLPYFIPGFASYFTPQLPGTVQGGYFPPVCGMESLFPYGPTMPQTLAGLSPGALLQQYQQYQQNLQESLQKQQKQQQEQQQKPVQAKTSKVESDQPQNSNDASETKEDKSTATESTKEEPQLESKSADFSDTYVVPFVKYEFICRKCQMMFTDEDAAVNHQKSFCYFGQPLIDPQETVLRVPVSKYQCLACDVAISGNEALSQHLQSSLHKEKTIKQAMRNAKEHVRLLPHSVCSPNPNTTSTSQSAASSNNTYPHLSCFSMKSWPNILFQASARRAASPPSSPPSLSLPSTVTSSLCSTSGVQTSLPTESCSDESDSELSQKLEDLDNSLEVKAKPASGLDGNFNSIRMDMFSV

SEQ ID NO: 8416 - protein, 3616 aa, Homo sapiens
METCDSPPISRQENGQSTSKLCGTTQLDNEVPEKVAGMEPDRENSSTDDNLKTDERKSEALLGFSVENAAATQVTSAKEIPCNECATSFPSLQKYMEHHCPNARLPVLKDDNESEISELEDSDVENLTGEIVYQPDGSAYIIEDSKESGQNAQTGANSKLFSTAMFLDSLASAGEKSDQSASAPMSFYPQIINTFHIASSLGKPFTADQAFPNTSALAGVGPVLHSFRVYDLRHKREKDYLTSDGSAKNSCVSKDVPNNVDLSKFDGCVSDGKRKPVLMCFLCKLSFGYIRSFVTHAVHDHRMTLNDEEQKLLSNKCVSAIIQGIGKDKEPLISFLEPKKSTSVYPHFSTTNLIGPDPTFRGLWSAFHVENGDSLPAGFAFLKGSASTSSSAEQPLGITQMPKAEVNLGGLSSLVVNTPITSVSLSHSSSESSKMSESKDQENNCERPKESNVLHPNGECPVKSEPTEPGDEDEEDAYSNELDDEEVLGELTDSIGNKDFPLLNQSISPLSSSVLKFIEKGTSSSSATVSDDTEKKKQTAAVRASGSVASNYGISGKDFADASASKDSATAAHPSEIARGDEDSSATPHQHGFTPSTPGTPGPGGDGSPGSGIECPKCDTVLGSSRSLGGHMTMMHSRNSCKTLKCPKCNWHYKYQQTLEAHMKEKHPEPGGSCVYCKTGQPHPRLARGESYTCGYKPFRCEVCNYSTTTKGNLSIHMQSDKHLNNVQNLQNGNGEQVFGHSAPAPNTSLSGCGTPSPSKPKQKPTWRCEVCDYETNVARNLRIHMTSEKHMHNMMLLQQNMKQIQHNLHLGLAPAEAELYQYYLAQNIGLTGMKLENPADPQLMINPFQLDPATAAALAPGLVNNELPPEIRLASGQLMGDDLSLLTAGELSPYISDPALKLFQCAVCNKFTSDSLEALSVHVSSERSLPEEEWRAVIGDIYQCKLCNYNTQLKANFQLHCKTDKHMQKYQLVAHIKEGGKSNEWRLKCIAIGNPVHLKCNACDYYTNSVDKLRLHTTNHRHEAALKLYKHLQKQEGAVNPESCYYYCAVCDYTTKVKLNLVQHVRSVKHQQTEGLRKLQLHQQGLAPEEDNLSEIFFVKDCPPNELETASLGARTCDDDLTEQQLRSTSEEQSEEAEGAIKPTAVAEDDEKDTSERDNSEGKNSNKDSGIITPEKELKVSVAGGTQPLLLAKEEDVATKRSKPTEDNKFCHEQFYQCPYCNYNSRDQSRIQMHVLSQHSVQPVICCPLCQDVLSNKMHLQLHLTHLHSVSPDCVEKLLMTVPVPDVMMPNSMLLPAAASEKSERDTPAAVTAEGSGKYSGESPMDDKSMAGLEDSKANVEVKNEEQKPTKEPLEVSEWNKNSSKDVKIPDTLQDQLNEQQKRQPLSVSDRHVYKYRCNHCSLAFKTMQKLQIHSQYHAIRAATMCNLCQRSFRTFQALKKHLEAGHPELSEAELQQLYASLPVNGELWAESETMSQDDHGLEQEMEREYEVDHEGKASPVGSDSSSIPDDMGSEPKRTLPFRKGPNFTMEKFLDPSRPYKCTVCKESFTQKNILLVHYNSVSHLHKLKKVLQEASSPVPQETNSNTDNKPYKCSICNVAYSQSSTLEIHMRSVLHQTKARAAKLEPSGHVAGGHSIAANVNSPGQGMLDSMSLAAVNSKDTHLDAKELNKKQTPDLISAQPAHHPPQSPAQIQMQLQHELQQQAAFFQPQFLNPAFLPHFPMTPEALLQFQQPQFLFPFYIPGTEFSLGPDLGLPGSATFGMPGMTGMAGSLLEDLKQQIQTQHHVGQTQLQILQQQAQQYQATQPQLQPQKQQQQPPPPQQQQQQQASKLLKQEQSNIVSADCQIMKDVPSYKEAEDISEKPEKPKQEFISEGEGLKEGKDTKKQKSLEPSIPPPRIASGARGNAAKALLENFGFELVIQYNENRQKVQKKGKSGEGENTDKLECGTCGKLFSNVLILKSHQEHVHGQFFPYAALEKFARQYREAYDKLYPISPSSPETPPPPPPPPPLPPAPPQPSSMGPVKIPNTVSTPLQAPPPTPPPPPPPPPPPPPPPPPPPPSAPPQVQLPVSLDLPLFPSIMMQPVQHPALPPQLALQLPQMDALSADLTQLCQQQLGLDPNFLRHSQFKRPRTRITDDQLKILRAYFDINNSPSEEQIQEMAEKSGLSQKVIKHWFRNTLFKERQRNKDSPYNFSNPPITVLEDIRIDPQPTSLEHYKSDASFSKRSSRTRFTDYQLRVLQDFFDTNAYPKDDEIEQLSTVLNLPTRVIVVWFQNARQKARKSYENQAETKDNEKRELTNERYIRTSNMQYQCKKCNVVFPRIFDLITHQKKQCYKDEDDDAQDESQTEDSMDATDQVVYKHCTVSGQTDAAKNAAAPAASSGSGTSTPLIPSPKPEPEKTSPKPEYPAEKPKQSDPSPPSQGTKPALPLASTSSDPPQASTAQPQPQPQPPKQPQLIGRPPSASQTPVPSSPLQISMTSLQNSLPPQLLQYQCDQCTVAFPTLELWQEHQHMHFLAAQNQFLHSPFLERPMDMPYMIFDPNNPLMTGQLLGSSLTQMPPQASSSHTTAPTTVAASLKRKLDDKEDNNCSEKEGGNSGEDQHRDKRLRTTITPEQLEILYEKYLLDSNPTRKMLDHIAREVGLKKRVVQVWFQNTRARERKGQFRAVGPAQSHKRCPFCRALFKAKSALESHIRSRHWNEGKQAGYSLPPSPLISTEDGGESPQKYIYFDYPSLPLTKIDLSSENELASTVSTPVSKTAELSPKNLLSPSSFKAECSEDVENLNAPPAEAGYDQNKTDFDETSSINTAISDATTGDEGNTEMESTTGSSGDVKPALSPKEPKTLDTLPKPATTPTTEVCDDKFLFSLTSPSIHFNDKDGDHDQSFYITDDPDDNADRSETSSIADPSSPNPFGSSNPFKSKSNDRPGHKRFRTQMSNLQLKVLKACFSDYRTPTMQECEMLGNEIGLPKRVVQVWFQNARAKEKKFKINIGKPFMINQGGTEGTKPECTLCGVKYSARLSIRDHIFSKQHISKVRETVGSQLDREKDYLAPTTVRQLMAQQELDRIKKASDVLGLTVQQPGMMDSSSLHGISLPTAYPGLPGLPPVLLPGMNGPSSLPGFPQNSNTLTPPGAGMLGFPTSATSSPALSLSSAPTKPLLQTPPPPPPPPPPPPSSSLSGQQTEQQNKESEKKQTKPNKVKKIKEEELEATKPEKHPKKEEKISSALSVLGKVVGETHVDPIQLQALQNAIAGDPASFIGGQFLPYFIPGFASYFTPQLPGTVQGGYFPPVCGMESLFPYGPTMPQTLAGLSPGALLQQYQQYQQNLQESLQKQQKQQQEQQQKPVQAKTSKVESDQPQNSNDASETKEDKSTATESTKEEPQLESKSADFSDTYVVPFVKYEFICRKCQMMFTDEDAAVNHQKSFCYFGQPLIDPQETVLRVPVSKYQCLACDVAISGNEALSQHLQSSLHKEKTIKQAMRNAKEHVRLLPHSVCSPNPNTTSTSQSAASSNNTYPHLSCFSMKSWPNILFQASARRAASPPSSPPSLSLPSTVTSSLCSTSGVQTSLPTESCSDESDSELSQKLEDLDNSLEVKAKPASGLDGNFNSIRMDMFSV

SEQ ID NO: 8417 - protein, 513 aa, Homo sapiens
MGPLTFTDVAIKFSLEEWQFLDTAQQNLYRDVMLENYRNLVFLGVGVSKPDLITCLEQGKEPWNMKRHKMVAKPPVVCSHFAQDLWPEQGIKDSFQKVILRSYGKYGHDNLQLRKGCESVDECKMHKGGYDELKQCLTTTPSKIFQCDKYVKVFHKFSSSNSQKIRHTGNNSFKCKECGKSFCMLSHLTKHERNHTRVNCYKCEECGKAFSVPSKLNNHKRIHTGEKPYKCEECGKAFNVSSSLNNHKRIHTGEKPYKCEECGKTFNMFSSLNNHKRIHTGEKPYKCKECGKAFNVFSSLNNHKRIHTGEKPYKCEECGKAFNQPSHLATHKRIHTGEKLYKCEECGKAFSQSSHITTHKRIHTGEKPYKCEECGKAFKVSVHLTTHKRIHTGEKPYKCEECGKAFNQSSALTTHKIIHTGERPYKCKQCGKGFSQSSTLTKHKIIHTKEKPYKCEECGKAFNQYSTLNKHKIIHAREKPYKCEECGKAFNKSSILNRHKIIHTKEKSQTLKM

SEQ ID NO: 8418 - protein, 412 aa, Homo sapiens
MMALWSLLHLTFLGFSITLLLVHGQGFQGTAAIWPSLFNVNLSKKVQESIQIPNNGSAPLLVDVRVFVSNVFNVDILRYTMSSMLLLRLSWLDTRLAWNTSAHPRHAITLPWESLWTPRLTILEALWVDWRDQSPQARVDQDGHVKLNLALATETNCNFELLHFPRDHSNCSLSFYALSNTAMELEFQAHVVNEIVSVKREYVVYDLKTQVPPQQLVPCFQVTLRLKNTALKSIIALLVPAEALLLADVCGGLLPLRAIERIGYKVTLLLSYLVLHSSLVQALPSSSSCNPLLIYYFTILLLLLFLSTIETVLLAGLLARGNLGAKSGPSPAPRGEQREHGNPGPHPAEEPSRGVKGSQRSWPETADRIFFLVYVVGVLCTQFVFAGIWMWAACKSDAAPGEAAPHGRRPRL

SEQ ID NO: 8419 - protein, 266 aa, Homo sapiens
MMALWSLLHLTFLGFSITLLLVHGQGFQGTAAIWPSLFNVNLSKKVQESIQIPNNGSAPLLVDVRVFVSNVFNVDILRYTMSSMLLLRLSWLDTRLAWNTSAHPRHAITLPWESLWTPRLTILEALWVDWRDQSPQARVDQDGHVKLNLALATETNCNFELLHFPRDHSNCSLSFYALSNTGADRAGAAGLRRGGGRWGRGTPRSVVQGQGAGQGEGAKADRRRTPRSVFRAVYPRLRRAAPALPLRPPLEWQPISVLSGSLRAPL

SEQ ID NO: 8420 - protein, 126 aa, Homo sapiens
MMALWSLLHLTFLGFSITLLLVHGQGFQGTAAIWPSLFNVNLSKKVQESIQIPNNGSAPLLVDVRVFVSNVFNVSSVLPRATALHSHGDCSGSAPCSKARGSGCHGLTPGNHLKVQPPCINPSGDI

SEQ ID NO: 8421 - protein, 131 aa, Homo sapiens
METANGEEPPAGPPVSLHGRRLLRVGGACPTPLPVLQRLPPSALHHTLHCVPRRVCVSPLGQVTRIPPVRTVRRAPSGLLPQRRGGPSWWPPSGVARGGPSWWPPSGVVRGGPSSWPPSGVAEPREALGLP

SEQ ID NO: 8422 - protein, 522 aa, Homo sapiens
MEFPDHSRHLLQCLSEQRHQGFLCDCTVLVGDAQFRAHRAVLASCSMYFHLFYKDQLDKRDIVHLNSDIVTAPAFALLLEFMYEGKLQFKDLPIEDVLAAASYLHMYDIVKVCKKKLKEKATTEADSTKKEEDASSCSDKVESLSDGSSHIAGDLPSDEDEGEDEKLNILPSKRDLAAEPGNMWMRLPSDSAGIPQAGGEAEPHATAAGKTVASPCSSTESLSQRSVTSVRDSADVDCVLDLSVKSSLSGVENLNSSYFSSQDVLRSNLVQVKVEKEASCDESDVGTNDYDMEHSTVKESVSTNNRVQYEPAHLAPLREDSVLRELDREDKASDDEMMTPESERVQVEGGMESSLLPYVSNILSPAGQIFMCPLCNKVFPSPHILQIHLSTHFREQDGIRSKPAADVNVPTCSLCGKTFSCMYTLKRHERTHSGEKPYTCTQCGKSFQYSHNLSRHAVVHTREKPHACKWCERRFTQSGDLYRHIRKFHCELVNSLSVKSEALSLPTVRDWTLEDSSQELWK

SEQ ID NO: 8423 - protein, 531 aa, Homo sapiens
MCPKGYEDSMEFPDHSRHLLQCLSEQRHQGFLCDCTVLVGDAQFRAHRAVLASCSMYFHLFYKDQLDKRDIVHLNSDIVTAPAFALLLEFMYEGKLQFKDLPIEDVLAAASYLHMYDIVKVCKKKLKEKATTEADSTKKEEDASSCSDKVESLSDGSSHIAGDLPSDEDEGEDEKLNILPSKRDLAAEPGNMWMRLPSDSAGIPQAGGEAEPHATAAGKTVASPCSSTESLSQRSVTSVRDSADVDCVLDLSVKSSLSGVENLNSSYFSSQDVLRSNLVQVKVEKEASCDESDVGTNDYDMEHSTVKESVSTNNRVQYEPAHLAPLREDSVLRELDREDKASDDEMMTPESERVQVEGGMESSLLPYVSNILSPAGQIFMCPLCNKVFPSPHILQIHLSTHFREQDGIRSKPAADVNVPTCSLCGKTFSCMYTLKRHERTHSGEKPYTCTQCGKSFQYSHNLSRHAVVHTREKPHACKWCERRFTQSGDLYRHIRKFHCELVNSLSVKSEALSLPTVRDWTLEDSSQELWK

SEQ ID NO: 8424 - protein, 170 aa, Homo sapiens
MGKRYFCDYCDRSFQDNLHNRKKHLNGLQHLKAKKVWYDMFRDAAAILLDEQNKRPCRKFLLTGQCDFGSNCRFSHMSERDLQELSIQVEEERRAREWLLDAPELPEGHLEDWLEKRAKRLSSAPSSRAEPIRTTVFQYPVGWPPVQELPPSLRAPPPGGWPLQPRVQWG

SEQ ID NO: 8425 - protein, 364 aa, Homo sapiens
MWAPREQLLGWTAEALPAKDSAWPWEEKPRYLGPVTFEDVAVLFTEAEWKRLSLEQRNLYKEVMLENLRNLVSLAESKPEVHTCPSCPLAFGSQQFLSQDELHNHPIPGFHAGNQLHPGNPCPEDQPQSQHPSDKNHRGAEAEDQRVEGGVRPLFWSTNERGALVGFSSLFQRPPISSWGGNRILEIQLSPAQNASSEEVDRISKRAETPGFGAVTFGECALAFNQKSNLFRQKAVTAEKSSDKRQSQVCRECGRGFSRKSQLIIHQRTHTGEKPYVCGECGRGFIVESVLRNHLSTHSGEKPYVCSHCGRGFSCKPYLIRHQRTHTREKSFMCTVCGRGFREKSELIKHQRIHTGDKPYVCRD

SEQ ID NO: 8426 - protein, 361 aa, Homo sapiens
MIDFQMLNQLCRTIINPSVIPCLKYCGDQIGPVTFEDVAVLFTEAEWKRLSLEQRNLYKEVMLENLRNLVSLESKPEVHTCPSCPLAFGSQQFLSQDELHNHPIPGFHAGNQLHPGNPCPEDQPQSQHPSDKNHRGAEAEDQRVEGGVRPLFWSTNERGALVGFSSLFQRPPISSWGGNRILEIQLSPAQNASSEEVDRISKRAETPGFGAVTFGECALAFNQKSNLFRQKAVTAEKSSDKRQSQVCRECGRGFSRKSQLIIHQRTHTGEKPYVCGECGRGFIVESVLRNHLSTHSGEKPYVCSHCGRGFSCKPYLIRHQRTHTREKSFMCTVCGRGFREKSELIKHQRIHTGDKPYVCRD

SEQ ID NO: 8427 - protein, 421 aa, Homo sapiens
MIDFQMLNQLCRTIINPSVIPCLKYCGDQIGPVTFEDVAVLFTEAEWKRLSLEQRNLYKEVMLENLRNLVSLESKPEVHTCPSCPLAFGSQQFLSQDELHNHPIPGFHAGNQLHPGNPCPEDQPQSQHPSDKNHRGAEAEDQRVEGGVRPLFWSTNERGALVGFSSLFQRPPISSWGGNRILEIQLSPAQNASSEEVDRISKRAETPGFGAVTFGECALAFNQKSNLFRQKAVTAEKSSDKRQSQVCRECGRGFSRKSQLIIHQRTHTGEKPYVCGECGRGFIVESVLRNHLSTHSGEKPYVCSHCGRGFSCKPYLIRHQRTHTREKSFMCTVCGRGFREKSELIKHQRCQVTVPLEEWSLHLTTSFCNCVLPLASMTLSCFIFFYISSLCCFLSYPTFRFYSEFSLQPYNLRDTFTRSPS

SEQ ID NO: 8428 - protein, 194 aa, Homo sapiens
MGKLRPSRGRGFADVSQQIRVRNRPSWACRRGGPLGTLLANAGPSTVPVTPTAGSCQPSPLSPGGSDPPPPPRAHVSPQEAPLGQVPGAEWLPPTRGLLCKDVSSSPGPSFHLGGPGLPGHAGPCGPRARPAQGLAGRGGNVGEGSESPLGTLPCSVPASQQLLRGRSHLQGSLAALGEARGGGAAFSWGQEGP

SEQ ID NO: 8429 - protein, 628 aa, Homo sapiens
MALTQGPLKFMDVAIEFSQEEWKCLDPAQRTLYRDVMLENYRNLVSLGICLPDLSVTSMLEQKRDPWTLQSEEKIANDPDGRECIKGVNTERSSKLGSNAGNKPCKNQLGFTFQLHLSDLQLFQAERKISGCKHFEKPVSDNSSVSPLEKISSSVKSHLLNKYRNNFDHAPLLPQEQKAHIREKAYKCNEHGQVFRASASLTNQVIHNADNPYKCSECGKVFSCSSKLVIHRRMHTGEKPYKCHECGKLFSSNSNLSQHQRIHTGEKPYKCHECDKVFRSSSKLAQHQRIHTGEKPYKCHECDKVFNQIAHLVRHQKIHTGEKPYSCNKCGKVFSRHSYLAEHQTVHTGEKPYKCEECGKAFSVRSSLITHQLIHTGRKPYKCKECDKVFGRKCFLTSHQRIHTRERPYGCSQCGKIFSQKSDLIRHRKTHTDEKPYKCNKCGTAFREFSDLTAHFLIHSGEKPYECKECGKVFRYKSSLTSHHRIHTGEKPYKCNRCGKVFSRSSNLVCHQKIHTGEKPYKCNQCGKVFNQASYLTRHQIIHTGERPYRCSKCGKAFRGCSGLTAHLAIHTEKKSHECKECGKIFTQKSSLTNHHRIHIGEKPYKCTLCSKVFSHNSDLAQHQRVHS

SEQ ID NO: 8430 - protein, 395 aa, Homo sapiens
MHTGEKPYKCHECGKLFSSNSNLSQHQRIHTGEKPYKCHECDKVFRSSSKLAQHQRIHTGEKPYKCHECDKVFNQIAHLVRHQKIHTGEKPYSCNKCGKVFSRHSYLAEHQTVHTGEKPYKCEECGKAFSVRSSLITHQLIHTGRKPYKCKECDKVFGRKCFLTSHQRIHTRERPYGCSQCGKIFSQKSDLIRHRKTHTDEKPYKCNKCGTAFREFSDLTAHFLIHSGEKPYECKECGKVFRYKSSLTSHHRIHTGEKPYKCNRCGKVFSRSSNLVCHQKIHTGEKPYKCNQCGKVFNQASYLTRHQIIHTGERPYRCSKCGKAFRGCSGLTAHLAIHTEKKSHECKECGKIFTQKSSLTNHHRIHIGEKPYKCTLCSKVFSHNSDLAQHQRVHS

SEQ ID NO: 8431 - protein, 568 aa, Homo sapiens
MAQVDSQDRWGEASPLSSLTEEAHDTQMLSMNLESDDEDGGEAEKEGTADPVACPRGSSPVTHENPDLPWPHPLGKEEEKFSDSSSAGGMGQKPVEMSGKASWSRDVTKINETQGSPGASRALGSLPSGLAHKLLGQMQPLGDRLPAGDDGYSGANQDAVLDVPPSFPSNGKYLCAHKSVDTSAGNSSLLCFPRPGSNWDLPTQETHTPAQASATPASLAAAVLAKARNSRKVQNQAGRREGGEAEARPYRCLRGGRAFQKPSKPLSPAETRGGAAKRYACELCGKAYSHRGTLQQHRRLHTGERPYQCSFCDKAYTWSSDHRKHIRTHTGEKPYPCPDCGKAFVRSSDLRKHQRNMHSNNKPFPCSECGLTFNKPLSLLRHQRTHLGAKPFRCPACDREFAVASRMVEHQRVHSGERPFPCPTCGKCFTKSSNLSEHQTLHTGQRPFKCADCGVAFAQPSRLVRHQRIHTGERPFPCTQCGQAFARSSTLKRHQQIHSGEKGFLCAECGRAFRIASELAQHIRMHNGERPYQCEDCGQAFTRSNHLQRHRAKHGTCKKEPIPSSSDE

SEQ ID NO: 8432 - protein, 348 aa, Homo sapiens
MTTALEPEDQKGLLIIKAEDHYWGQDSSSQKCSPHRRELYRQHFRKLCYQDAPGPREALTQLWELCRQWLRPECHTKEQILDLLVLEQFLSILPKDLQAWVRAHHPETGEEAVTVLEDLERELDEPGKQVPGNSERRDILMDKLAPLGRPYESLTVQLHPKKTQLEQEAGKPQRNGDKTRTKNEELFQKEDMPKDKEFLGEINDRLNKDTPQHPKSKDIIENEGRSEWQQRERRRYKCDECGKSFSHSSDLSKHRRTHTGEKPYKCDECGKAFIQRSHLIGHHRVHTGVKPYKCKECGKDFSGRTGLIQHQRIHTGEKPYECDECGRPFRVSSALIRHQRIHTANKLY

SEQ ID NO: 8433 - protein, 406 aa, Homo sapiens
MASTEEQYDLKIVKVEEDPIWDQETHLRGNNFSGQEASRQLFRQFCYQETPGPREALSRLRELCHQWLRPEIHTKEQILELLVLEQFLTILPEELQAWVREHHPESGEEAVAVVEDLEQELSEPGNQAPDHEHGHSEVLLEDVEHLKVKQEPTDIQLQPMVTQLRYESFCLHQFQEQDGESIPENQELASKQEILKEMEHLGDSKLQRDVSLDSKYRETCKRDSKAEKQQAHSTGERRHRCNECGKSFTKSSVLIEHQRIHTGEKPYECEECGKAFSRRSSLNEHRRSHTGEKPYQCKECGKAFSASNGLTRHRRIHTGEKPYECKVCGKAFLLSSCLVQHQRIHTGEKRYQCRECGKAFIQNAGLFQHLRVHTGEKPYQCSQCSKLFSKRTLLKKHQKIHTGERP

SEQ ID NO: 8434 - protein, 247 aa, Homo sapiens
MVTQLRYESFCLHQFQEQDGESIPENQELASKQEILKEMEHLGDSKLQRDVSLDSKYRETCKRDSKAEKQQAHSTGERRHRCNECGKSFTKSSVLIEHQRIHTGEKPYECEECGKAFSRRSSLNEHRRSHTGEKPYQCKECGKAFSASNGLTRHRRIHTGEKPYECKVCGKAFLLSSCLVQHQRIHTGEKRYQCRECGKAFIQNAGLFQHLRVHTGEKPYQCSQCSKLFSKRTLLKKHQKIHTGERP

SEQ ID NO: 8435 - protein, 432 aa, Homo sapiens
MAAPMEVAVCTDSAAPMWSCIVWELHSGANLLTYRGGQAGPRGLALLNGEYLLAAQLGKNYISAWELQRKDQLQQKIMCPGPVTCLTASPNGLYVLAGVAESIHLWEVSTGNLLVILSRHYQDVSCLQFTGDSSHFISGGKDCLVLVWSLCSVLQADPSRIPAPRHVWSHHALPITDLHCGFGGPLARVATSSLDQTVKLWEVSSGELLLSVLFDVSIMAVTMDLAEHHMFCGGSEGSIFQVDLFTWPGQRERSFHPEQDAGKVFKGHRNQVTCLSVSTDGSVLLSGSHDETVRLWDVQSKQCIRTVALKGPVTNAAILLAPVSMLSSDFRPSLPLPHFNKHLLGAEHGDEPRHGGLTLRLGLHQQGSEPSYLDRTEQLQAVLCSTMEKSVLGGQDQLRVRVTELEDEVRNLRKINRDLFDFSTRFITRPAK

SEQ ID NO: 8436 - protein, 1428 aa, Homo sapiens
MENEPDHENVEQSLCAKTSEEELNKSFNLEASLSKFSYIDMDKELEFKNDLIDDKEFDIPQVDTPPTLESILNETDDEDESFILEDPTLLNIDTIDSHSYDTSSVASSDSGDRTNLKRKKKLPDSFSLHGSVMRHSLLKGISAQIVSAADKVDAGLPTAIAVSSLIAVGTSHGLALIFGKDQNQALRLCLGSTSVGGQYGAISALSINNDCSRLLCGFAKGQITMWDLASGKLLRSITDAHPPGTAILHIKFTDDPTLAICNDSGGSVFELTFKRVMGVRTCESRCLFSGSKGEVCCIEPLHSKPELKDHPITQFSLLAMASLTKILVIGLKPSLKVWMTFPYGRMDPSSVPLLAWHFVAVQNYVNPMLAFCRGDVVHFLLVKRDESGAIHVTKQKHLHLYYDLINFTWINSRTVVLLDSVEKLHVIDRQTQEELETVEISEVQLVYNSSHFKSLATGGNVSQALALVGEKACYQSISSYGGQIFYLGTKSVYVMMLRSWRERVDHLLKQDCLTEALALAWSFHEGKAKAVVGLSGDASKRKAIVADRMVEILFHYADRALKKCPDQGKIQVMEQHFQDMVPVIVDYCLLLQRKDLLFSQMYDKLSENSVAKGVFLECLEPYILSDKLVGITPQVMKDLIVHFQDKKLMENVEALIVHMDITSLDIQQVVLMCWENRLYDAMIYVYNRGMNEFISPMEKLFRVIAPPLNAGKTLTDEQVVMGNKLLVYISCCLAGRAYPLGDIPEDLVPLVKNQVFEFLIRLHSAEASPEEEIYPYIRTLLHFDTREFLNVLALTFEDFKNDKQAVEYQQRIVDILLKVMVENSDFTPSQVGCLFTFLARQLAKPDNTLFVNRTLFDQVLEFLCSPDDDSRHSERQQVLLELLQAGGIVQFEESRLIRMAEKAEFYQICEFMYEREHQYDKIIDCYLRDPLREEEVFNYIHNILSIPGHSAEEKQSVWQKAMDHIEELVSLKPCKAAELVATHFSGHIETVIKKLQNQVLLFKFLRSLLDPREGIHVNQELLQISPCITEQFIELLCQFNPTQVIETLQVLECYRLEETIQITQKYQLHEVTAYLLEKKGDIHGAFLIMLERLQSKLQEVTHQGENTKEDPSLKDVEDTMVETIALCQRNSHNLNQQQREALWFPLLEAMMAPQKLSSSAIPHLHSEALKSLTMQVLNSMAAFIALPSILQRILQDPVYGKGKLGEIQGLILGMLDTFNYEQTLLETTTSLLNQDLHWSLCNLRASVTRGLNPKQDYCSICLQQYKRRQEMADEIIVFSCGHLYHSFCLQNKECTVEFEGQTRWTCYKCSSSNKVGKLSENSSEIKKGRITPSQVKMSPSYHQSKGDPTAKKGTSEPVLDPQQIQAFDQLCRLYRGSSRLALLTELSQNRSSESYRPFSGSQSAPAFNSIFQNENFQLQLIPPPVTED

SEQ ID NO: 8437 - protein, 1336 aa, Homo sapiens
MENEPDHENVEQSLCAKTSEEELNKSFNLEASLSKFSYIDMDKELEFKNDLIDDKEFDIPQVDTPPTLESILNETDDEDESFILEDPTLLNIDTIDSHSYDTSSVASSDSGDRTNLKRKKKLPDSFSLHGSVMRHSLLKGISAQIVSAADKVDAGLPTAIAVSSLIAVGTSHGLALIFDQNQALRLCLGSTSVGGQYGAISALSINNDCSRLLCGFAKGQITMWDLASGKLLRSITDAHPPGTAILHIKFTDDPTLAICNDSGGSVFELTFKRVMGVRTCESRCLFSGSKGEVCCIEPLHSKPELKDHPITQFSLLAMASLTKILVIGLKPSLKVWMTFPYGRMDPSSVPLLAWHFVAVQNYVNPMLAFCRGDVVHFLLVKRDESGAIHVTKQKHLHLYYDLINFTWINSRTVVLLDSVEKLHVIDRQTQEELETVEISEVQLVYNSSHFKSLATGGNVSQALALVGEKACYQSISSYGGQIFYLGTKSVYVMMLRSWRERVDHLLKQDCLTEALALAWSFHEGKAKAVVGLSGDASKRKAIVADRMVEILFHYADRALKKCPDQGKIQVMEQHFQVVLMCWENRLYDAMIYVYNRGMNEFISPMEKLFRVIAPPLNAGKTLTDEQVVMGNKLLVYISCCLAGRAYPLGDIPEDLVPLVKNQVFEFLIRLHSAEASPEEEIYPYIRTLLHFDTREFLNVLALTFEDFKNDKQAVEYQQRIVDILLKVMVENSDFTPSQVGCLFTFLARQLAKPDNTLFVNRTLFDQVLEFLCSPDDDSRHSERQQVLLELLQAGGIVQFEESRLIRMAEKAEFYQICEFMYEREHQYDKIIDCYLRDPLREEEVFNYIHNILSIPGHSAEEKQSVWQKAMDHIEELVSLKPCKAAELVATHFSGHIETVIKKLQNQVLLFKFLRSLLDPREGIHVNQELLQISPCITEQFIELLCQFNPTQVIETLQVLECYRLEETIQITQKYQLHEVTAYLLEKKGDIHGAFLIMLERLQSKLQEVTHQGENTKEDPSLKDVEDTMVETIALCQRNSHNLNQQQREALWFPLLEAMMAPQKLSSSAIPHLHSEALKSLTMQVLNSMAAFIALPSILQRILQDPVYGKGKLGEIQGLILGMLDTFNYEQTLLETTTSLLNQDLHWSLCNLRASVTRGLNPKQDYCSICLQQYKRRQEMADEIIVFSCGHLYHSFCLQNKECTVEFEGQTRWTCYKCSSSNKVGKLSENSSEIKKGRITPSQVKMSPSYHQSKGDPTAKKGTSEPVLDPQQIQAFDQLCRLYRGSSRLALLTELSQNRSSESYRPFSGSQSAPAFNSIFQNENFQLQLIPPPVTED

SEQ ID NO: 8438 - protein, 1426 aa, Homo sapiens
MENEPDHENVEQSLCAKTSEEELNKSFNLEASLSKFSYIDMDKELEFKNDLIDDKEFDIPQVDTPPTLESILNETDDEDESFILEDPTLLNIDTIDSHSYDTSSVASSDSGDRTNLKRKKKLPDSFSLHGSVMRHSLLKGISAQIVSAADKVDAGLPTAIAVSSLIAVGTSHGLALIFDQNQALRLCLGSTSVGGQYGAISALSINNDCSRLLCGFAKGQITMWDLASGKLLRSITDAHPPGTAILHIKFTDDPTLAICNDSGGSVFELTFKRVMGVRTCESRCLFSGSKGEVCCIEPLHSKPELKDHPITQFSLLAMASLTKILVIGLKPSLKVWMTFPYGRMDPSSVPLLAWHFVAVQNYVNPMLAFCRGDVVHFLLVKRDESGAIHVTKQKHLHLYYDLINFTWINSRTVVLLDSVEKLHVIDRQTQEELETVEISEVQLVYNSSHFKSLATGGNVSQALALVGEKACYQSISSYGGQIFYLGTKSVYVMMLRSWRERVDHLLKQDCLTEALALAWSFHEGKAKAVVGLSGDASKRKAIVADRMVEILFHYADRALKKCPDQGKIQVMEQHFQDMVPVIVDYCLLLQRKDLLFSQMYDKLSENSVAKGVFLECLEPYILSDKLVGITPQVMKDLIVHFQDKKLMENVEALIVHMDITSLDIQQVVLMCWENRLYDAMIYVYNRGMNEFISPMEKLFRVIAPPLNAGKTLTDEQVVMGNKLLVYISCCLAGRAYPLGDIPEDLVPLVKNQVFEFLIRLHSAEASPEEEIYPYIRTLLHFDTREFLNVLALTFEDFKNDKQAVEYQQRIVDILLKVMVENSDFTPSQVGCLFTFLARQLAKPDNTLFVNRTLFDQVLEFLCSPDDDSRHSERQQVLLELLQAGGIVQFEESRLIRMAEKAEFYQICEFMYEREHQYDKIIDCYLRDPLREEEVFNYIHNILSIPGHSAEEKQSVWQKAMDHIEELVSLKPCKAAELVATHFSGHIETVIKKLQNQVLLFKFLRSLLDPREGIHVNQELLQISPCITEQFIELLCQFNPTQVIETLQVLECYRLEETIQITQKYQLHEVTAYLLEKKGDIHGAFLIMLERLQSKLQEVTHQGENTKEDPSLKDVEDTMVETIALCQRNSHNLNQQQREALWFPLLEAMMAPQKLSSSAIPHLHSEALKSLTMQVLNSMAAFIALPSILQRILQDPVYGKGKLGEIQGLILGMLDTFNYEQTLLETTTSLLNQDLHWSLCNLRASVTRGLNPKQDYCSICLQQYKRRQEMADEIIVFSCGHLYHSFCLQNKECTVEFEGQTRWTCYKCSSSNKVGKLSENSSEIKKGRITPSQVKMSPSYHQSKGDPTAKKGTSEPVLDPQQIQAFDQLCRLYRGSSRLALLTELSQNRSSESYRPFSGSQSAPAFNSIFQNENFQLQLIPPPVTED

SEQ ID NO: 8439 - protein, 465 aa, Homo sapiens
MTPVRMQHSLAGQTYAVPFIQPDLRREEAVQQMADALQYLQKVSGDIFSRISQQVEQSRSQVQAIGEKVSLAQAKIEKIKGSKKAIKVFSSAKYPAPGRLQEYGSIFTGAQDPGLQRRPRHRIQSKHRPLDERALQEKLKDFPVCVSTKPEPEDDAEEGLGGLPSNISSVSSLLLFNTTENLYKKYVFLDPLAGAVTKTHVMLGAETEEKLFDAPLSISKREQLEQQVPENYFYVPDLGQVPEIHVPSYLPDLPGIANDLMYSADLGPGIAPSAPGTIPELPTFHTEVAEPLKVDLQDGVLTPPPPPPPPPPAPEVLASAPPLPPSTAAPVGQGARQDDSSSSASPSVQGAPREVVDPSGGWATLLESIRQAGGIGKAKLRSMKERKLEKQQQKEQEQVRATSQGGHLMSDLFNKLVMRRKGISGKGPGAGEGPGGAFVRVSDSIPPLPPPQQPQAEEDEDDWES

SEQ ID NO: 8440 - protein, 554 aa, Homo sapiens
MSADGGGIQDTQDKETPPEVPDRGHPHQEMPSKLGEAVPSGDTQESLHIKMEPEEPHSEGASQEDGAQGAWGWAPLSHGSKEKALFLPGGALPSPRIPVLSREGRTRDRQMAAALLTAWSQMPVTFEDVALYLSREEWGRLDHTQQNFYRDVLQKKNGLSLGFPFSRPFWAPQAHGKGEASGSSRQAGDEKEWRGACTGAVEVGQRVQTSSVAALGNVKPFRTRAGRVQWGVPQCAQEAACGRSSGPAKDSGQPAEPDRTPDAAPPDPSPTEPQEYRVPEKPNEEEKGAPESGEEGLAPDSEVGRKSYRCEQCGKGFSWHSHLVTHRRTHTGEKPYACTDCGKRFGRSSHLIQHQIIHTGEKPYTCPACRKSFSHHSTLIQHQRIHTGEKPYVCDRCAKRFTRRSDLVTHQGTHTGAKPHKCPICAKCFTQSSALVTHQRTHTGVKPYPCPECGKCFSQRSNLIAHNRTHTGEKPYHCLDCGKSFSHSSHLTAHQRTHRGVRPYACPLCGKSFSRRSNLHRHEKIHTTGPKALAMLMLGAAAAGALATPPPAPT

SEQ ID NO: 8441 - protein, 1280 aa, Homo sapiens
MGSLTFRDVAIEFSLEEWQCLDTAQQNLYRNVMLENYRNLVFLGIAAFKPDLIIFLEEGKESWNMKRHEMVEESPVICSHFAQDLWPEQGIEDSFQKVILRRYEKCGHENLHLKIGYTNVDECKVHKEGYNKLNQSLTTTQSKVFQRGKYANVFHKCSNSNRHKIRHTGKKHLQCKEYVRSFCMLSHLSQHKRIYTRENSYKCEEGGKAFNWSSTLTYYKSAHTGEKPYRCKECGKAFSKFSILTKHKVIHTGEKSYKCEECGKAFNQSAILTKHKIIHTGEKPNKCEECGKAFSKVSTLTTHKAIHAGEKPYKCKECGKAFSKVSTLITHKAIHAGEKPYKCKECGKAFSKFSILTKHKVIHTGEKPYKCEECGKAYKWPSTLSYHKKIHTGEKPYKCEECGKGFSMFSILTKHEVIHTGEKPYKCEECGKAFNWSSNLMEHKKIHTGETPYKCEECGKGFSMFSILTKHKVIHNGEKPYKCEECDKATHAGEKPYKCEECGKAFNWSSNLMEHKRIHTGEKPYKCEECGKSFSTFSILTKHKVIHTGEKPYKCEECGKAYKWSSTLSYHKKIHTVEKPYKCEECGKAFNQSAILIKHKRIHTGEKPYKCEECGKTFSKVSTLTTHKAIHAGEKPYKCKECGKTFIKVSTLTTHKAIHAGEKPYKCKECGKAFSKFSILTKHKVIHTGEKPYKCEECGKAFNWSSNLMEHKRIHTGEKPYKCEECGKSFSTFSVLTKHKVIHTGEKPYKCEECGKAYKWSSTLSYHKKIHTVEKPYKCEECGKAFNRSAILIKHKRIHTDEKPYKCEECGKTFSKVSTLTTHKAIHAGEKPYKCKECGKAFSKFSILTKHKVIHTGEKPYKCEECGKAYKWPSTLSYHKKIHTGEKPYKCEECGKGFSMFSILTKHEVIHTGEKPYKCEECGKAFSWLSVFSKHKKTHAGEKFYKCEACGKAYKSSSTLSYHKKIHTEEKPYKYEECGKGFSTFSILTKHKVIHTGEKPYKCEECGKAFNWSSNLMEHKKIHTGETPYKCEECDKAFSWPSSLTEHKATHAGEKPYKCEECGKAFSWPSRLTEHKATHAGEEPYKCEECGKAFNWSSNLMEHKRIHTGEKPYKCEECGKSFSTFSILTKHKVIHTGEKPYKCEECGKAYKWSSTLSYHKKIHTVEKPYKCEECGKGFVMFSILAKHKVIHTGEKLYKCEECGKAYKWPSTLRYHKKIHTGEKPYKCEECGKAFSTFSILTKHKVIHTGEKPYKCEECGKAFSWLSVFSKHKKIHTGEKL

SEQ ID NO: 8442 - protein, 1167 aa, Homo sapiens
MGSLTFRDVAIEFSLEEWQCLDTAQQNLYRNVMLENYRNLVFLGIAAFKPDLIIFLEEGKESWNMKRHEMVEESPVICSHFAQDLWPEQGIEDSFQKVILRRYEKCGHENLHLKIGYTNVDECKVHKEGYNKLNQSLTTTQSKVFQRGKYANVFHKCSNSNRHKIRHTGKKHLQCKEYVRSFCMLSHLSQHKRIYTRENSYKCEEGGKAFNWSSTLTYYKSAHTGEKPYRCKECGKAFSKFSILTKHKVIHTGEKSYKCEECGKAFNQSAILTKHKIIHTGEKPNKCEECGKAFSKVSTLTTHKAIHAGEKPYKCKECGKAFSKVSTLITHKAIHAGEKPYKCKECGKAFSKFSILTKHKVIHTGEKPYKCEECGKAYKWPSTLSYHKKIHTGEKPYKCEECGKGFSMFSILTKHEVIHTGEKPYKCEECGKAFNWSSNLMEHKKIHTGETPYKCEECGKGFSWSSTLSYHKKIHTVEKPYKCEECGKAFNQSAILIKHKRIHTGEKPYKCEECGKTFSKVSTLTTHKAIHAGEKPYKCKECGKTFIKVSTLTTHKAIHAGEKPYKCKECGKAFSKFSILTKHKVIHTGEKPYKCEECGKAFNWSSNLMEHKRIHTGEKPYKCEECGKSFSTFSVLTKHKVIHTGEKPYKCEECGKAYKWSSTLSYHKKIHTVEKPYKCEECGKAFNRSAILIKHKRIHTDEKPYKCEECGKTFSKVSTLTTHKAIHAGEKPYKCKECGKAFSKFSILTKHKVIHTGEKPYKCEECGKAYKWPSTLSYHKKIHTGEKPYKCEECGKGFSMFSILTKHEVIHTGEKPYKCEECGKAFSWLSVFSKHKKTHAGEKFYKCEACGKAYNTFSILTKHKVIHTGEKPYKCEECGKAFNWSSNLMEHKKIHTGETPYKCEECDKAFSWPSSLTEHKATHAGEKPYKCEECGKAFSWPSRLTEHKATHAGEEPYKCEECGKAFNWSSNLMEHKRIHTGEKPYKCEECGKSFSTFSILTKHKVIHTGEKPYKCEECGKAYKWSSTLSYHKKIHTVEKPYKCEECGKGFVMFSILAKHKVIHTGEKLYKCEECGKAYKWPSTLRYHKKIHTGEKPYKCEECGKAFSTFSILTKHKVIHTGEKPYKCEECGKAFSWLSVFSKHKKIHTGVPNPPTHKKIHAGEKLYK

SEQ ID NO: 8443 - protein, 517 aa, Homo sapiens
MQPLSKLMAISKPRNLSLREQREVLRADMSWQQETNPVVETHDSEASRQKFRHFQYLKVSGPHEALSQLWELCLQWLRPEIHTKKQIIELLVLEQFLAILPEEVRTWVNLQHPNNSKDMVTLIEDVIEMLEDEDMPCKDSALQMGSIKEKMKAGSRTGKPQEPVTFKDVVVEFSKEEWGQLDSAVKNLYRNVMLENFRNLNSLRKAHLLSKPFESLKLESKKKRWIMEKEIPRKTIFDMKSISGEESSHGVIMTRLTESGHPSSDAWKGENWLYRNQKKWDINLPQEAFIPETIYTEEEDFECSENKKSFDINSVSSICAIQVGIPSRKGSPKCDKFKTYFKFNLDSVGKQHSEYEYGNDLSLSTDIRHQKSHTTMNSYECYQCGKAFCRSSSLIRHQIIHTGEKPYKCSECGRFFNRRTNLTKHQKLHAEAKACTSNKCGKAFSKSEDSNNPTLHFGNNFYQCVNCGKSFNRSSSLIRHQMIHTGEKPFKCKECSKAFNRSSNLVKHQKLHTRDKS

SEQ ID NO: 8444 - protein, 304 aa, Homo sapiens
MQPLSKLMAISKPRNLSLREQREVLRADMSWQQETNPVVETHDSEASRQKFRHFQYLKVSGPHEALSQLWELCLQWLRPEIHTKKQIIELLVLEQFLAILPEEVRTWVNLQHPNNSKDMVTLIEDVIEMLEDEDMPCKDSALQMGSIKEKMKAGSRTGKPQEPVTFKDVVVEFSKEEWGQLDSAVKNLYRNVMLENFRNLNSLRKAHLLSKPFESLKLESKKKRWIMEKEIPRKTIFDMKSISGEESSHGVIMTRLTESGHPSSDAWKDGVSLLLPRLEYNDAVSAHCNLHLWVQVILLPQPPE

SEQ ID NO: 8445 - protein, 310 aa, Homo sapiens
MGLCKCPKRKVTNLFCFEHRVNVCEHCLVANHAKCIVQSYLQWLQDSDYNPNCRLCNIPLASRETTRLVCYDLFHWACLNERAAQLPRNTAPAGYQCPSCNGPIFPPTNLAGPVASALREKLATVNWARAGLGLPLIDEVVSPEPEPLNTSDFSDWSSFNASSTPGPEEVDSASAAPAFYSQAPRPPASPGRPEQHTVIHMGNPEPLTHAPRKVYDTRDDDRTPGLHGDCDDDKYRRRPALGWLARLLRSRAGSRKRPLTLLQRAGLLLLLGLLGFLALLALMSRLGRAAADSDPNLDPLMNPHIRVGPS

SEQ ID NO: 8446 - protein, 131 aa, Homo sapiens
MVPLFITSDSALTYSPLPEPPPTPALGGQRGPPTCQCPDFPYPVPPSEGCPSGRLLLSLHWDWGRGAGGSWSGGAWPGSPGWRLARGPAHGASAESLGPLGKALVTGWEGGWRGGQGGACSPWYFPIPAAL

SEQ ID NO: 8447 - protein, 394 aa, Homo sapiens
MDPVACEDVAVNFTQEEWALLDISQRKLYREVMLETFRNLTSIGKKWKDQNIEYEYQNPRRNFRSLIEGNVNEIKEDSHCGETFTQVPDDRLNFQEKKASPEAKSCDNFVCGEVGIGNSSFNMNIRGDIGHKAYEYQDYAPKPYKCQQPKKAFRYHPSFRTQERNHTGEKPYACKECGKTFISHSGIRRRMVMHSGDGPYKCKFCGKAVHCLRLYLIHERTHTGEKPYECKQCVKSFSYSATHRIHERTHTGEKPYECQQCGKAFHSSSSFQAHKRTHTGGKPYECKQCGKSFSWCHSFQIHERTHTGEKPCECSKCNKAFRSYRSYLRHKRSHTGEKPYQCKECRKAFTYPSSLRRHERTHSAKKPYECKQCGKALSYKFSNTPKNALWRKTL

SEQ ID NO: 8448 - protein, 397 aa, Homo sapiens
MMFQDPVACEDVAVNFTQEEWALLDISQRKLYREVMLETFRNLTSIGKKWKDQNIEYEYQNPRRNFRSLIEGNVNEIKEDSHCGETFTQVPDDRLNFQEKKASPEAKSCDNFVCGEVGIGNSSFNMNIRGDIGHKAYEYQDYAPKPYKCQQPKKAFRYHPSFRTQERNHTGEKPYACKECGKTFISHSGIRRRMVMHSGDGPYKCKFCGKAVHCLRLYLIHERTHTGEKPYECKQCVKSFSYSATHRIHERTHTGEKPYECQQCGKAFHSSSSFQAHKRTHTGGKPYECKQCGKSFSWCHSFQIHERTHTGEKPCECSKCNKAFRSYRSYLRHKRSHTGEKPYQCKECRKAFTYPSSLRRHERTHSAKKPYECKQCGKALSYKFSNTPKNALWRKTL

SEQ ID NO: 8449 - protein, 272 aa, Homo sapiens
MNIRGDIGHKAYEYQDYAPKPYKCQQPKKAFRYHPSFRTQERNHTGEKPYACKECGKTFISHSGIRRRMVMHSGDGPYKCKFCGKAVHCLRLYLIHERTHTGEKPYECKQCVKSFSYSATHRIHERTHTGEKPYECQQCGKAFHSSSSFQAHKRTHTGGKPYECKQCGKSFSWCHSFQIHERTHTGEKPCECSKCNKAFRSYRSYLRHKRSHTGEKPYQCKECRKAFTYPSSLRRHERTHSAKKPYECKQCGKALSYKFSNTPKNALWRKTL

SEQ ID NO: 8450 - protein, 979 aa, Homo sapiens
MSVCTLSVPVSSLSPGRRCNTFSDSGILGCVPINSNTDEEDVVEEKMVAEGVNKEAKQPAKKKRKKGLRIKGKRRRKKLILAKKFSKDLGSGRPVADAPALLASNDPEQDEESLFESNIEKQIYLPSTRAKTSIVWHFFHVDPQYTWRAICNLCEKSVSRGKPGSHLGTSTLQRHLQARHSPHWTRANKFGVASGEEDFTLDVSLSPSSGSNGSFEYIPTDPLDDNRMGKKHDKSASDALRAERGRFLIKSNIVKHALIPGTRAKTSAVWNFFYTDPQHISRAVCNICKRSVSRGRPGSHLGTSTLQRHLQATHPIHWAVANKDSGAVANGLDEAETERSDLLSDTLHGEKSTGSQDLTAEDLSDSDSDEPMLEVENRSESPIPVAEQGTLMRAQERETTCCGNPVSSHISQAIIQMIVEDMHPYNYFSTPAFQRFMQIVAPDYRLPSETYFFTKAVPQLYDCVREKIFLTLENVQSQKIHLTVDIWTHDPSTDYFIVTVHWVSLETASFLNNGRIPDFRKWAVLCVTGLAKDCLITNILQELNDQIGLWLSPNFLIPSFIVSDNSSNVVHAIKDGGFTHVPCFLHCLNMVIQDFFCEHKSIENMLVAARKTCHHFSHSVKARQILQEFQNDHQLPWKNLKQDETGHWISTFYMLKWLLEHCYSVHHSLGRASGVVLTSLQWTLMTYVCDILKPFEEATQKVSVKTAGLNQVLPLIHHLLLSLQKLREDFQVRGITQALNLVDSLSLKLETDTLLSAMLKSKPCILATLLDPCFKNSLEDFFPQGADLETYKQFLAEEVCNYMESSPEICQIPTSEASCPSVTVGADSFTSSLKEGTSSSGSVDSSAVDNVALGSKSFMFPSAVAVVDEYFKEKYSEFSGGDDPLIYWQRKISIWPALTQVAIQYLSCPMCSWQSECIFTKNSHFHPKQIMSLDFDNIEQLMFLKMNLKNVNYDYSTLVLSWDPEQNEVVQSSEKEILP

SEQ ID NO: 8451 - protein, 518 aa, Homo sapiens
MAVALGCAIQASLNQGSVFQEYDTDCEVFRQRFRQFQYREAAGPHEAFNKLWELCCQWLKPKMRSKEQILELLVLEQFLTILPTEIETWVREHCPENRERVVSLIEDLQRELEIPEQQVDMHDMLLEELAPVGTAHIPPTMHLESPALQVMGPAQEAPVAEAWIPQAGPPELNYGATGECQNFLDPGYPLPKLDMNFSLENREEPWVKELQDSKEMKQLLDSKIGFEIGIENEEDTSKQKKMETMYPFIVTLEGNALQGPILQKDYVQLENQWETPPEDLQTDLAKLVDQQNPTLGETPENSNLEEPLNPKPHKKKSPGEKPHRCPQCGKCFARKSQLTGHQRIHSGEEPHKCPECGKRFLRSSDLYRHQRLHTGERPYECTVCKKRFTRRSHLIGHQRTHSEEETYKCLECGKSFCHGSSLKRHLKTHTGEKPHRCHNCGKSFSRLTALTLHQRTHTEERPFKCNYCGKSFRQRPSLVIHLRIHTGEKPYKCTHCSKSFRQRAGLIMHQVTHFRGLI

SEQ ID NO: 8452 - protein, 164 aa, Homo sapiens
MAVALGCAIQASLNQGSVFQEYDTDCEVFRQRFRQFQYREAAGPHEAFNKLWELCCQWLKPKMRSKEQILELLVLEQFLTILPTEIETWVREHCPENRERVVSLIEDLQRELEIPEQQVRKECGIFVIGPKEVAEAAGTRPHICLYVIPQPQDFSRVLFLFLFC

SEQ ID NO: 8453 - protein, 127 aa, Homo sapiens
MAVALGCAIQASLNQGSVFQEYDTDCEVFRQRFRQFQYREAAGPHEAFNKLWELCCQWLKPKMRSKEQILELLVLEQFLTILPTEIETWVREHCPENRERVVSLIEDLQRELEIPEQQTFAAEYSHY

SEQ ID NO: 8454 - protein, 563 aa, Homo sapiens
MAHELVMFRDVAIDVSQEEWECLNPAQRNLYKEVMLENYSNLVSLGLSVSKPAVISSLEQGKEPWMVVREETGRWCPGTWKTWGFHNNFLDNNEATDINADLASRDEPQKLSPKRDIYETELSQWVNMEEFKSHSPERSIFSAIWEGNCHFEQHQGQEEGYFRQLMINHENMPIFSQHTLLTQEFYDREKISECKKCRKIFSYHLFFSHHKRTHSKELSECKECTEIVNTPCLFKQQTIQNGDKCNECKECWKAFVHCSQLKHLRIHNGEKRYECNECGKAFNYGSELTLHQRIHTGEKPYECKECGKAFRQRSQLTQHQRLHTGEKPYECKQCGKAFIRGFQLTEHLRLHTGEKPYECKECGKTFRHRSHLTIHQRIHTGEKPYECRECGKAFSYHSSFSHHQKIHSGKKPYECHECGKAFCDGLQLTLHQRIHTGEKPYECKECGKTFRQCSHLKRHQRIHTGEKPHECMICGKAFRLHSHLIQHQRIHTGEKPYECKECGKAFSYHSSFSHHQRIHSGKKPYQCGKAFNHRLQLNLHQTLHTGEKPVRFPLLPPHPSLAS

SEQ ID NO: 8455 - protein, 436 aa, Homo sapiens
MEEFKSHSPERSIFSAIWEGNCHFEQHQGQEEGYFRQLMINHENMPIFSQHTLLTQEFYDREKISECKKCRKIFSYHLFFSHHKRTHSKELSECKECTEIVNTPCLFKQQTIQNGDKCNECKECWKAFVHCSQLKHLRIHNGEKRYECNECGKAFNYGSELTLHQRIHTGEKPYECKECGKAFRQRSQLTQHQRLHTGEKPYECKQCGKAFIRGFQLTEHLRLHTGEKPYECKECGKTFRHRSHLTIHQRIHTGEKPYECRECGKAFSYHSSFSHHQKIHSGKKPYECHECGKAFCDGLQLTLHQRIHTGEKPYECKECGKTFRQCSHLKRHQRIHTGEKPHECMICGKAFRLHSHLIQHQRIHTGEKPYECKECGKAFSYHSSFSHHQRIHSGKKPYQCGKAFNHRLQLNLHQTLHTGEKPVRFPLLPPHPSLAS

SEQ ID NO: 8456 - protein, 911 aa, Homo sapiens
MCSHFTQDFLPVQGIEDSFHKLILRRYEKCGHDNLQLRKGCKSMNVCKVQKGVYNGINKCLSNTQSKIFQCNARVKVFSKFANSNKDKTRHTGEKHFKCNECGKSFQKFSDLTQHKGIHAGEKPYTCEERGKDFGWYTDLNQHKKIHTGEKPYKCEECGKAFNRSTNLTAHKRIHNREKAYTGEDRDRAFGWSTNLNEYKKIHTGDKPYKCKECGKAFMHSSHLNKHEKIHTGEKPYKCKECGKVISSSSSFAKHKRIHTGEKPFKCLECGKAFNISTTLTKHRRIHTGEKPYTCEVCGKAFRQSANLYVHRRIHTGEKPYTCGECGKTFRQSANLYVHRRIHTGEKPYKCEDCGKAFGRYTALNQHKKIHTGEKPYKCEECGKAFNSSTNLTAHKRIHTREKPYTCEDRGRAFGLSTNLNEYKKIHTGDKPYKCKECGKAFIHSLHLNKHEKIHTGKKPYKCKQCGKVITSSSSFAKHKRIHTGEKPFECLECGKAFTSSTTLTKHRRIHTGEKPYTCEVCGKAFRQSAILYVHRRIHTGEKPYTCEECGKTFRQSANLYVHRRIHTGEKPYKCEECGKAFGRYTDLNQHKKIHTGEKLYKCEECGKDFVWYTDLNQQKKIYTGEKPYKCEECGKAFAPSTDLNQHTKILTGEQSYKCEECGKAFGWSIALNQHKKIHTGEKPYKCEECGKAFSRSRNLTTHRRVHTREKPYKCEDRGRSFGWSTNLNEYKKIHTGDKLYKCKECGKVFKQSSHLNRHEKIHTGKKPYKCKECGKVITSSSSFAKHKRIHTGEKPFKCLECGKAFTSSTTLTKHRRIHTGEKPYTCEECGKAFRQSAILYVHRRIHTGEKPYTCGECGKTFRQSANLYAHKKIHTGEKPYTCGDCGKTFRQSANLYAHKKIHTGDKTIQV

SEQ ID NO: 8457 - protein, 923 aa, Homo sapiens
MLENYRNLVSLAMCSHFTQDFLPVQGIEDSFHKLILRRYEKCGHDNLQLRKGCKSMNVCKVQKGVYNGINKCLSNTQSKIFQCNARVKVFSKFANSNKDKTRHTGEKHFKCNECGKSFQKFSDLTQHKGIHAGEKPYTCEERGKDFGWYTDLNQHKKIHTGEKPYKCEECGKAFNRSTNLTAHKRIHNREKAYTGEDRDRAFGWSTNLNEYKKIHTGDKPYKCKECGKAFMHSSHLNKHEKIHTGEKPYKCKECGKVISSSSSFAKHKRIHTGEKPFKCLECGKAFNISTTLTKHRRIHTGEKPYTCEVCGKAFRQSANLYVHRRIHTGEKPYTCGECGKTFRQSANLYVHRRIHTGEKPYKCEDCGKAFGRYTALNQHKKIHTGEKPYKCEECGKAFNSSTNLTAHKRIHTREKPYTCEDRGRAFGLSTNLNEYKKIHTGDKPYKCKECGKAFIHSLHLNKHEKIHTGKKPYKCKQCGKVITSSSSFAKHKRIHTGEKPFECLECGKAFTSSTTLTKHRRIHTGEKPYTCEVCGKAFRQSAILYVHRRIHTGEKPYTCEECGKTFRQSANLYVHRRIHTGEKPYKCEECGKAFGRYTDLNQHKKIHTGEKLYKCEECGKDFVWYTDLNQQKKIYTGEKPYKCEECGKAFAPSTDLNQHTKILTGEQSYKCEECGKAFGWSIALNQHKKIHTGEKPYKCEECGKAFSRSRNLTTHRRVHTREKPYKCEDRGRSFGWSTNLNEYKKIHTGDKLYKCKECGKVFKQSSHLNRHEKIHTGKKPYKCKECGKVITSSSSFAKHKRIHTGEKPFKCLECGKAFTSSTTLTKHRRIHTGEKPYTCEECGKAFRQSAILYVHRRIHTGEKPYTCGECGKTFRQSANLYAHKKIHTGEKPYTCGDCGKTFRQSANLYAHKKIHTGDKTIQV

SEQ ID NO: 8458 - protein, 531 aa, Homo sapiens
MEAPAQKAGQGGLPKADAQGASGAREKRPEEPRPLEEDRAGSRPTQKGDLRGAAGGRTTPPGGGSRGCSLGVSPGPGTRHSAGTRPLVREPCGPTSSQNPELVIPEGLQAREGPCRSPARGGDCSRNSCLAWHRGAPAGETPPVCDPCPERIQNHPRTQLCEVHTDCWPCQPGTGAPTCPRTPKPTSRGRNPLVEQPRACACGEAFAWRALRIPQERLQATEEPRPCARCGKRFRPNQQQQAGKSPPVCPECGQTSRPRPIVPDPPAQRLYACDECGKAFTRTSSLLQHQRIHTGERPYECAECGKAFVRCSGLYRHQKTHSAERHRRGPVLARRAFRLGCPPCGDYSERSPRRGSGAGEKPYECADCAKAFGLFSHLVEHRRVHTGEKPYACPECGKAFNQRSNLSRHQRTHSSAKPYACPLCEKAFKGRSGLVQHQRAHTGERPYGCSECGKTFRGCSELRQHERLHSGEKPYICRDCGKAFVRNCSLVRHLRTHTGERPYACGDCGRAFSQRSNLNEHRKRHGGRAAP

SEQ ID NO: 8459 - protein, 224 aa, Homo sapiens
MRLAKPKAGISRSSSQGKAYENKRKTGRQRQKWGMTIRFDSSFSRLRRSLDDKPYKCTECEKSFSQSSTLFQHQKIHTGKKSHKCADCGKSFFQSSNLIQHRRIHTGEKPYKCDECGESFKQSSNLIQHQRIHTGEKPYQCDECGRCFSQSSHLIQHQRTHTGEKPYQCSECGKCFSQSSHLRQHMKVHKEEKPRKTRGKNIRVKTHLPSWKAGTGRKSVAGLR

SEQ ID NO: 8460 - protein, 123 aa, Homo sapiens
MVDGRTRTIINDIFFTEPTPEMSSLPVRSHSSLSLNLVSLMVICRGIIKLVIHFRMYCPPRLKAKHIEPTLRPVPLKELRISHWPNECIRHSASVPMATGANGLETKDETKRNAEKCACSVFL

SEQ ID NO: 8461 - protein, 769 aa, Homo sapiens
MPANWTSPQKSSALAPEDHGSSYEGSVSFRDVAIDFSREEWRHLDPSQRNLYRDVMLETYSHLLSVGYQVPEAEVVMLEQGKEPWALQGERPRQSCPGEKLWDHNQCRKILSYKQVSSQPQKMYPGEKAYECAKFEKIFTQKSQLKVHLKVLAGEKLYVCIECGKAFVQKPEFIIHQKTHMREKPFKCNECGKSFFQVSSLFRHQRIHTGEKLYECSQCGKGFSYNSDLSIHEKIHTGERHHECTDCGKAFTQKSTLKMHQKIHTGERSYICIECGQAFIQKTHLIAHRRIHTGEKPYECSNCGKSFISKSQLQVHQRVHTRVKPYICTEYGKVFSNNSNLVTHKKVQSREKSSICTECGKAFTYRSELIIHQRIHTGEKPYECSDCGKAFTQKSALTVHQRIHTGEKSYICMKCGLAFIQKAHLIAHQIIHTGEKPHKCGHCGKLFTSKSQLHVHKRIHTGEKPYMCNKCGKAFTNRSNLITHQKTHTGEKSYICSKCGKAFTQRSDLITHQRIHTGEKPYECNTCGKAFTQKSHLNIHQKIHTGERQYECHECGKAFNQKSILIVHQKIHTGEKPYVCTECGRAFIRKSNFITHQRIHTGEKPYECSDCGKSFTSKSQLLVHQPVHTGEKPYVCAECGKAFSGRSNLSKHQKTHTGEKPYICSECGKTFRQKSELITHHRIHTGEKPYECSDCGKSFTKKSQLQVHQRIHTGEKPYVCAECGKAFTDRSNLNKHQTTHTGDKPYKCGICGKGFVQKSVFSVHQSSHA

SEQ ID NO: 8462 - protein, 406 aa, Homo sapiens
MLETYSHLLSVGYQVPEAEVVMLEQGKEPWALQGERPRQSCPGEKLWDHNQCRKILSYKQVSSQPQKMYPGEKAYECAKFEKIFTQKSQLKVHLKVLAGEKLYVCIECGKAFVQKPEFIIHQKTHMREKPFKCNECGKSFFQVSSLFRHQRIHTGEKLYECSQCGKGFSYNSDLSIHEKIHTGERHHECTDCGKAFTQKSTLKMHQKIHTGERSYICIECGQAFIQKTHLIAHRRIHTGEKPYECSNCGKSFISKSQLQVHQRVHTRVKPYICTEYGKVFSNNSNLVTHKKVQSREKSSICTECGKAFTYRSELITHHRIHTGEKPYECSDCGKSFTKKSQLQVHQRIHTGEKPYVCAECGKAFTDRSNLNKHQTTHTGDKPYKCGICGKGFVQKSVFSVHQSSHA

SEQ ID NO: 8463 - protein, 1687 aa, Homo sapiens
MTDPLLDSQPASSTGEMDGLCPELLLIPPPLSNRGILGPVQSPCPSRDPAPIPTEPGCLLVEATATEEGPGNMEIIVETVAGTLTPGAPGETPAPKLPPGEREPSQEAGTPLPGQETAEEENVEKEEKSDTQKDSQKAVDKGQGAQRLEGDVVSGTESLFKTHMCPECKRCFKKRTHLVEHLHLHFPDPSLQCPNCQKFFTSKSKLKTHLLRELGEKAHHCPLCHYSAVERNALNRHMASMHEDISNFYSDTYACPVCREEFRLSQALKEHLKSHTAAAAAEPLPLRCFQEGCSYAAPDRKAFIKHLKETHGVRAVECRHHSCPMLFATAEAMEAHHKSHYAFHCPHCDFACSNKHLFRKHKKQGHPGSEELRCTFCPFATFNPVAYQDHVGKMHAHEKIHQCPECNFATAHKRVLIRHMLLHTGEKPHKCELCDFTCRDVSYLSKHMLTHSNTKDYMCTECGYVTKWKHYLRVHMRKHAGDLRYQCNQCSYRCHRADQLSSHKLRHQGKSLMCEVCAFACKRKYELQKHMASQHHPGTPAPLYPCHYCSYQSRHKQAVLSHENCKHTRLREFHCALCDYRTFSNTTLLFHKRKAHGYVPGDQAWQLRYASQEPEGAMQGPTPPPDSEPSNQLSARPEGPGHEPGTVVDPSLDQALPEMSEEVNTGRQEGSEAPHGGDLGGSPSPAEVEEGSCTLHLEALGVELESVTEPPLEEVTETAPMEFRPLGLEGPDGLEGPELSSFEGIGTSDLSAEENPLLEKPVSEPSTNPPSLEEAPNNWVGTFKTTPPAETAPLPPLPESESLLKALRRQDKEQAEALVLEGRVQMVVIQGEGRAFRCPHCPFITRREKALNLHSRTGCQGRREPLLCPECGASFKQQRGLSTHLLKKCPVLLRKNKGLPRPDSPIPLQPVLPGTQASEDTESGKPPPASQEAELLLPKDAPLELPREPEETEEPLATVSGSPVPPAGNSLPTEAPKKHCFDPVPPAGNSSPTEAPKKHHLDPVPPAGNSSPTEALKKHRFEQGKFHCNSCPFLCSRLSSITSHVAEGCRGGRGGGGKRGTPQTQPDVSPLSNGDSAPPKNGSTESSSGDGDTVLVQKQKGARFSCPTCPFSCQQERALRTHQIRGCPLEESGELHCSLCPFTAPAATALRLHQKRRHPTAAPARGPRPHLQCGDCGFTCKQSRCMQQHRRLKHEGVKPHQCPFCDFSTTRRYRLEAHQSRHTGIGRIPCSSCPQTFGTNSKLRLHRLRVHDKTPTHFCPLCDYSGYLRHDITRHVNSCHQGTPAFACSQCEAQFSSETALKQHALRRHPEPAQPAPGSPAETTEGPLHCSRCGLLCPSPASLRGHTRKQHPRLECGACQEAFPSRLALDEHRRQQHFSHRCQLCDFAARERVGLVKHYLEQHEETSAAVAASDGDGDAGQPPLHCPFCDFTCRHQLVLDHHVKGHGGTRLYKCTDCAYSTKNRQKITWHSRIHTGEKPYHCHLCPYACADPSRLKYHMRIHKEERKYLCPECGYKCKWVNQLKYHMTKHTGLKPYQCPECEYCTNRADALRVHQETRHREARAFMCEQCGKAFKTRFLLRTHLRKHSEAKPYVCNVCHRAFRWAAGLRHHALTHTDRHPFFCRLCNYKAKQKFQVVKHVRRHHPDQADPNQGVGKDPTTPTVHLHDVQLEDPSPPAPAAPHTGPEG

SEQ ID NO: 8464 - protein, 641 aa, Homo sapiens
MIQSQISFEDVAVDFTLEEWQLLNPTQKNLYRDVMLENYSNLVFLEVWLDNPKMWLRDNQDNLKSMERGHKYDVFGKIFNSSINIVHVGLRSHKCGTGEKSLKCPFDLLIPKNNCERKKIDELNKKLLFCIKPGRTHGGIKYCDCSTCRKSSNEEPWLTANHITHTGVYLCMECGRFFNKKSQLVIHQRTHTGEKPYQCSECGKAFSQKSLLTVHQRTHSGEKPHGCSECQKAFSRKSLLILHQRIHTGEKPYGCSECGKAFSRKSQLKRHQITHTIEKPYSCSECGKAFSQKLKLITHQRAHTGEKPYPCSHCGKAFFWKSQLITHQRTHTGKKPYGCGECQKAFSRNSLLIRHQRIHTGEKPYECNECGEAFIRKPQLIKHQITHTGEKNYRCSDCEEAFFKKSELIRHQKIHLGEKPYGCIQCGKTFFGKSQLLTHHRTHTGEKPYECSECGKAFTQKSSLISHQRTHTGEKPYECSECRKTFSEKSSLIHHQRTHTGEKPFECSECRKAFAWKPQLLRHQRIHTGEKPYECSECGKAFVQKVQLIKHQRNHTGEKTYGCSDCAKAFFEKAQLIIHQRIHTGERPYKCGECGKSFTRKSHLMRHQRIHTGDKYYGCNECGTTFNRKSQLMIHQRNHII

SEQ ID NO: 8465 - protein, 672 aa, Homo sapiens
MIQSQISFEDVAVDFTLEEWQLLNPTQKNLYRDVMLENYSNLVFLGFQILKPDAMFKLEQQDPWIIGQEILNQNFSEVWLDNPKMWLRDNQDNLKSMERGHKYDVFGKIFNSSINIVHVGLRSHKCGTGEKSLKCPFDLLIPKNNCERKKIDELNKKLLFCIKPGRTHGGIKYCDCSTCRKSSNEEPWLTANHITHTGVYLCMECGRFFNKKSQLVIHQRTHTGEKPYQCSECGKAFSQKSLLTVHQRTHSGEKPHGCSECQKAFSRKSLLILHQRIHTGEKPYGCSECGKAFSRKSQLKRHQITHTIEKPYSCSECGKAFSQKLKLITHQRAHTGEKPYPCSHCGKAFFWKSQLITHQRTHTGKKPYGCGECQKAFSRNSLLIRHQRIHTGEKPYECNECGEAFIRKPQLIKHQITHTGEKNYRCSDCEEAFFKKSELIRHQKIHLGEKPYGCIQCGKTFFGKSQLLTHHRTHTGEKPYECSECGKAFTQKSSLISHQRTHTGEKPYECSECRKTFSEKSSLIHHQRTHTGEKPFECSECRKAFAWKPQLLRHQRIHTGEKPYECSECGKAFVQKVQLIKHQRNHTGEKTYGCSDCAKAFFEKAQLIIHQRIHTGERPYKCGECGKSFTRKSHLMRHQRIHTGDKYYGCNECGTTFNRKSQLMIHQRNHII

SEQ ID NO: 8466 - protein, 417 aa, Homo sapiens
MSQDSVTFADVAVNFTKEEWTLLDPAQRNLYRDVMLENSRNLAFIDWATPCKTKDATPQPDILPKRTFPEANRVCLTSISSQHSTLREDWRCPKTEEPHRQGVNNVKPPAVAPEKDESPVSICEDHEMRNHSKPTCRLVPSQGDSIRQCILTRDSSIFKYNPVLNDSQKTHENNEDDGVLGWNIQWVPCGRKTELKSSTWTGSQNTVHHIRDEIDTGANRHQRNPFGKAFREDGSLRAHNTHGREKMYDFTQCENTSRNNSIHAMQMQLYTAETNKKDCQTGATSANAPNSGSHKSHCTGEKTHKCPECGRAFFYQSFLMRHMKIHTGEKPYECGKCGKAFRYSLHLNKHLRKHVVQKKPYECEECGKVIRESSKYTHIRSHTGEKPYKCKTCGKDFAKSSGLKKHLKTHKDEKPCE

SEQ ID NO: 8467 - protein, 383 aa, Homo sapiens
MLENSRNLAFIDWATPCKTKDATPQPDILPKRTFPEANRVCLTSISSQHSTLREDWRCPKTEEPHRQGVNNVKPPAVAPEKDESPVSICEDHEMRNHSKPTCRLVPSQGDSIRQCILTRDSSIFKYNPVLNDSQKTHENNEDDGVLGWNIQWVPCGRKTELKSSTWTGSQNTVHHIRDEIDTGANRHQRNPFGKAFREDGSLRAHNTHGREKMYDFTQCENTSRNNSIHAMQMQLYTAETNKKDCQTGATSANAPNSGSHKSHCTGEKTHKCPECGRAFFYQSFLMRHMKIHTGEKPYECGKCGKAFRYSLHLNKHLRKHVVQKKPYECEECGKVIRESSKYTHIRSHTGEKPYKCKTCGKDFAKSSGLKKHLKTHKDEKPCE

SEQ ID NO: 8468 - protein, 1978 aa, Homo sapiens
MSRPRFNPRGDFPLQRPRAPNPSGMRPPGPFMRPGSMGLPRFYPAGRARGIPHRFAGHESYQNMGPQRMNVQVTQHRTDPRLTKEKLDFHEAQQKKGKPHGSRWDDEPHISASVAVKQSSVTQVTEQSPKVQSRYTKESASSILASFGLSNEDLEELSRYPDEQLTPENMPLILRDIRMRKMGRRLPNLPSQSRNKETLGSEAVSSNVIDYGHASKYGYTEDPLEVRIYDPEIPTDEVENEFQSQQNISASVPNPNVICNSMFPVEDVFRQMDFPGESSNNRSFFSVESGTKMSGLHISGGQSVLEPIKSVNQSINQTVSQTMSQSLIPPSMNQQPFSSELISSVSQQERIPHEPVINSSNVHVGSRGSKKNYQSQADIPIRSPFGIVKASWLPKFSHADAQKMKRLPTPSMMNDYYAASPRIFPHLCSLCNVECSHLKDWIQHQNTSTHIESCRQLRQQYPDWNPEILPSRRNEGNRKENETPRRRSHSPSPRRSRRSSSSHRFRRSRSPMHYMYRPRSRSPRICHRFISRYRSRSRSRSPYRIRNPFRGSPKCFRSVSPERMSRRSVRSSDRKKALEDVVQRSGHGTEFNKQKHLEAADKGHSPAQKPKTSSGTKPSVKPTSATKSDSNLGGHSIRCKSKNLEDDTLSECKQVSDKAVSLQRKLRKEQSLHYGSVLLITELPEDGCTEEDVRKLFQPFGKVNDVLIVPYRKEAYLEMEFKEAITAIMKYIETTPLTIKGKSVKICVPGKKKAQNKEVKKKTLESKKVSASTLKRDADASKAVEIVTSTSAAKTGQAKASVAKVNKSTGKSASSVKSVVTVAVKGNKASIKTAKSGGKKSLEAKKTGNVKNKDSNKPVTIPENSEIKTSIEVKATENCAKEAISDAALEATENEPLNKETEEMCVMLVSNLPNKGYSVEEVYDLAKPFGGLKDILILSSHKKAYIEINRKAAESMVKFYTCFPVLMDGNQLSISMAPENMNIKDEEAIFITLVKENDPEANIDTIYDRFVHLDNLPEDGLQCVLCVGLQFGKVDHHVFISNRNKAILQLDSPESAQSMYSFLKQNPQNIGDHMLTCSLSPKIDLPEVQIEHDPELEKESPGLKNSPIDESEVQTATDSPSVKPNELEEESTPSIQTETLVQQEEPCEEEAEKATCDSDFAVETLELETQGEEVKEEIPLVASASVSIEQFTENAEECALNQQMFNSDLEKKGAEIINPKTALLPSDSVFAEERNLKGILEESPSEAEDFISGITQTMVEAVAEVEKNETVSEILPSTCIVTLVPGIPTGDEKTVDKKNISEKKGNMDEKEEKEFNTKETRMDLQIGTEKAEKNEGRMDAEKVEKMAAMKEKPAENTLFKAYPNKGVGQANKPDETSKTSILAVSDVSSSKPSIKAVIVSSPKAKATVSKTENQKSFPKSVPRDQINAEKKLSAKEFGLLKPTSARSGLAESSSKFKPTQSSLTRGGSGRISALQGKLSKLDYRDITKQSQETEARPSIMKRDDSNNKTLAEQNTKNPKSTTGRSSKSKEEPLFPFNLDEFVTVDEVIEEVNPSQAKQNPLKGKRKETLKNVPFSELNLKKKKGKTSTPRGVEGELSFVTLDEIGEEEDAAAHLAQALVTVDEVIDEEELNMEEMVKNSNSLFTLDELIDQDDCISHSEPKDVTVLSVAEEQDLLKQERLVTVDEIGEVEELPLNESADITFATLNTKGNEGDTVRDSIGFISSQVPEDPSTLVTVDEIQDDSSDLHLVTLDEVTEEDEDSLADFNNLKEELNFVTVDEVGEEEDGDNDLKVELAQSKNDHPTDKKGNRKKRAVDTKKTKLESLSQVGPVNENVMEEDLKTMIERHLTAKTPTKRVRIGKTLPSEKAVVTEPAKGEEAFQMSEVDEESGLKDSEPERKRKKTEDSSSGKSVASDVPEELDFLVPKAGFFCPICSLFYSGEKAMTNHCKSTRHKQNTEKFMAKQRKEKEQNEAEERSSR

SEQ ID NO: 8469 - protein, 814 aa, Homo sapiens
MSRPRFNPRGDFPLQRPRAPNPSGMRPPGPFMRPGSMGLPRFYPAGRARGIPHRFAGHESYQNMGPQRMNVQVTQHRTDPRLTKEKLDFHEAQQKKGKPHGSRWDDEPHISASVAVKQSSVTQVTEQSPKVQSRYTKESASSILASFGLSNEDLEELSRYPDEQLTPENMPLILRDIRMRKMGRRLPNLPSQSRNKETLGSEAVSSNVIDYGHASKYGYTEDPLEVRIYDPEIPTDEVENEFQSQQNISASVPNPNVICNSMFPVEDVFRQMDFPGESSNNRSFFSVESGTKMSGLHISGGQSVLEPIKSVNQSINQTVSQTMSQSLIPPSMNQQPFSSELISSVSQQERIPHEPVINSSNVHVGSRGSKKNYQSQADIPIRSPFGIVKASWLPKFSHADAQKMKRLPTPSMMNDYYAASPRIFPHLCSLCNVECSHLKDWIQHQNTSTHIESCRQLRQQYPDWNPEILPSRRNEGNRKENETPRRRSHSPSPRRSRRSSSSHRFRRSRSPMHYMYRPRSRSPRICHRFISRYRSRSRSRSPYRIRNPFRGSPKCFRSVSPERMSRRSVRSSDRKKALEDVVQRSGHGTEFNKQKHLEAADKGHSPAQKPKTSSGTKPSVKPTSATKSDSNLGGHSIRCKSKNLEDDTLSECKQVSDKAVSLQRKLRKEQSLHYGSVLLITELPEDGCTEEDVRKLFQPFGKVNDVLIVPYRKEAYLEMEFKEAITAIMKYIETTPLTIKGKSVKICVPGKKKAQNKEVKKKTLESKKVSASTLKRDADASKAVEIVTSTSAGLLPTGGGNNYPQIVLAPGLCH

SEQ ID NO: 8470 - protein, 1957 aa, Homo sapiens
MSRPRFNPRGDFPLQRPRAPNPSGMRPPGPFMRPGSMGLPRFYPAGRARGIPHRFAGHESYQNMGPQRMNVQVTQHRTDPRLTKEKLDFHEAQQKKGKPHGSRWDDEPHISASVAVKQSSVTQVTEQSPKVQSRYTKESASSILASFGLSNEDLEELSRYPDEQLTPENMPLILRDIRMRKMGRRLPNLPSQSRNKETLGSEAVSSNVIDYGHASKYGYTEDPLEVRIYDPEIPTDEVENEFQSQQNISASVPNPNVICNSMFPVEDVFRQMDFPGESSNNRSFFSVESGTKMSGLHISGGQSVLEPIKSVNQSINQTVSQTMSQSLIPPSMNQQPFSSELISSVSQQERIPHEPVINSSNVHVGSRGSKKNYQSQADIPIRSPFGIVKASWLPKFSHADAQKMKRLPTPSMMNDYYAASPRIFPHLCSLCNVECSHLKDWIQHQNTSTHIESCRQLRQQYPDWNPEILPSRRNEGNRKENETPRRRSHSPSPRRSRRSSSSHRFRRSRSPMHYMYRPRSRSPRICHRFISRYRSRSRSRSPYRIRNPFRGSPKCFRSVSPERMSRRSVRSSDRKKALEDVVQRSGHGTEFNKQKHLEAADKGHSPAQKPKTSSGTKPSVKPTSATKSDSNLGGHSIRCKSKNLEDDTLSECKQVSDKAVSLQRKLRKEQSLHYGSVLLITELPEDGCTEEDVRKLFQPFGKVNDVLIVPYRKEAYLEMEFKEAITAIMKYIETTPLTIKGKSVKICVPGKKKAQNKEVKKKTLESKKVSASTLKRDADASKAVEIVTSTSAAKTGQAKASVAKVNKSTGKSASSVKSVVTVAVKGNKASIKTAKSGGKKSLEAKKTGNVKNKDSNKPVTIPENSEIKTSIEVKATENCAKEAISDAALEATENEPLNKETEEMCVMLVSNLPNKGYSVEEVYDLAKPFGGLKDILILSSHKKAYIEINRKAAESMVKFYTCFPVLMDGNQLSISMAPENMNIKDEEAIFITLVKENDPEANIDTIYDRFVHLDNLPEDGLQCVLCVGLQFGKVDHHVFISNRNKAILQLDSPESAQSMYSFLKQNPQNIGDHMLTCSLSPKIDLPEVQIEHDPELEKESPGLKNSPIDESEVQTATDSPSVKPNELEEESTPSIQTETLVQQEEPCEEEAEKATCDSDFAVETLELETQGEEVKEEIPLVASASVSIEQFTENAEECALNQQMFNSDLEKKGAEIINPKTALLPSDSVFAEERNLKGILEESPSEAEDFISGITQTMVEAVAEVEKNETVSEILPSTCIVTLVPGIPTGDEKTVDKKNISEKKGNMDEKEEKEFNTKETRMDLQIGTEKAEKNEGRMDAEKVEKMAAMKEKPAENTLFKAYPNKGVGQANKPDETSKTSILAVSDVSSSKPSIKAVIVSSPKAKATVSKTENQKSFPKSVPRDQINAEKKLSAKEFGLLKPTSARSGLAESSSKFKPTQSSLTRGGSGRISALQGKLSKLDYRDITKQSQETEARPSIMKRDDSNNKTLAEQNTKNPKSTTGRSSKSKEEPLFPFNLDEFVTVDEVIEEVNPSQAKQNPLKGKRKETLKNVPFSELNLKKKKGKTSTPRGVEGELSFVTLDEIGEEEDAAAHLAQALVTVDEVIDEEELNMEEMVKNSNSLFTLDELIDQDDCISHSEPKDVTVLSVAEEQDLLKQERLVTVDEIGEVEELPLNESADITFATLNTKGNEGDTVRDSIGFISSQVPEDPSTLVTVDEIQDDSSDLHLVTLDEVTEEDEDSLADFNNLKEELNFVTVDEVGEEEDGDNDLKVELAQSKNDHPTDKKGNRKKRAVDTKKTKLESLSQVGPVNENVMEEDLKTMIERHLTAKTPTKRVRIGKTLPSEKAVVTEPAKGEEAFQMSEVDEESGLKDSEPERKRKKTEDSSSGKSVASDVPEGEKAMTNHCKSTRHKQNTEKFMAKQRKEKEQNEAEERSSR

SEQ ID NO: 8471 - protein, 1139 aa, Homo sapiens
MSRPRFNPRGDFPLQRPRAPNPSGMRPPGPFMRPGSMGLPRFYPAGRARGIPHRFAGHESYQNMGPQRMNVQVTQHRTDPRLTKEKLDFHEAQQKKGKPHGSRWDDEPHISASVAVKQSSVTQVTEQSPKVQSRYTKESASSILASFGLSNEDLEELSRYPDEQLTPENMPLILRDIRMRKMGRRLPNLPSQSRNKETLGSEAVSSNVIDYGHASKYGYTEDPLEVRIYDPEIPTDEVENEFQSQQNISASVPNPNVICNSMFPVEDVFRQMDFPGESSNNRSFFSVESGTKMSGLHISGGQSVLEPIKSVNQSINQTVSQTMSQSLIPPSMNQQPFSSELISSVSQQERIPHEPVINSSNVHVGSRGSKKNYQSQADIPIRSPFGIVKASWLPKFSHADAQKMKRLPTPSMMNDYYAASPRIFPHLCSLCNVECSHLKDWIQHQNTSTHIESCRQLRQQYPDWNPEILPSRRNEGNRKENETPRRRSHSPSPRRSRRSSSSHRFRRSRSPMHYMYRPRSRSPRICHRFISRYRSRSRSRSPYRIRNPFRGSPKCFRSVSPERMSRRSVRSSDRKKALEDVVQRSGHGTEFNKQKHLEAADKGHSPAQKPKTSSGTKPSVKPTSATKSDSNLGGHSIRCKSKNLEDDTLSECKQVSDKAVSLQRKLRKEQSLHYGSVLLITELPEDGCTEEDVRKLFQPFGKVNDVLIVPYRKEAYLEMEFKEAITAIMKYIETTPLTIKGKSVKICVPGKKKAQNKEVKKKTLESKKVSASTLKRDADASKAVEIVTSTSAAKTGQAKASVAKVNKSTGKSASSVKSVVTVAVKGNKASIKTAKSGGKKSLEAKKTGNVKNKDSNKPVTIPENSEIKTSIEVKATENCAKEAISDAALEATENEPLNKETEEMCVMLVSNLPNKGYSVEEVYDLAKPFGGLKDILILSSHKKAYIEINRKAAESMVKFYTCFPVLMDGNQLSISMAPENMNIKDEEAIFITLVKENDPEANIDTIYDRFVHLDNLPEDGLQCVLCVGLQFGKVDHHVFISNRNKAILQLDSPESAQSMYSFLKQNPQNIGDHMLTCSLSPKIDLPEVQIEHDPELEKERLWLSKTLRILKALLVEVPNLKRSHYFHLIWMNLLLWMRL

SEQ ID NO: 8472 - protein, 1075 aa, Homo sapiens
MCVMLVSNLPNKGYSVEEVYDLAKPFGGLKDILILSSHKKAYIEINRKAAESMVKFYTCFPVLMDGNQLSISMAPENMNIKDEEAIFITLVKENDPEANIDTIYDRFVHLDNLPEDGLQCVLCVGLQFGKVDHHVFISNRNKAILQLDSPESAQSMYSFLKQNPQNIGDHMLTCSLSPKIDLPEVQIEHDPELEKESPGLKNSPIDESEVQTATDSPSVKPNELEEESTPSIQTETLVQQEEPCEEEAEKATCDSDFAVETLELETQGEEVKEEIPLVASASVSIEQFTENAEECALNQQMFNSDLEKKGAEIINPKTALLPSDSVFAEERNLKGILEESPSEAEDFISGITQTMVEAVAEVEKNETVSEILPSTCIVTLVPGIPTGDEKTVDKKNISEKKGNMDEKEEKEFNTKETRMDLQIGTEKAEKNEGRMDAEKVEKMAAMKEKPAENTLFKAYPNKGVGQANKPDETSKTSILAVSDVSSSKPSIKAVIVSSPKAKATVSKTENQKSFPKSVPRDQINAEKKLSAKEFGLLKPTSARSGLAESSSKFKPTQSSLTRGGSGRISALQGKLSKLDYRDITKQSQETEARPSIMKRDDSNNKTLAEQNTKNPKSTTGRSSKSKEEPLFPFNLDEFVTVDEVIEEVNPSQAKQNPLKGKRKETLKNVPFSELNLKKKKGKTSTPRGVEGELSFVTLDEIGEEEDAAAHLAQALVTVDEVIDEEELNMEEMVKNSNSLFTLDELIDQDDCISHSEPKDVTVLSVAEEQDLLKQERLVTVDEIGEVEELPLNESADITFATLNTKGNEGDTVRDSIGFISSQVPEDPSTLVTVDEIQDDSSDLHLVTLDEVTEEDEDSLADFNNLKEELNFVTVDEVGEEEDGDNDLKVELAQSKNDHPTDKKGNRKKRAVDTKKTKLESLSQVGPVNENVMEEDLKTMIERHLTAKTPTKRVRIGKTLPSEKAVVTEPAKGEEAFQMSEVDEESGLKDSEPERKRKKTEDSSSGKSVASDVPEELDFLVPKAGFFCPICSLFYSGEKAMTNHCKSTRHKQNTEKFMAKQRKEKEQNEAEERSSR

SEQ ID NO: 8473 - protein, 918 aa, Homo sapiens
MSRPRFNPRGDFPLQRPRAPNPSGMRPPGPFMRPGSMGLPRFYPAGRARGIPHRFAGHESYQNMGPQRMNVQVTQHRTDPRLTKEKLDFHEAQQKKGKPHGSRWDDEPHISASVAVKQSSVTQVTEQSPKVQSRYTKESASSILASFGLSNEDLEELSRYPDEQLTPENMPLILRDIRMRKMGRRLPNLPSQSRNKETLGSEAVSSNVIDYGHASKYGYTEDPLEVRIYDPEIPTDEVENEFQSQQNISASVPNPNVICNSMFPVEDVFRQMDFPGESSNNRSFFSVESGTKMSGLHISGGQSVLEPIKSVNQSINQTVSQTMSQSLIPPSMNQQPFSSELISSVSQQERIPHEPVINSSNVHVGSRGSKKNYQSQADIPIRSPFGIVKASWLPKFSHADAQKMKRLPTPSMMNDYYAASPRIFPHLCSLCNVECSHLKDWIQHQNTSTHIESCRQLRQQYPDWNPEILPSRRNEGNRKENETPRRRSHSPSPRRSRRSSSSHRFRRSRSPMHYMYRPRSRSPRICHRFISRYRSRSRSRSPYRIRNPFRGSPKCFRSVSPERMSRRSVRSSDRKKALEDVVQRSGHGTEFNKQKHLEAADKGHSPAQKPKTSSGTKPSVKPTSATKSDSNLGGHSIRCKSKNLEDDTLSECKQVSDKAVSLQRKLRKEQSLHYGSVLLITELPEDGCTEEDVRKLFQPFGKVNDVLIVPYRKEAYLEMEFKEAITAIMKYIETTPLTIKGKSVKICVPGKKKAQNKEVKKKTLESKKVSASTLKRDADASKAVEIVTSTSAESVDQTQQLVPLVRNTARDHDGTPENEGEETVQSALFGFQYDASDHTMAWLGPNTVPEVKEMILQDPQLQTTQLPQTTQAPDITWGMLKKTTYKAEQILLQTQKPFTPDNLFLALLSGDAKPEYEQ

SEQ ID NO: 8474 - protein, 457 aa, Homo sapiens
MSQGSVTFRDVAIDFSQEEWKWLQPAQRDLYRCVMLENYGHLVSLGLSISKPDVVSLLEQGKEPWLGKREVKRDLFSVSESSGEIKDFSPKNVIYDDSSQYLIMERILSQGPVYSSFKGGWKCKDHTEMLQENQGCIRKVTVSHQEALAQHMNISTVERPYGCHECGKTFGRRFSLVLHQRTHTGEKPYACKECGKTFSQISNLVKHQMIHTGKKPHECKDCNKTFSYLSFLIEHQRTHTGEKPYECTECGKAFSRASNLTRHQRIHIGKKQYICRKCGKAFSSGSELIRHQITHTGEKPYECIECGKAFRRFSHLTRHQSIHTTKTPYECNECRKAFRCHSFLIKHQRIHAGEKLYECDECGKVFTWHASLIQHTKSHTGEKPYACAECDKAFSRSFSLILHQRTHTGEKPYVCKVCNKSFSWSSNLAKHQRTHTLDNPYEYENSFNYHSFLTEHQ

SEQ ID NO: 8475 - protein, 354 aa, Homo sapiens
MERILSQGPVYSSFKGGWKCKDHTEMLQENQGCIRKVTVSHQEALAQHMNISTVERPYGCHECGKTFGRRFSLVLHQRTHTGEKPYACKECGKTFSQISNLVKHQMIHTGKKPHECKDCNKTFSYLSFLIEHQRTHTGEKPYECTECGKAFSRASNLTRHQRIHIGKKQYICRKCGKAFSSGSELIRHQITHTGEKPYECIECGKAFRRFSHLTRHQSIHTTKTPYECNECRKAFRCHSFLIKHQRIHAGEKLYECDECGKVFTWHASLIQHTKSHTGEKPYACAECDKAFSRSFSLILHQRTHTGEKPYVCKVCNKSFSWSSNLAKHQRTHTLDNPYEYENSFNYHSFLTEHQ

SEQ ID NO: 8476 - protein, 411 aa, Homo sapiens
MAKRPGSPGSREMGLLTFRDVVIEFSLEEWQCLDHAQQNLYRDVMLENYRNLVSLGIAVSKPDLITCLEQNKEPWNIKRNEMVTKHPVMCSHFTQDLPPELGIKDSLQKVIPRRYGKSGHDNLQVKTCKSMGECEVQKGGCNEVNQCLSTTQNKIFQTHKCVKVFGKFSNSNRHKTRHTGKKHFKCKKYGKSFCMVSQLHQHQIIHTRENSYQCEECGKPFNCSSTLSKHKRIHTGEKPYRCEECGKAFTWSSTLTKHRRIHTGEKPYTCEECGQAFSRSSTLANHKRIHTGEKPYTCEECGKAFSLSSSLTYHKRIHTGEKPYTCEECGKAFNCSSTLKKHKIIHTGEKPYKCKECGKAFAFSSTLNTHKRIHTGEEPYKCEECDKAFKWSSSLANHKSMHTGEKPYKCE

SEQ ID NO: 8477 - protein, 505 aa, Homo sapiens
MTKAQESLTLEDVAVDFTWEEWQFLSPAQKDLYRDVMLENYSNLVSVGYQAGKPDALTKLEQGEPLWTLEDEIHSPAHPEIEKADDHLQQPLQNQKILKRTGQRYEHGRTLKSYLGLTNQSRRYNRKEPAEFNGDGAFLHDNHEQMPTEIEFPESRKPISTKSQFLKHQQTHNIEKAHECTDCGKAFLKKSQLTEHKRIHTGKKPHVCSLCGKAFYKKYRLTEHERAHRGEKPHGCSLCGKAFYKRYRLTEHERAHKGEKPYGCSECGKAFPRKSELTEHQRIHTGIKPHQCSECGRAFSRKSLLVVHQRTHTGEKPHTCSECGKGFIQKGNLNIHQRTHTGEKPYGCIDCGKAFSQKSCLVAHQRYHTGKTPFVCPECGQPCSQKSGLIRHQKIHSGEKPYKCSDCGKAFLTKTMLIVHHRTHTGERPYGCDECEKAYFYMSCLVKHKRIHSREKRGDSVKVENPSTASHSLSPSEHVQGKSPVNMVTVAMVAGQCEFAHILHS

SEQ ID NO: 8478 - protein, 1190 aa, Homo sapiens
MPVRGDRGFPPRRELSGWLRAPGMEELIWEQYTVTLQKDSKRGFGIAVSGGRDNPHFENGETSIVISDVLPGGPADGLLQENDRVVMVNGTPMEDVLHSFAVQQLRKSGKVAAIVVKRPRKVQVAALQASPPLDQDDRAFEVMDEFDGRSFRSGYSERSRLNSHGGRSRSWEDSPERGRPHERARSRERDLSRDRSRGRSLERGLDQDHARTRDRSRGRSLERGLDHDFGPSRDRDRDRSRGRSIDQDYERAYHRAYDPDYERAYSPEYRRGARHDARSRGPRSRSREHPHSRSPSPEPRGRPGPIGVLLMKSRANEEYGLRLGSQIFVKEMTRTGLATKDGNLHEGDIILKINGTVTENMSLTDARKLIEKSRGKLQLVVLRDSQQTLINIPSLNDSDSEIEDISEIESNRSFSPEERRHQYSDYDYHSSSEKLKERPSSREDTPSRLSRMGATPTPFKSTGDIAGTVVPETNKEPRYQEDPPAPQPKAAPRTFLRPSPEDEAIYGPNTKMVRFKKGDSVGLRLAGGNDVGIFVAGIQEGTSAEQEGLQEGDQILKVNTQDFRGLVREDAVLYLLEIPKGEMVTILAQSRADVYRDILACGRGDSFFIRSHFECEKETPQSLAFTRGEVFRVVDTLYDGKLGNWLAVRIGNELEKGLIPNKSRAEQMASVQNAQRDNAGDRADFWRMRGQRSGVKKNLRKSREDLTAVVSVSTKFPAYERVLLREAGFKRPVVLFGPIADIAMEKLANELPDWFQTAKTEPKDAGSEKSTGVVRLNTVRQIIEQDKHALLDVTPKAVDLLNYTQWFPIVIFFNPDSRQGVKTMRQRLNPTSNKSSRKLFDQANKLKKTCAHLFTATINLNSANDSWFGSLKDTIQHQQGEAVWVSEGKMEGMDDDPEDRMSYLTAMGADYLSCDSRLISDFEDTDGEGGAYTDNELDEPAEEPLVSSITRSSEPVQHEESIRKPSPEPRAQMRRAASSDQLRDNSPPPAFKPEPPKAKTQNKEESYDFSKSYEYKSNPSAVAGNETPGASTKGYPPPVAAKPTFGRSILKPSTPIPPQEGEEVGESSEEQDNAPKSVLGKVKIFEKMDHKARLQRMQELQEAQNARIEIAQKHPDIYAVPIKTHKPDPGTPQHTSSRPPEPQKAPSRPYQDTRGSYGSDAEEEEYRQQLSEHSKRGYYGQSARYRDTEL

SEQ ID NO: 8479 - protein, 1043 aa, Homo sapiens
MPVRGDRGFPPRRELSGWLRAPGMEELIWEQYTVTLQKDSKRGFGIAVSGGRDNPHFENGETSIVISDVLPGGPADGLLQENDRVVMVNGTPMEDVLHSFAVQQLRKSGKVAAIVVKRPRKVQVAALQASPPLDQDDRAFEVMDEFDGRSFRSGYSERSRLNSHGGRSRSWEDSPERGRPHERARSRERDLSRDRSRGRSLERGLDQDHARTRDRSRGRSLERGLDHDFGPSRDRDRDRSRGRSIDQDYERAYHRAYDPDYERAYSPEYRRGARHDARSRGPRSRSREHPHSRSPSPEPRGRPGPIGVLLMKSRANEEYGLRLGSQIFVKEMTRTGLATKDGNLHEGDIILKINGTVTENMSLTDARKLIEKSRGKLQLVVLRDSQQTLINIPSLNDSDSEIEDISEIESNRSFSPEERRHQYSDYDYHSSSEKLKERPSSREDTPSRLSRMGATPTPFKSTGDIAGTVVPETNKEPRYQEDPPAPQPKAAPRTFLRPSPEDEAIYGPNTKMVRFKKGDSVGLRLAGGNDVGIFVAGIQEGTSAEQEGLQEGDQILKVNTQDFRGLVREDAVLYLLEIPKGEMVTILAQSRADVYRDILACGRGDSFFIRSHFECEKETPQSLAFTRGEVFRVVDTLYDGKLGNWLAVRIGNELEKGLIPNKSRAEQMASVQNAQRDNAGDRADFWRMRGQRSGVKKNLRKSREDLTAVVSVSTKFPAYERVLLREAGFKRPVVLFGPIADIAMEKLANELPDWFQTAKTEPKDAGSEKSTGVVRLNTVRQIIEQDKHALLDVTPKAVDLLNYTQWFPIVIFFNPDSRQGVKTMRQRLNPTSNKSSRKLFDQANKLKKTCAHLFTATINLNSANDSWFGSLKDTIQHQQGEAVWVSEGKMEGMDDDPEDRMSYLTAMGADYLSCDSRLISDFEDTDGEGGAYTDNELDEPAEEPLVSSITRSSEPVQHEEIEIAQKHPDIYAVPIKTHKPDPGTPQHTSSRPPEPQKAPSRPYQDTRGSYGSDAEEEEYRQQLSEHSKRGYYGQSARYRDTEL

SEQ ID NO: 8480 - protein, 993 aa, Homo sapiens
MPVRGDRGFPPRRELSGWLRAPGMEELIWEQYTVTLQKDSKRGFGIAVSGGRDNPHFENGETSIVISDVLPGGPADGLLQENDRVVMVNGTPMEDVLHSFAVQQLRKSGKVAAIVVKRPRKVQVAALQASPPLDQDDRAFEVMDEFDGRSFRSGYSERSRLNSHGGRSRSWEDSPERGRPHERARSRERDLSRDRSRGRSLERGLDQDHARTRDRSRGRSLERGLDHDFGPSRDRDRDRSRGRSIDQDYERAYHRAYDPDYERAYSPEYRRGARHDARSRGPRSRSREHPHSRSPSPEPRGRPGPIGVLLMKSRANEEYGLRLGSQIFVKEMTRTGLATKDGNLHEGDIILKINGTVTENMSLTDARKLIEKSRGKLQLVVLRDSQQTLINIPSLNDSDSEIEDISEIESNRSFSPEERRHQYSDYDYHSSSEKLKERPSSREDTPSRLSRMGATPTPFKSTGDIAGTVVPETNKEPRYQEDPPAPQPKAAPRTFLRPSPEDEAIYGPNTKMVRFKKGDSVGLRLAGGNDVGIFVAGIQEGTSAEQEGLQEGDQILKVNTQDFRGLVREDAVLYLLEIPKGEMVTILAQSRADVYRDILACGRGDSFFIRSHFECEKETPQSLAFTRGEVFRVVDTLYDGKLGNWLAVRIGNELEKGLIPNKSRAEQMASVQNAQRDNAGDRADFWRMRGQRSGVKKNLRKSREDLTAVVSVSTKFPAYERVLLREAGFKRPVVLFGPIADIAMEKLANELPDWFQTAKTEPKDAGSEKSTGVVRLNTVRQIIEQDKHALLDVTPKAVDLLNYTQWFPIVIFFNPDSRQGVKTMRQRLNPTSNKSSRKLFDQANKLKKTCAHLFTATINLNSANDSWFGSLKDTIQHQQGEAVWVSEGKMEGMDDDPEDRMSYLTAMGADYLSCDSRLISDFEDTDGEGGAYTDNELDEPAEEPLVSSITRSSEPVQHEEVRRGRPRAGTGEPGVFLALSWTAVCSGCCGRHS

SEQ ID NO: 8481 - protein, 1167 aa, Homo sapiens
MEELIWEQYTVTLQKDSKRGFGIAVSGGRDNPHFENGETSIVISDVLPGGPADGLLQENDRVVMVNGTPMEDVLHSFAVQQLRKSGKVAAIVVKRPRKVQVAALQASPPLDQDDRAFEVMDEFDGRSFRSGYSERSRLNSHGGRSRSWEDSPERGRPHERARSRERDLSRDRSRGRSLERGLDQDHARTRDRSRGRSLERGLDHDFGPSRDRDRDRSRGRSIDQDYERAYHRAYDPDYERAYSPEYRRGARHDARSRGPRSRSREHPHSRSPSPEPRGRPGPIGVLLMKSRANEEYGLRLGSQIFVKEMTRTGLATKDGNLHEGDIILKINGTVTENMSLTDARKLIEKSRGKLQLVVLRDSQQTLINIPSLNDSDSEIEDISEIESNRSFSPEERRHQYSDYDYHSSSEKLKERPSSREDTPSRLSRMGATPTPFKSTGDIAGTVVPETNKEPRYQEDPPAPQPKAAPRTFLRPSPEDEAIYGPNTKMVRFKKGDSVGLRLAGGNDVGIFVAGIQEGTSAEQEGLQEGDQILKVNTQDFRGLVREDAVLYLLEIPKGEMVTILAQSRADVYRDILACGRGDSFFIRSHFECEKETPQSLAFTRGEVFRVVDTLYDGKLGNWLAVRIGNELEKGLIPNKSRAEQMASVQNAQRDNAGDRADFWRMRGQRSGVKKNLRKSREDLTAVVSVSTKFPAYERVLLREAGFKRPVVLFGPIADIAMEKLANELPDWFQTAKTEPKDAGSEKSTGVVRLNTVRQIIEQDKHALLDVTPKAVDLLNYTQWFPIVIFFNPDSRQGVKTMRQRLNPTSNKSSRKLFDQANKLKKTCAHLFTATINLNSANDSWFGSLKDTIQHQQGEAVWVSEGKMEGMDDDPEDRMSYLTAMGADYLSCDSRLISDFEDTDGEGGAYTDNELDEPAEEPLVSSITRSSEPVQHEESIRKPSPEPRAQMRRAASSDQLRDNSPPPAFKPEPPKAKTQNKEESYDFSKSYEYKSNPSAVAGNETPGASTKGYPPPVAAKPTFGRSILKPSTPIPPQEGEEVGESSEEQDNAPKSVLGKVKIFEKMDHKARLQRMQELQEAQNARIEIAQKHPDIYAVPIKTHKPDPGTPQHTSSRPPEPQKAPSRPYQDTRGSYGSDAEEEEYRQQLSEHSKRGYYGQSARYRDTEL

SEQ ID NO: 8482 - protein, 1020 aa, Homo sapiens
MEELIWEQYTVTLQKDSKRGFGIAVSGGRDNPHFENGETSIVISDVLPGGPADGLLQENDRVVMVNGTPMEDVLHSFAVQQLRKSGKVAAIVVKRPRKVQVAALQASPPLDQDDRAFEVMDEFDGRSFRSGYSERSRLNSHGGRSRSWEDSPERGRPHERARSRERDLSRDRSRGRSLERGLDQDHARTRDRSRGRSLERGLDHDFGPSRDRDRDRSRGRSIDQDYERAYHRAYDPDYERAYSPEYRRGARHDARSRGPRSRSREHPHSRSPSPEPRGRPGPIGVLLMKSRANEEYGLRLGSQIFVKEMTRTGLATKDGNLHEGDIILKINGTVTENMSLTDARKLIEKSRGKLQLVVLRDSQQTLINIPSLNDSDSEIEDISEIESNRSFSPEERRHQYSDYDYHSSSEKLKERPSSREDTPSRLSRMGATPTPFKSTGDIAGTVVPETNKEPRYQEDPPAPQPKAAPRTFLRPSPEDEAIYGPNTKMVRFKKGDSVGLRLAGGNDVGIFVAGIQEGTSAEQEGLQEGDQILKVNTQDFRGLVREDAVLYLLEIPKGEMVTILAQSRADVYRDILACGRGDSFFIRSHFECEKETPQSLAFTRGEVFRVVDTLYDGKLGNWLAVRIGNELEKGLIPNKSRAEQMASVQNAQRDNAGDRADFWRMRGQRSGVKKNLRKSREDLTAVVSVSTKFPAYERVLLREAGFKRPVVLFGPIADIAMEKLANELPDWFQTAKTEPKDAGSEKSTGVVRLNTVRQIIEQDKHALLDVTPKAVDLLNYTQWFPIVIFFNPDSRQGVKTMRQRLNPTSNKSSRKLFDQANKLKKTCAHLFTATINLNSANDSWFGSLKDTIQHQQGEAVWVSEGKMEGMDDDPEDRMSYLTAMGADYLSCDSRLISDFEDTDGEGGAYTDNELDEPAEEPLVSSITRSSEPVQHEEIEIAQKHPDIYAVPIKTHKPDPGTPQHTSSRPPEPQKAPSRPYQDTRGSYGSDAEEEEYRQQLSEHSKRGYYGQSARYRDTEL

SEQ ID NO: 8483 - protein, 1157 aa, Homo sapiens
MKTAQALHRMWIQAVKKLRRWKGRAPGMEELIWEQYTVTLQKDSKRGFGIAVSGGRDNPHFENGETSIVISDVLPGGPADGLLQENDRVVMVNGTPMEDVLHSFAVQQLRKSGKVAAIVVKRPRKVQVAALQASPPLDQDDRAFEVMDEFDGRSFRSGYSERSRLNSHGGRSRSWEDSPERGRPHERARSRERDLSRDRSRGRSLERGLDQDHARTRDRSRGRSLERGLDHDFGPSRDRDRDRSRGRSIDQDYERAYHRAYDPDYERAYSPEYRRGARHDARSRGPRSRSREHPHSRSPSPEPRGRPGPIGVLLMKSRANEEYGLRLGSQIFVKEMTRTGLATKDGNLHEGDIILKINGTVTENMSLTDARKLIEKSRGKLQLVVLRDSQQTLINIPSLNDSDSEIEDISEIESNRSFSPEERRHQYSDYDYHSSSEKLKERPSSREDTPSRLSRMGATPTPFKSTGDIAGTVVPETNKEPRYQEDPPAPQPKAAPRTFLRPSPEDEAIYGPNTKMVRFKKGDSVGLRLAGGNDVGIFVAGIQEGTSAEQEGLQEGDQILKVNTQDFRGLVREDAVLYLLEIPKGEMVTILAQSRADVYRDILACGRGDSFFIRSHFECEKETPQSLAFTRGEVFRVVDTLYDGKLGNWLAVRIGNELEKGLIPNKSRAEQMASVQNAQRDNAGDRADFWRMRGQRSGVKKNLRKSREDLTAVVSVSTKFPAYERVLLREAGFKRPVVLFGPIADIAMEKLANELPDWFQTAKTEPKDAGSEKSTGVVRLNTVRQIIEQDKHALLDVTPKAVDLLNYTQWFPIVIFFNPDSRQGVKTMRQRLNPTSNKSSRKLFDQANKLKKTCAHLFTATINLNSANDSWFGSLKDTIQHQQGEAVWVSEGKMEGMDDDPEDRMSYLTAMGADYLSCDSRLISDFEDTDGEGGAYTDNELDEPAEEPLVSSITRSSEPVQHEEAKTQNKEESYDFSKSYEYKSNPSAVAGNETPGASTKGYPPPVAAKPTFGRSILKPSTPIPPQEGEEVGESSEEQDNAPKSVLGKVKIFEKMDHKARLQRMQELQEAQNARIEIAQKHPDIYAVPIKTHKPDPGTPQHTSSRPPEPQKAPSRPYQDTRGSYGSDAEEEEYRQQLSEHSKRGYYGQSARYRDTEL

SEQ ID NO: 8484 - protein, 1221 aa, Homo sapiens
MKTAQALHRMWIQAVKKLRRWKGRVSPSASSPLVFPNLSSWEGEGSKTILTAPGMEELIWEQYTVTLQKDSKRGFGIAVSGGRDNPHFENGETSIVISDVLPGGPADGLLQENDRVVMVNGTPMEDVLHSFAVQQLRKSGKVAAIVVKRPRKVQVAALQASPPLDQDDRAFEVMDEFDGRSFRSGYSERSRLNSHGGRSRSWEDSPERGRPHERARSRERDLSRDRSRGRSLERGLDQDHARTRDRSRGRSLERGLDHDFGPSRDRDRDRSRGRSIDQDYERAYHRAYDPDYERAYSPEYRRGARHDARSRGPRSRSREHPHSRSPSPEPRGRPGPIGVLLMKSRANEEYGLRLGSQIFVKEMTRTGLATKDGNLHEGDIILKINGTVTENMSLTDARKLIEKSRGKLQLVVLRDSQQTLINIPSLNDSDSEIEDISEIESNRSFSPEERRHQYSDYDYHSSSEKLKERPSSREDTPSRLSRMGATPTPFKSTGDIAGTVVPETNKEPRYQEDPPAPQPKAAPRTFLRPSPEDEAIYGPNTKMVRFKKGDSVGLRLAGGNDVGIFVAGIQEGTSAEQEGLQEGDQILKVNTQDFRGLVREDAVLYLLEIPKGEMVTILAQSRADVYRDILACGRGDSFFIRSHFECEKETPQSLAFTRGEVFRVVDTLYDGKLGNWLAVRIGNELEKGLIPNKSRAEQMASVQNAQRDNAGDRADFWRMRGQRSGVKKNLRKSREDLTAVVSVSTKFPAYERVLLREAGFKRPVVLFGPIADIAMEKLANELPDWFQTAKTEPKDAGSEKSTGVVRLNTVRQIIEQDKHALLDVTPKAVDLLNYTQWFPIVIFFNPDSRQGVKTMRQRLNPTSNKSSRKLFDQANKLKKTCAHLFTATINLNSANDSWFGSLKDTIQHQQGEAVWVSEGKMEGMDDDPEDRMSYLTAMGADYLSCDSRLISDFEDTDGEGGAYTDNELDEPAEEPLVSSITRSSEPVQHEESIRKPSPEPRAQMRRAASSDQLRDNSPPPAFKPEPPKAKTQNKEESYDFSKSYEYKSNPSAVAGNETPGASTKGYPPPVAAKPTFGRSILKPSTPIPPQEGEEVGESSEEQDNAPKSVLGKVKIFEKMDHKARLQRMQELQEAQNARIEIAQKHPDIYAVPIKTHKPDPGTPQHTSSRPPEPQKAPSRPYQDTRGSYGSDAEEEEYRQQLSEHSKRGYYGQSARYRDTEL

SEQ ID NO: 8485 - protein, 338 aa, Homo sapiens
MMRTCVLLSAVLWCLTGVQCPRFTLFNKKGFIYGKTGQPDKIYVELHQNSPVLICMDFKLSKKEIVDPTYLWIGPNEKTLTGNNRINITETGQLMVKDFLEPLSGLYTCTLSYKTVKAETQEEKTVKKRYDFMVFAYREPDYSYQMAVRFTTRSCIGRYNDVFFRVLKKILDSLISDLSCHVIEPSYKCHSVEIPEHGLIHELFIAFQVNPFAPGWKGACNGSVDCEDTTNHNILQARDRIEDFFRSQAYIFYHNFNKTLPAMHFVDHSLQVVRLDSCRPGFGKNERLHSNCASCCVVCSPATFSPDVNVTCQTCVSVLTYGAKSCPQTSNKNQQYED

SEQ ID NO: 8486 - protein, 316 aa, Homo sapiens
MMRTCVLLSAVLWCLTGDKIYVELHQNSPVLICMDFKLSKKEIVDPTYLWIGPNEKTLTGNNRINITETGQLMVKDFLEPLSGLYTCTLSYKTVKAETQEEKTVKKRYDFMVFAYREPDYSYQMAVRFTTRSCIGRYNDVFFRVLKKILDSLISDLSCHVIEPSYKCHSVEIPEHGLIHELFIAFQVNPFAPGWKGACNGSVDCEDTTNHNILQARDRIEDFFRSQAYIFYHNFNKTLPAMHFVDHSLQVVRLDSCRPGFGKNERLHSNCASCCVVCSPATFSPDVNVTCQTCVSVLTYGAKSCPQTSNKNQQYED

SEQ ID NO: 8487 - protein, 330 aa, Homo sapiens
MSTKNFRVSDGDWICPDKKCGNVNFARRTSCNRCGREKTTEAKMMKAGGTEIGKTLAEKSRGLFSANDWQCKTCSNVNWARRSECNMCNTPKYAKLEERTGYGGGFNERENVEYIEREESDGEYDEFGRKKKKYRGKAVGPASILKEVEDKESEGEEEDEDEDLSKYKLDEDEDEDDADLSKYNLDASEEEDSNKKKSNRRSRSKSRSSHSRSSSRSSSPSSSRSRSRSRSRSSSSSQSRSRSSSRERSRSRGSKSRSSSRSHRGSSSPRKRSYSSSSSSPERNRKRSRSRSSSSGDRKKRRTRSRSPERRHRSSSGSSHSGSRSSSKKK

SEQ ID NO: 8488 - protein, 320 aa, Homo sapiens
MSTKNFRVSDGDWICPDKKCGNVNFARRTSCNRCGREKTTEAKMMKAGGTEIGKTLAEKSRGLFSANDWQCKTCSNVNWARRSECNMCNTPKYAKLEERTGYGGGFNERENVEYIEREESDGEYDEFGRKKKKYRGKAVGPASILKEVEDKESEGEEEDEDEDLSKYKLDEDEDEDDADLSKYNLDASEEEDSNKKKSNRRSRSKSRSSHSRSSSRSSSPSSSRSRSRSRSRSSSSSQSRSRSSSRERSRSRGSKSRSSSRSHRGSSSPRKRSYSSSSSSPERNRKRSRSRSSSSGDRKKRRTRSRSPESQVIGENTKQP

SEQ ID NO: 8489 - protein, 369 aa, Homo sapiens
MEFLERTYLVNDKAAKMYAFTLESVELQQKPVNKDQCPRERPEELESGGMYHCHSGSKPTEKGANEYAYAKWKLCSASAICFIFMIAEVVGGHIAGSLAVVTDAAHLLIDLTSFLLSLFSLWLSSKPPSKRLTFGWHRAEILGALLSILCIWVVTGVLVYLACERLLYPDYQIQATVMIIVSSCAVAANIVLTVVLHQRCLGHNHKEVQANASVRAAFVHALGDLFQSISVLISALIIYFKPEYKIADPICTFIFSILVLASTITILKDFSILLMEGVPKSLNYSGVKELILAVDGVLSVHSLHIWSLTMNQVILSAHVATAASRDSQVVRREIAKALSKSFTMHSLTIQMESPVDQDPDCLFCEDPCD

SEQ ID NO: 8490 - protein, 320 aa, Homo sapiens
MYHCHSGSKPTEKGANEYAYAKWKLCSASAICFIFMIAEVVGGHIAGSLAVVTDAAHLLIDLTSFLLSLFSLWLSSKPPSKRLTFGWHRAEILGALLSILCIWVVTGVLVYLACERLLYPDYQIQATVMIIVSSCAVAANIVLTVVLHQRCLGHNHKEVQANASVRAAFVHALGDLFQSISVLISALIIYFKPEYKIADPICTFIFSILVLASTITILKDFSILLMEGVPKSLNYSGVKELILAVDGVLSVHSLHIWSLTMNQVILSAHVATAASRDSQVVRREIAKALSKSFTMHSLTIQMESPVDQDPDCLFCEDPCD

SEQ ID NO: 8491 - protein, 491 aa, Homo sapiens
MAIPKHSLSPVPWEEDSFLQVKVEEEEEASLSQGGESSHDHIAHSEAARLRFRHFRYEEASGPHEALAHLRALCCQWLQPEAHSKEQILELLVLEQFLGALPPEIQAWVGAQSPKSGEEAAVLVEDLTQVLDKRGWDPGAEPTEASCKQSDLGESEPSNVTETLMGGVSLGPAFVKACEPEGSSERSGLSGEIWTKSVTQQIHFKKTSGPYKDVPTDQRGRESGASRNSSSAWPNLTSQEKPPSEDKFDLVDAYGTEPPYTYSGKRSSKCRECRKMFQSASALEAHQKTHSRKTPYACSECGKAFSRSTHLAQHQVVHTGAKPHECKECGKAFSRVTHLTQHQRIHTGEKPYKCGECGKTFSRSTHLTQHQRVHTGERPYECDACGKAFSQSTHLTQHQRIHTGEKPYKCDACGRAFSDCSALIRHLRIHSGEKPYQCKVCPKAFAQSSSLIEHQRIHTGEKPYKCSDCGKAFSRSSALMVHLRIHITVLQ

SEQ ID NO: 8492 - protein, 864 aa, Homo sapiens
MGSLTFWDVTIEFALEEWQCLDMAQQNLYRNVMLENYRNLVFLGIAVSKLDLITCLKQGKEPWNMKRHEMVTKPPVISSHFTQDFWPDQSIKDSFQEIILRTYARCGHKNLRLRKDCESVNEGKMHEEAYNKLNQCWTTTQGKIFQCNKYVKVFHKYSNSNRYKIRHTKKKTFKCMKCSKSFFMLSHLIQHKRIHTRENIYKCEERGKAFKWFSTLIKHKIIHTEDKPYKYKKCGKAFNISSMFTKCKIIHTGKKPCKCEECGKVFNNSSTLMKHKIIHTGKKPYKCEECGKAFKQSSHLTRHKAIHTGEKPYKCEECGKAFNHFSALRKHQIIHTGKKPYKCEECGKAFSQSSTLRKHEIIHTEEKPYKYEECGKAFSNLSALRKHEIIHTGQKPYKCEECGKAFKWSSKLTVHKVIHTAEKPCKCEECGKAFKRFSALRKHKIIHTGKQPYKCEECSKAFSNFSALRKHEIIHTGEKPYKCEECGKAFKWSSKLTVHKVIHMEEKPCKCEECGKAFKHFSALRKHKIIHTGKKPYKCEECGKAFNNSSTLMKHKIIHTGKKPYKCEECGKAFKQSSHLTRHKAIHTGEKPYKCEECGKAFNHFSALRKHQIIHTGKKPYKCEECGKAFSQSSTLRKHEIIHTGEKPYKCEECGKAFKWSSHLTRHKVIHTEEKPYKCEECGKAFNHFSALRKHKIIHTGKKPYKCEECGKAFSQSSTLRKHEIIHTGEKPYKCEECGKAFKWSSKLTVHKVIHTAEKPCKCEECGKAFKHFSALRKHKIIHTGKKPYKCEECGKAFNNSSTLRKHEIIHTGEKSYKCEECGKAFQWSSKLTLHKVIHMERNPANVKNVAKLLNISQPLENMR

SEQ ID NO: 8493 - protein, 1129 aa, Homo sapiens
MPATRKPMRYGHTEGHTEVCFDDSGSFIVTCGSDGDVRIWEDLDDDDPKFINVGEKAYSCALKSGKLVTAVSNNTIQVHTFPEGVPDGILTRFTTNANHVVFNGDGTKIAAGSSDFLVKIVDVMDSSQQKTFRGHDAPVLSLSFDPKDIFLASASCDGSVRVWQISDQTCAISWPLLQKCNDVINAKSICRLAWQPKSGKLLAIPVEKSVKLYRRESWSHQFDLSDNFISQTLNIVTWSPCGQYLAAGSINGLIIVWNVETKDCMERVKHEKGYAICGLAWHPTCGRISYTDAEGNLGLLENVCDPSGKTSSSKVSSRVEKDYNDLFDGDDMSNAGDFLNDNAVEIPSFSKGIINDDEDDEDLMMASGRPRQRSHILEDDENSVDISMLKTGSSLLKEEEEDGQEGSIHNLPLVTSQRPFYDGPMPTPRQKPFQSGSTPLHLTHRFMVWNSIGIIRCYNDEQDNAIDVEFHDTSIHHATHLSNTLNYTIADLSHEAILLACESTDELASKLHCLHFSSWDSSKEWIIDLPQNEDIEAICLGQGWAAAATSALLLRLFTIGGVQKEVFSLAGPVVSMAGHGEQLFIVYHRGTGFDGDQCLGVQLLELGKKKKQILHGDPLPLTRKSYLAWIGFSAEGTPCYVDSEGIVRMLNRGLGNTWTPICNTREHCKGKSDHYWVVGIHENPQQLRCIPCKGSRFPPTLPRPAVAILSFKLPYCQIATEKGQMEEQFWRSVIFHNHLDYLAKNGYEYEESTKNQATKEQQELLMKMLALSCKLEREFRCVELADLMTQNAVNLAIKYASRSRKLILAQKLSELAVEKAAELTATQVEEEEEEEDFRKKLNAGYSNTATEWSQPRFRNQVEEDAEDSGEADDEEKPEIHKPGQNSFSKSTNSSDVSAKSGAVTFSSQGRVNPFKVSASSKEPAMSMNSARSTNILDNMGKSSKKSTALSRTTNNEKSPIIKPLIPKPKPKQASAASYFQKRNSQTNKTEEVKEENLKNVLSETPAICPPQNTENQRPKTGFQMWLEENRSNILSDNPDFSDEADIIKEGMIRFRVLSTEERKVWANKAKGETASEGTEAKKRKRVVDESDETENQEEKAKENLNLSKKQKPLDFSTNQKLSAFAFKQE

SEQ ID NO: 8494 - protein, 1006 aa, Homo sapiens
MDSSQQKTFRGHDAPVLSLSFDPKDIFLASASCDGSVRVWQISDQTCAISWPLLQKCNDVINAKSICRLAWQPKSGKLLAIPVEKSVKLYRRESWSHQFDLSDNFISQTLNIVTWSPCGQYLAAGSINGLIIVWNVETKDCMERVKHEKGYAICGLAWHPTCGRISYTDAEGNLGLLENVCDPSGKTSSSKVSSRVEKDYNDLFDGDDMSNAGDFLNDNAVEIPSFSKGIINDDEDDEDLMMASGRPRQRSHILEDDENSVDISMLKTGSSLLKEEEEDGQEGSIHNLPLVTSQRPFYDGPMPTPRQKPFQSGSTPLHLTHRFMVWNSIGIIRCYNDEQDNAIDVEFHDTSIHHATHLSNTLNYTIADLSHEAILLACESTDELASKLHCLHFSSWDSSKEWIIDLPQNEDIEAICLGQGWAAAATSALLLRLFTIGGVQKEVFSLAGPVVSMAGHGEQLFIVYHRGTGFDGDQCLGVQLLELGKKKKQILHGDPLPLTRKSYLAWIGFSAEGTPCYVDSEGIVRMLNRGLGNTWTPICNTREHCKGKSDHYWVVGIHENPQQLRCIPCKGSRFPPTLPRPAVAILSFKLPYCQIATEKGQMEEQFWRSVIFHNHLDYLAKNGYEYEESTKNQATKEQQELLMKMLALSCKLEREFRCVELADLMTQNAVNLAIKYASRSRKLILAQKLSELAVEKAAELTATQVEEEEEEEDFRKKLNAGYSNTATEWSQPRFRNQVEEDAEDSGEADDEEKPEIHKPGQNSFSKSTNSSDVSAKSGAVTFSSQGRVNPFKVSASSKEPAMSMNSARSTNILDNMGKSSKKSTALSRTTNNEKSPIIKPLIPKPKPKQASAASYFQKRNSQTNKTEEVKEENLKNVLSETPAICPPQNTENQRPKTGFQMWLEENRSNILSDNPDFSDEADIIKEGMIRFRVLSTEERKVWANKAKGETASEGTEAKKRKRVVDESDETENQEEKAKENLNLSKKQKPLDFSTNQKLSAFAFKQE

SEQ ID NO: 8495 - protein, 716 aa, Homo sapiens
MSLMGHGKVEMLLYAVPLLKAPNCLSSSMQLPHGGGRHQELVRFRDVAVVFSPEEWDHLTPEQRNLYKDVMLDNCKYLASLGNWTYKAHVMSSLKQGKEPWMMEREVTGDPCPACQPALATFRALNESGNAFRQSFHHGEYRTHRTFVQHYECDDCGMAFGHVSQLTGHQKIHKVGETHEYGENTRGFRHRSSFTMLQRICTLYKHFECNQCGETFNRPSKVIQHQSMHSGLKPYKCDVCQKAFRFLSSLSIHQRFHVGNRVNLTRHQKTHTQRKPFSCNFCGKTFHRFSEKTQHLLIHTRKKYYTCNYCKKEFNPYSKFILHQRTHTGEKPHKCDVCEKSFKSISNLNKHQKTHTGEKPFSCNECKKTFAQRTDLARHQQIHTGKKSFICSSCKKTFVRLSDLTQHKGTHTGERPYQCTTCEKAFKYRSNFTKHQKTHSIGRPFACNECGKTYRLNWELNQHKKIHTGEKPYECGECGKRFNNNSNLNKHKKIHTGEKHFVCNQCGKAFSLNSKLSRHQRTHNKKENSSKSVSNLNKHQKTHAGEKPFPCNECKKAFAQRMDLARHQQIHTGRKPFICSSCKKTFVRLSDLTQHKGTHTGERPYQCTTCEKAFKYQSNFTKHQKTHSIGRPFTCNECGKTFRLNWKLNQHKKIHTGEKPYECGECGKCFNNNSNLSKHKKIHTGEKHFVCNQCGKAFSLNSKLSRHQITHNKKKP

SEQ ID NO: 8496 - protein, 449 aa, Homo sapiens
MEFFISMSETIKYNDDDHKTLFLKTLNEQRLEGEFCDIAIVVEDVKFRAHRCVLAACSTYFKKLFKKLEVDSSSVIEIDFLRSDIFEEVLNYMYTAKISVKKEDVNLMMSSGQILGIRFLDKLCSQKRDVSSPDENNGQSKSKYCLKINRPIGDAADTQDDDVEEIGDQDDSPSDDTVEGTPPSQEDGKSPTTTLRVQEAILKELGSEEVRKVNCYGQEVESMETPESKDLGSQTPQALTFNDGMSEVKDEQTPGWTTAASDMKFEYLLYGHHREQIACQACGKTFSDEGRLRKHEKLHTADRPFVCEMCTKGFTTQAHLKEHLKIHTGYKPYSCEVCGKSFIRAPDLKKHERVHSNERPFACHMCDKAFKHKSHLKDHERRHRGEKPFVCGSCTKAFAKASDLKRHENNMHSERKQVTPSAIQSETEQLQAAAMAAEAEQQLETIACS

SEQ ID NO: 8497 - protein, 553 aa, Homo sapiens
MAFEDVAVYFSQEEWGLLDTAQRALYRRVMLDNFALVASLGLSTSRPRVVIQLERGEEPWVPSGTDTTLSRTTYRRRNPGSWSLTEDRDVSGEWPRAFPDTPPGMTTSVFPVAGACHSVKSLQRQRGASPSRERKPTGVSVIYWERLLLGSGSGQASVSLRLTSPLRPPEGVRLREKTLTEHALLGRQPRTPERQKPCAQEVPGRTFGSAQDLEAAGGRGHHRMGAVWQEPHRLLGGQEPSTWDELGEALHAGEKSFECRACSKVFVKSSDLLKHLRTHTGERPYECAQCGKAFSQTSHLTQHQRIHSGETPYACPVCGKAFRHSSSLVRHQRIHTAEKSFRCSECGKAFSHGSNLSQHRKIHAGGRPYACAQCGRRFCRNSHLIQHERTHTGEKPFVCALCGAAFSQGSSLFKHQRVHTGEKPFACPQCGRAFSHSSNLTQHQLLHTGERPFRCVDCGKAFAKGAVLLSHRRIHTGEKPFVCTQCGRAFRERPALFHHQRIHTGEKTVRRSRASLHPQARSVAGASSEGAPAKETEPTPASGPAAVSQPAEV

SEQ ID NO: 8498 - protein, 132 aa, Homo sapiens
MYSVLQLLKCLCSCWRKGPEGRRFQTEAAVCARPAWSPHPAGASEALGALPPPRQLVEKRRVSPPRRLDQSGRDGGAVAKCSLSRGLSPPGWTGRSLLRPWGSAAVLGSRAALACVLRPSRGVMPATIQSRR

SEQ ID NO: 8499 - protein, 628 aa, Homo sapiens
MDSVVFEDVAVDFTLEEWALLDSAQRDLYRDVMLETFQNLASVDDETQFKASGSVSQQDIYGEKIPKESKIATFTRNVSWASVLGKIWDSLSIEDQTTNQGRNLSRNHGLERLCESNDQCGEALSQIPHLNLYKKIPPGVKQYEYNTYGKVFMHRRTSLKSPITVHTGHKPYQCQECGQAYSCRSHLRMHVRTHNGERPYVCKLCGKTFPRTSSLNRHVRIHTAEKTYECKQCGKAFIDFSSLTSHLRSHTGEKPYKCKECGKAFSYSSTFRRHTITHTGEKPYKCKECAEAFSYSSTFRRHMISHTGEKPHKCKECGEAFSYSSAFRRHMITHTGEKPYECKQCGKTFIYLQSFRRHERIHTGEKPYECKQCGKTFIYPQSFRRHERTHGGEKPYECNQCGKAFSHPSSFRGHMRVHTGEKPYECKQCGKTFNWPISLRKHMRTHTREKPYECKQCGKAFSLSACFREHVRMHPEDKSYECKLCGKAFYCHISLQKHMRRHTAEKLYKCKQCGKAFSWPELLQQHVRTHTVEKPYECKECGKVFKWPSSLPIHMRLHTGEKPYQCKHCGKAFNCSSSLRRHVRIHTTEKQYKCNVGHPPANEFMCSASEKSHQERDLIKVVNMVLPL

SEQ ID NO: 8500 - protein, 543 aa, Homo sapiens
MDSVVFEDVAVDFTLEEWALLDSAQRDLYRDVMLETFQNLASVDDETQFKASGSVSQQDIYGEKIPKESKIATFTRNVSWASVLGKIWDSLSIEDQTTNQGRNLRNHGLERLCESNDQCGEALSQIPHLNLYKKIPPGVKQYEYNTYGKVFMHRRTSLKSPITVHTGHKPYQCQECGQAYSCRSHLRMHVRTHNGERPYVCKLCGKTFPRTSSLNRHVRIHTAEKTYECKQCGKAFIDFSSLTSHLRSHTGEKPYKCKECGKAFSYSSTFRRHTITHTGEKPYKCKECAEAFSYSSTFRRHMISHTGEKPHKCKECGEAFSYSSAFRRHMITHTGEKPYECKQCGKTFIYLQSFRRHERIHTGEKPYECKQCGKTFIYPQSFRRHERTHGGEKPYECNQCGKAFSHPSSFRGHMRVHTGEKPYECKQCGKTFNWPISLRKHMRTHTREKLYKCKQCGKVFKWPSSLPIHMRLHTGEKPYQCKHCGKAFNCSSSLRRHVRIHTTEKQYKCNVGHPPANEFMCSASEKSHQERDLIKVVNMVLPL

SEQ ID NO: 8501 - protein, 627 aa, Homo sapiens
MDSVVFEDVAVDFTLEEWALLDSAQRDLYRDVMLETFQNLASVDDETQFKASGSVSQQDIYGEKIPKESKIATFTRNVSWASVLGKIWDSLSIEDQTTNQGRNLRNHGLERLCESNDQCGEALSQIPHLNLYKKIPPGVKQYEYNTYGKVFMHRRTSLKSPITVHTGHKPYQCQECGQAYSCRSHLRMHVRTHNGERPYVCKLCGKTFPRTSSLNRHVRIHTAEKTYECKQCGKAFIDFSSLTSHLRSHTGEKPYKCKECGKAFSYSSTFRRHTITHTGEKPYKCKECAEAFSYSSTFRRHMISHTGEKPHKCKECGEAFSYSSAFRRHMITHTGEKPYECKQCGKTFIYLQSFRRHERIHTGEKPYECKQCGKTFIYPQSFRRHERTHGGEKPYECNQCGKAFSHPSSFRGHMRVHTGEKPYECKQCGKTFNWPISLRKHMRTHTREKPYECKQCGKAFSLSACFREHVRMHPEDKSYECKLCGKAFYCHISLQKHMRRHTAEKLYKCKQCGKAFSWPELLQQHVRTHTVEKPYECKECGKVFKWPSSLPIHMRLHTGEKPYQCKHCGKAFNCSSSLRRHVRIHTTEKQYKCNVGHPPANEFMCSASEKSHQERDLIKVVNMVLPL

SEQ ID NO: 8502 - protein, 412 aa, Homo sapiens
MTFTFQSEDLKRDCGKKMSHQHVFSLAMEEDVKTADTKKASRILDHEKENTRSICLLEQKRKVVSSNIDVPPARKSSEELDMDKVTAAMVLTSLSTSPLVRSPPVRPNESLSGSWKEGGCVPSSTSSSGYWSWSAPSDQSNPSTPSPPLSADSFKPFRSPAQPDDGIDEAEASNLLFDEPIPRKRKNSMKVMFKCLWKNCGKVLSTAAGIQKHIRTIHLGRVGDSDYSDGEEDFYYTEIKLNTDSVADGLSSLAPVSPSQSLASPPTFPIPDSSRTETPCAKTETKLMTPLSRSAPTTLYLVHTDHAYQATPPVTIPGSAKFTPNGSSFSISWQSPPVTFTGIPVSPTHHPVGTGEQRQHAHTVLSSPPRGTVSLRKPRGEGKKCRKVYGMENRDMWCTACRWKKACQRFLD

SEQ ID NO: 8503 - protein, 821 aa, Homo sapiens
MAANGDSPPWSPALAAEGRGSSCEVRRERTPEARIHSVKRYPDLSPGPKGRSSADHAALNSIVSLQASVSFEDVTVDFSKEEWQHLDPAQRRLYWDVTLENYSHLLSVGYQIPKSEAAFKLEQGEGPWMLEGEAPHQSCSGEAIGKMQQQGIPGGIFFHCERFDQPIGEDSLCSILEELWQDNDQLEQRQENQNNLLSHVKVLIKERGYEHKNIEKIIHVTTKLVPSIKRLHNCDTILKHTLNSHNHNRNSATKNLGKIFGNGNNFPHSPSSTKNENAKTGANSCEHDHYEKHLSHKQAPTHHQKIHPEEKLYVCTECVMGFTQKSHLFEHQRIHAGEKSRECDKSNKVFPQKPQVDVHPSVYTGEKPYLCTQCGKVFTLKSNLITHQKIHTGQKPYKCSECGKAFFQRSDLFRHLRIHTGEKPYECSECGKGFSQNSDLSIHQKTHTGEKHYECNECGKAFTRKSALRMHQRIHTGEKPYVCADCGKAFIQKSHFNTHQRIHTGEKPYECSDCGKSFTKKSQLHVHQRIHTGEKPYICTECGKVFTHRTNLTTHQKTHTGEKPYMCAECGKAFTDQSNLIKHQKTHTGEKPYKCNGCGKAFIWKSRLKIHQKSHIGERHYECKDCGKAFIQKSTLSVHQRIHTGEKPYVCPECGKAFIQKSHFIAHHRIHTGEKPYECSDCGKCFTKKSQLRVHQKIHTGEKPNICAECGKAFTDRSNLITHQKIHTREKPYECGDCGKTFTWKSRLNIHQKSHTGERHYECSKCGKAFIQKATLSMHQIIHTGKKPYACTECQKAFTDRSNLIKHQKMHSGEKRYKASD

SEQ ID NO: 8504 - protein, 781 aa, Homo sapiens
MGTLPHGPRPWLQRDVAAHVSIVSLQASVSFEDVTVDFSKEEWQHLDPAQRRLYWDVTLENYSHLLSVGYQIPKSEAAFKLEQGEGPWMLEGEAPHQSCSGEAIGKMQQQGIPGGIFFHCERFDQPIGEDSLCSILEELWQDNDQLEQRQENQNNLLSHVKVLIKERGYEHKNIEKIIHVTTKLVPSIKRLHNCDTILKHTLNSHNHNRNSATKNLGKIFGNGNNFPHSPSSTKNENAKTGANSCEHDHYEKHLSHKQAPTHHQKIHPEEKLYVCTECVMGFTQKSHLFEHQRIHAGEKSRECDKSNKVFPQKPQVDVHPSVYTGEKPYLCTQCGKVFTLKSNLITHQKIHTGQKPYKCSECGKAFFQRSDLFRHLRIHTGEKPYECSECGKGFSQNSDLSIHQKTHTGEKHYECNECGKAFTRKSALRMHQRIHTGEKPYVCADCGKAFIQKSHFNTHQRIHTGEKPYECSDCGKSFTKKSQLHVHQRIHTGEKPYICTECGKVFTHRTNLTTHQKTHTGEKPYMCAECGKAFTDQSNLIKHQKTHTGEKPYKCNGCGKAFIWKSRLKIHQKSHIGERHYECKDCGKAFIQKSTLSVHQRIHTGEKPYVCPECGKAFIQKSHFIAHHRIHTGEKPYECSDCGKCFTKKSQLRVHQKIHTGEKPNICAECGKAFTDRSNLITHQKIHTREKPYECGDCGKTFTWKSRLNIHQKSHTGERHYECSKCGKAFIQKATLSMHQIIHTGKKPYACTECQKAFTDRSNLIKHQKMHSGEKRYKASD

SEQ ID NO: 8505 - protein, 789 aa, Homo sapiens
MGTLPHGPRPWLQRDVAAHVSADHAALNSIVSLQASVSFEDVTVDFSKEEWQHLDPAQRRLYWDVTLENYSHLLSVGYQIPKSEAAFKLEQGEGPWMLEGEAPHQSCSGEAIGKMQQQGIPGGIFFHCERFDQPIGEDSLCSILEELWQDNDQLEQRQENQNNLLSHVKVLIKERGYEHKNIEKIIHVTTKLVPSIKRLHNCDTILKHTLNSHNHNRNSATKNLGKIFGNGNNFPHSPSSTKNENAKTGANSCEHDHYEKHLSHKQAPTHHQKIHPEEKLYVCTECVMGFTQKSHLFEHQRIHAGEKSRECDKSNKVFPQKPQVDVHPSVYTGEKPYLCTQCGKVFTLKSNLITHQKIHTGQKPYKCSECGKAFFQRSDLFRHLRIHTGEKPYECSECGKGFSQNSDLSIHQKTHTGEKHYECNECGKAFTRKSALRMHQRIHTGEKPYVCADCGKAFIQKSHFNTHQRIHTGEKPYECSDCGKSFTKKSQLHVHQRIHTGEKPYICTECGKVFTHRTNLTTHQKTHTGEKPYMCAECGKAFTDQSNLIKHQKTHTGEKPYKCNGCGKAFIWKSRLKIHQKSHIGERHYECKDCGKAFIQKSTLSVHQRIHTGEKPYVCPECGKAFIQKSHFIAHHRIHTGEKPYECSDCGKCFTKKSQLRVHQKIHTGEKPNICAECGKAFTDRSNLITHQKIHTREKPYECGDCGKTFTWKSRLNIHQKSHTGERHYECSKCGKAFIQKATLSMHQIIHTGKKPYACTECQKAFTDRSNLIKHQKMHSGEKRYKASD

SEQ ID NO: 8506 - protein, 693 aa, Homo sapiens
MLEGEAPHQSCSGEAIGKMQQQGIPGGIFFHCERFDQPIGEDSLCSILEELWQDNDQLEQRQENQNNLLSHVKVLIKERGYEHKNIEKIIHVTTKLVPSIKRLHNCDTILKHTLNSHNHNRNSATKNLGKIFGNGNNFPHSPSSTKNENAKTGANSCEHDHYEKHLSHKQAPTHHQKIHPEEKLYVCTECVMGFTQKSHLFEHQRIHAGEKSRECDKSNKVFPQKPQVDVHPSVYTGEKPYLCTQCGKVFTLKSNLITHQKIHTGQKPYKCSECGKAFFQRSDLFRHLRIHTGEKPYECSECGKGFSQNSDLSIHQKTHTGEKHYECNECGKAFTRKSALRMHQRIHTGEKPYVCADCGKAFIQKSHFNTHQRIHTGEKPYECSDCGKSFTKKSQLHVHQRIHTGEKPYICTECGKVFTHRTNLTTHQKTHTGEKPYMCAECGKAFTDQSNLIKHQKTHTGEKPYKCNGCGKAFIWKSRLKIHQKSHIGERHYECKDCGKAFIQKSTLSVHQRIHTGEKPYVCPECGKAFIQKSHFIAHHRIHTGEKPYECSDCGKCFTKKSQLRVHQKIHTGEKPNICAECGKAFTDRSNLITHQKIHTREKPYECGDCGKTFTWKSRLNIHQKSHTGERHYECSKCGKAFIQKATLSMHQIIHTGKKPYACTECQKAFTDRSNLIKHQKMHSGEKRYKASD

SEQ ID NO: 8507 - protein, 813 aa, Homo sapiens
MAANGDSPPWSPALAAEGRGSSCEVRRERTPEARIHSVKRYPDLSPGPKGRSSIVSLQASVSFEDVTVDFSKEEWQHLDPAQRRLYWDVTLENYSHLLSVGYQIPKSEAAFKLEQGEGPWMLEGEAPHQSCSGEAIGKMQQQGIPGGIFFHCERFDQPIGEDSLCSILEELWQDNDQLEQRQENQNNLLSHVKVLIKERGYEHKNIEKIIHVTTKLVPSIKRLHNCDTILKHTLNSHNHNRNSATKNLGKIFGNGNNFPHSPSSTKNENAKTGANSCEHDHYEKHLSHKQAPTHHQKIHPEEKLYVCTECVMGFTQKSHLFEHQRIHAGEKSRECDKSNKVFPQKPQVDVHPSVYTGEKPYLCTQCGKVFTLKSNLITHQKIHTGQKPYKCSECGKAFFQRSDLFRHLRIHTGEKPYECSECGKGFSQNSDLSIHQKTHTGEKHYECNECGKAFTRKSALRMHQRIHTGEKPYVCADCGKAFIQKSHFNTHQRIHTGEKPYECSDCGKSFTKKSQLHVHQRIHTGEKPYICTECGKVFTHRTNLTTHQKTHTGEKPYMCAECGKAFTDQSNLIKHQKTHTGEKPYKCNGCGKAFIWKSRLKIHQKSHIGERHYECKDCGKAFIQKSTLSVHQRIHTGEKPYVCPECGKAFIQKSHFIAHHRIHTGEKPYECSDCGKCFTKKSQLRVHQKIHTGEKPNICAECGKAFTDRSNLITHQKIHTREKPYECGDCGKTFTWKSRLNIHQKSHTGERHYECSKCGKAFIQKATLSMHQIIHTGKKPYACTECQKAFTDRSNLIKHQKMHSGEKRYKASD

SEQ ID NO: 8508 - protein, 779 aa, Homo sapiens
MAANGDSPPWSPALAAEGRGSSCEASVSFEDVTVDFSKEEWQHLDPAQRRLYWDVTLENYSHLLSVGYQIPKSEAAFKLEQGEGPWMLEGEAPHQSCSGEAIGKMQQQGIPGGIFFHCERFDQPIGEDSLCSILEELWQDNDQLEQRQENQNNLLSHVKVLIKERGYEHKNIEKIIHVTTKLVPSIKRLHNCDTILKHTLNSHNHNRNSATKNLGKIFGNGNNFPHSPSSTKNENAKTGANSCEHDHYEKHLSHKQAPTHHQKIHPEEKLYVCTECVMGFTQKSHLFEHQRIHAGEKSRECDKSNKVFPQKPQVDVHPSVYTGEKPYLCTQCGKVFTLKSNLITHQKIHTGQKPYKCSECGKAFFQRSDLFRHLRIHTGEKPYECSECGKGFSQNSDLSIHQKTHTGEKHYECNECGKAFTRKSALRMHQRIHTGEKPYVCADCGKAFIQKSHFNTHQRIHTGEKPYECSDCGKSFTKKSQLHVHQRIHTGEKPYICTECGKVFTHRTNLTTHQKTHTGEKPYMCAECGKAFTDQSNLIKHQKTHTGEKPYKCNGCGKAFIWKSRLKIHQKSHIGERHYECKDCGKAFIQKSTLSVHQRIHTGEKPYVCPECGKAFIQKSHFIAHHRIHTGEKPYECSDCGKCFTKKSQLRVHQKIHTGEKPNICAECGKAFTDRSNLITHQKIHTREKPYECGDCGKTFTWKSRLNIHQKSHTGERHYECSKCGKAFIQKATLSMHQIIHTGKKPYACTECQKAFTDRSNLIKHQKMHSGEKRYKASD

SEQ ID NO: 8509 - protein, 745 aa, Homo sapiens
MGTLPHGPRPWLQRDVAAHVSIVSLQASVSFEDVTVDFSKEEWQHLDPAQRRLYWDVTLENYSHLLSVGYQIPKSEAAFKLEQGEGPWMLEGEAPHQSCSEELWQDNDQLEQRQENQNNLLSHVKVLIKERGYEHKNIEKIIHVTTKLVPSIKRLHNCDTILKHTLNSHNHNRNSATKNLGKIFGNGNNFPHSPSSTKNENAKTGANSCEHDHYEKHLSHKQAPTHHQKIHPEEKLYVCTECVMGFTQKSHLFEHQRIHAGEKSRECDKSNKVFPQKPQVDVHPSVYTGEKPYLCTQCGKVFTLKSNLITHQKIHTGQKPYKCSECGKAFFQRSDLFRHLRIHTGEKPYECSECGKGFSQNSDLSIHQKTHTGEKHYECNECGKAFTRKSALRMHQRIHTGEKPYVCADCGKAFIQKSHFNTHQRIHTGEKPYECSDCGKSFTKKSQLHVHQRIHTGEKPYICTECGKVFTHRTNLTTHQKTHTGEKPYMCAECGKAFTDQSNLIKHQKTHTGEKPYKCNGCGKAFIWKSRLKIHQKSHIGERHYECKDCGKAFIQKSTLSVHQRIHTGEKPYVCPECGKAFIQKSHFIAHHRIHTGEKPYECSDCGKCFTKKSQLRVHQKIHTGEKPNICAECGKAFTDRSNLITHQKIHTREKPYECGDCGKTFTWKSRLNIHQKSHTGERHYECSKCGKAFIQKATLSMHQIIHTGKKPYACTECQKAFTDRSNLIKHQKMHSGEKRYKASD

SEQ ID NO: 8510 - protein, 743 aa, Homo sapiens
MAANGDSPPWSPALAAEGRGSSCEASVSFEDVTVDFSKEEWQHLDPAQRRLYWDVTLENYSHLLSVGYQIPKSEAAFKLEQGEGPWMLEGEAPHQSCSEELWQDNDQLEQRQENQNNLLSHVKVLIKERGYEHKNIEKIIHVTTKLVPSIKRLHNCDTILKHTLNSHNHNRNSATKNLGKIFGNGNNFPHSPSSTKNENAKTGANSCEHDHYEKHLSHKQAPTHHQKIHPEEKLYVCTECVMGFTQKSHLFEHQRIHAGEKSRECDKSNKVFPQKPQVDVHPSVYTGEKPYLCTQCGKVFTLKSNLITHQKIHTGQKPYKCSECGKAFFQRSDLFRHLRIHTGEKPYECSECGKGFSQNSDLSIHQKTHTGEKHYECNECGKAFTRKSALRMHQRIHTGEKPYVCADCGKAFIQKSHFNTHQRIHTGEKPYECSDCGKSFTKKSQLHVHQRIHTGEKPYICTECGKVFTHRTNLTTHQKTHTGEKPYMCAECGKAFTDQSNLIKHQKTHTGEKPYKCNGCGKAFIWKSRLKIHQKSHIGERHYECKDCGKAFIQKSTLSVHQRIHTGEKPYVCPECGKAFIQKSHFIAHHRIHTGEKPYECSDCGKCFTKKSQLRVHQKIHTGEKPNICAECGKAFTDRSNLITHQKIHTREKPYECGDCGKTFTWKSRLNIHQKSHTGERHYECSKCGKAFIQKATLSMHQIIHTGKKPYACTECQKAFTDRSNLIKHQKMHSGEKRYKASD

SEQ ID NO: 8511 - protein, 693 aa, Homo sapiens
MDSVAFEDVAINFTCEEWALLGPSQKSLYRDVMQETIRNLDCIGMIWQNHDIEEDQYKDLRRNLRCHMVERACEIKDNSQCGGPFTQTQDSIVNEKIPGVDPWESSECTDVLMGRSSLNCYVRVDSEHKPCEYQEYGEKPYTHTQCGTAFSYQPCFQIHERPQHGKKLYDCKECASFSSLENLQRHMAAHHGDGPRICKLCGNAFIWPSLFHMLRRTHTEEKPYEYEQCSTAFPAYSSTLRHERTHSGEKPYQCKQCGKAFSCSCYTQLYERTHTGEQSYECKQCGKAFYHLGSFQRHMIVHTGDGPHKCKICGKGFLSPSSVRRHKRTHTGEKPYECKYCGKAFSDCTGFRRHMITHTGDGPHKCKVCGKAFDSPSLCRRHETTHTGEKPYKCECGKAFSDFYYFRNHETTHTGEKPYKCKQCGKAFICCTYLQIHERIHTGERPYKCKQCGKAFRSSNYIRVHEKTHTGEKPYECKQCGKALSHLKSFQRHMIMHTGDGPHKCKICGKSFDSPSSFRRHERIHTGERPYKCKLCGKGFRSSSYIQLHERTHTGEKPYGCQQCGKALSDLSSFRRHMITHTGNGPHKCKICGKGFDYPSSVQRHERTHTGEKPYECKECGKAFSHSSYLRIHERVHTGEKPYKCKECGKPFHCPSAFHKHERTHSMEKPYKCKECGEAFHCISSFHKHEMTH

SEQ ID NO: 8512 - protein, 649 aa, Homo sapiens
MIWQNHDIEEDQYKDLRRNLRCHMVERACEIKDNSQCGGPFTQTQDSIVNEKIPGVDPWESSECTDVLMGRSSLNCYVRVDSEHKPCEYQEYGEKPYTHTQCGTAFSYQPCFQIHERPQHGKKLYDCKECASFSSLENLQRHMAAHHGDGPRICKLCGNAFIWPSLFHMLRRTHTEEKPYEYEQCSTAFPAYSSTLRHERTHSGEKPYQCKQCGKAFSCSCYTQLYERTHTGEQSYECKQCGKAFYHLGSFQRHMIVHTGDGPHKCKICGKGFLSPSSVRRHKRTHTGEKPYECKYCGKAFSDCTGFRRHMITHTGDGPHKCKVCGKAFDSPSLCRRHETTHTGEKPYKCECGKAFSDFYYFRNHETTHTGEKPYKCKQCGKAFICCTYLQIHERIHTGERPYKCKQCGKAFRSSNYIRVHEKTHTGEKPYECKQCGKALSHLKSFQRHMIMHTGDGPHKCKICGKSFDSPSSFRRHERIHTGERPYKCKLCGKGFRSSSYIQLHERTHTGEKPYGCQQCGKALSDLSSFRRHMITHTGNGPHKCKICGKGFDYPSSVQRHERTHTGEKPYECKECGKAFSHSSYLRIHERVHTGEKPYKCKECGKPFHCPSAFHKHERTHSMEKPYKCKECGEAFHCISSFHKHEMTH

SEQ ID NO: 8513 - protein, 2354 aa, Homo sapiens
MQKRQGYCSYCRVQYNNLEQHLFSAQHRSLTRQSRRQICTSSLMERFLQDVLQHHPYHCQESSSTQDETHVNTGSSSEVVHLDDAFSEEEEEDEDKVEDEDATEERPSEVSEPIEELHSRPHKSQEGTQEVSVRPSVIQKLEKGQQQPLEFVHKIGASVRKCNLVDIGQATNNRSNLVRPPVICNAPASCLPESSNDRPVTANTTSLPPAAHLDSVSKCDPNKVEKYLEQPDGASRNPVPSSHVETTSFSYQKHKESNRKSLRMNSDKLVLWKDVKSQGKTLSAGLKFHERMGTKGSLRVKSPSKLAVNPNKTDMPSNKGIFEDTIAKNHEEFFSNMDCTQEEKHLVFNKTAFWEQKCSVSSEMKFDCISLQSASDQPQETAQDLSLWKEEQIDQEDNYESRGSEMSFDCSSSFHSLTDQSKVSAKEVNLSKEVRTDVQYKNNKSYVSKISSDCDDILHLVTNQSQMIVKEISLQNARHISLVDQSYESSSSETNFDCDASPQSTSDYPQQSVTEVNLPKEVHIGLVDKNYGSSSSEVSADSVFPLQSVVDRPPVAVTETKLRKKAHTSLVDNYGSSCSETSFDCDVSLESVVDHPQLTVKGRNLKGRQVHLKHKKRKPSSAKAHLDCDVSLGTVADESQRAVEKINLLKEKNADLMDMNCESHGPEMGFQADAQLADQSQVAEIERQKVDVDLENKSVQSSRSSLSSDSPASLYHSAHDEPQEALDEVNLKELNIDMEVRSYDCSSSELTFDSDPPLLSVTEQSHLDAEGKERHIDLEDESCESDSSEITFDSDIPLYSVIDQPEVAVYEEETVDLESKSNESCVSEITFDSDIPLHSGNDHPEVAVKEVIQKEEYIHLERKNDEPSGSEISSDSHAPLHSVTNSPEVAVKKLNPQKEEQVHLENKENEPIDSEVSLDYNIIFHSVTGRSEDPIKEISLHTKEHMYLENKSVFETSLDSDVPLQAATHKPEVIVKETWLQREKHAEFQGRSTEFSGSKTSLDSGVPHYSVTEPQVAVNKINRKKQYVLENKNDKCSGSEIILDSNVPPQSMTDQPQLAFLKEKHVNLKDKNSKSGDSKITFDSEQLQEAVKKIDQWKEEVIGLKNKINEPSTYKLIHHPDVSVQSVADQPKVAIKHVNLGNENHMYLEVKNSQYSCSEMNLDSGFLGQSIVNRPQITILEQEHIELEGKHNQCCGSEVSFDSDDPLQSVADRLRETVKEISLWKDEEVDTEDRRNEAKGFEIMYDSDVLQPVAGQPEEVVKEVSLWKEHVDLENKIVKPTDSRINFDSHEPLQSVTNKIPGANKEINLLREEHVCLDDKGYVPSDSEIIYVSNIPLQSVIKQPHILEEEHASLEDKSSNSYSPEESSDSNDSFQAAADELQKPVKEINLWKEDHIYLEDKSYKLGDFDVSYASHIPVQFVTDQSSVPVKEINLQKKDHNDLENKNCEVCGSEIKCHSCVHLQSEVDQPQVSYKEADLQKEEHVVMEEKTDQPSDSEMMYDSDVPFQIVVNQFPGSVKETHLPKVVLVDLVPGDSDYEVISDDIPLQLVTDPPQLTVKDISCINTECIDIEDKSCDFFGSEVRCNCKASTPSMTNQCKETFKIINRKKDYIILGEPSCQSCGSEMNFNVDASDQSMTYESQGPDEKMVKYIDSEDKSCGYNGSKGKFNLEDTSHRTTHRLQKAHKEASLRKDPRNAGLKGKSCQSSASAVDFGASSKSALHRRADKKKRSKLKHRDLEVSCEPDGFEMNFQCAPPLPSDTDQPQETVKKRHPCKKVSSDLKEKNHDSQSSSVLKVDSVRNLKKAKDVIEDNPDEPVLEALPHVPPSFVGKTWSQIMREDDIKINALVKEFREGRFHCYFDDDCETKKVSSKGKKKVTWADLQGKEDTAPTQAVSESDDIVCGISDIDDLSVALDKPCHRHPPAERPPKQKGRVASQCQTAKISHSTQTSCKNYPVMKRKIIRQEEDPPKSKCSRLQDDRKTKKKVKIGTVEFPASCTKVLKPMQPKALVCVLSSLNIKLKEGEGLPFPKMRHHSWDNDIRFICKYKRNIFDYYEPLIKQIVISPPLSVIVPEFERRNWVKIHFNRSNQNSSAGDNDADGQGSASAPLMAVPARYGFNSHQGTSDSSLFLEESKVLHARELPKKRNFQLTFLNHDVVKISPKSVRNKLLESQSKKKIHGKRVTTSSNKLGFPKKVYKPIILQQKPRKASEKQSIWIRTKPSDIIRKYISKYSVFLRHRYQSRSAFLGRYLKKKKSVVSRLKKAKRTAKVLLNSSVPPAGAEELSSAMANPPPKRPVRASCRVARRRKKTDESYHGRQKGPSTPVRAYDLRSSSCLQQRERMMTRLANKLRGNEVK

SEQ ID NO: 8514 - protein, 432 aa, Homo sapiens
MPHSPLISIPHVWCHPEEEERMHDELLQAVSKGPVMFRDVSIDFSQEEWECLDADQMNLYKEVMLENFSNLVSVGLSNSKPAVISLLEQGKEPWMVDRELTRGLCSDLESMCETKILSLKKRHFSQVIITREDMSTFIQPTFLIPPQKTMSEEKPWECKICGKTFNQNSQFIQHQRIHFGEKHYESKEYGKSFSRGSLVTRHQRIHTGKKPYECKECGKAFSCSSYFSQHQRIHTGEKPYECKECGKAFKYCSNLNDHQRIHTGEKPYECKVCGKAFTKSSQLFLHLRIHTGEKPYECKECGKAFTQHSRLIQHQRMHTGEKPYECKQCGKAFNSASTLTNHHRIHAGEKLYECEECRKAFIQSSELIQHQRIHTDEKPYECNECGKAFNKGSNLTRHQRIHTGEKPYDCKECGKAFGSRSDLIRHEGIHTG

SEQ ID NO: 8515 - protein, 248 aa, Homo sapiens
MNKEYGKSFSRGSLVTRHQRIHTGKKPYECKECGKAFSCSSYFSQHQRIHTGEKPYECKECGKAFKYCSNLNDHQRIHTGEKPYECKVCGKAFTKSSQLFLHLRIHTGEKPYECKECGKAFTQHSRLIQHQRMHTGEKPYECKQCGKAFNSASTLTNHHRIHAGEKLYECEECRKAFIQSSELIQHQRIHTDEKPYECNECGKAFNKGSNLTRHQRIHTGEKPYDCKECGKAFGSRSDLIRHEGIHTG

SEQ ID NO: 8516 - protein, 513 aa, Homo sapiens
MTGKGLGEDTEDRWGAGALGPCGRSGLKGGGCVWEAEAGGSRGQEIETILANMETSLRSGQIPTLDSSEHNLSPEPLELDRMPHSPLISIPHVWCHPEEEERMHDELLQAVSKGPVMFRDVSIDFSQEEWECLDADQMNLYKEVMLENFSNLVSVGLSNSKPAVISLLEQGKEPWMVDRELTRGLCSDLESMCETKILSLKKRHFSQVIITREDMSTFIQPTFLIPPQKTMSEEKPWECKICGKTFNQNSQFIQHQRIHFGEKHYESKEYGKSFSRGSLVTRHQRIHTGKKPYECKECGKAFSCSSYFSQHQRIHTGEKPYECKECGKAFKYCSNLNDHQRIHTGEKPYECKVCGKAFTKSSQLFLHLRIHTGEKPYECKECGKAFTQHSRLIQHQRMHTGEKPYECKQCGKAFNSASTLTNHHRIHAGEKLYECEECRKAFIQSSELIQHQRIHTDEKPYECNECGKAFNKGSNLTRHQRIHTGEKPYDCKECGKAFGSRSDLIRHEGIHTG

SEQ ID NO: 8517 - protein, 268 aa, Homo sapiens
MAELDIGQHCQVEHCRQRDFLPFVCDDCSGIFCLEHRSRESHGCPEVTVINERLKTDQHTSYPCSFKDCAERELVAVICPYCEKNFCLRHRHQSDHECEKLEIPKPRMAATQKLVKDIIDSKTGETASKRWKGAKNSETAAKVALMKLKMHADGDKSLPQTERIYFQVFLPKGSKEKSKPMFFCHRWSIGKAIDFAASLARLKNDNNKFTAKKLRLCHITSGEALPLDHTLETWIAKEDCPLYNGGNIILEYLNDEEQFCKNVESYLE

SEQ ID NO: 8518 - protein, 161 aa, Homo sapiens
MAATQKLVKDIIDSKTGETASKRWKGAKNSETAAKVALMKLKMHADGDKSLPQTERIYFQVFLPKGSKEKSKPMFFCHRWSIGKAIDFAASLARLKNDNNKFTAKKLRLCHITSGEALPLDHTLETWIAKEDCPLYNGGNIILEYLNDEEQFCKNVESYLE

SEQ ID NO: 8519 - protein, 261 aa, Homo sapiens
MAELDIGQHCQVEHCRQRDFLPFVCDDCSGIFCLEHRSRESHGCPEVTVINERLKTDQHTSYPCSFKDCAERELVAVICPYCEKNFCLRHRHQSDHECEKLEIPKPRMAATQKLVKDIIDSKTGETASKRWKGAKNSETAAKVALMKLKMHADGDKSLPQVFLPKGSKEKSKPMFFCHRWSIGKAIDFAASLARLKNDNNKFTAKKLRLCHITSGEALPLDHTLETWIAKEDCPLYNGGNIILEYLNDEEQFCKNVESYLE

SEQ ID NO: 8520 - protein, 227 aa, Homo sapiens
MAELDIGQHCQVEHCRQRDFLPFVCDDCSGIFCLEHRSRESHGCPEVTVINERLKTDQHTSYPCSFKDCAERELVAVICPYCEKNFCLRHRHQSDHECEKLEIPKPRMAATQKLVKDIIDSKTGETASKRWKGAKNSETAAKVALMKLKMHADGDKSLPQTERIYFQVFLPKGSKEKSKPMFFCHRWSIGKAIDFAASLARLKNDNNKFTAKVTSHYNNISILIKVL

SEQ ID NO: 8521 - protein, 410 aa, Homo sapiens
MAAEIHSRPQSSRPVLLSKIEGHQDAVTAALLIPKEDGVITASEDRTIRVWLKRDSGQYWPSIYHTMASPCSAMAYHHDSRRIFVGQDNGAVMEFHVSEDFNKMNFIKTYPAHQNRVSAIIFSLATEWVISTGHDKCVSWMCTRSGNMLGRHFFTSWASCLQYDFDTQYAFVGDYSGQITLLKLEQNTCSVITTLKGHEGSVACLWWDPIQRLLFSGASDNSIIMWDIGGRKGRTLLLQGHHDKVQSLCYLQLTRQLVSCSSDGGIAVWNMDVSREEAPQWLESDSCQKCEQPFFWNIKQMWDTKTLGLRQHHCRKCGQAVCGKCSSKRSSYPVMGFEFQVRVCDSCYDSIKDEDRTSLATFHEGKHNISHMSMDIARGLMVTCGTDRIVKIWDMTPVVGCSLATGFSPH

SEQ ID NO: 8522 - protein, 180 aa, Homo sapiens
MGDKKSPTRPKRQPKPSSDEGYWDCSVCTFRNSAEAFKCMMCDVRKGTSTRKPRPVSQLVAQQVTQQFVPPTQSKKEKKDKVEKEKSEKETTSKKNSHKKTRPRLKNVDRSSAQHLEVTVGDLTVIITDFKEKTKSPPASSAASADQHSQSGSSSDNTERGMSRSSSPRGEASSLNGESH

SEQ ID NO: 8523 - protein, 204 aa, Homo sapiens
MGDKKSPTRPKRQPKPSSDEGYWDCSVCTFRNSAEAFKCMMCDVRKGTSTRSTLFEVIVSASRTKEPLKFPISGRKPRPVSQLVAQQVTQQFVPPTQSKKEKKDKVEKEKSEKETTSKKNSHKKTRPRLKNVDRSSAQHLEVTVGDLTVIITDFKEKTKSPPASSAASADQHSQSGSSSDNTERGMSRSSSPRGEASSLNGESH

SEQ ID NO: 8524 - protein, 138 aa, Homo sapiens
MGDKKSPTRKPRPVSQLVAQQVTQQFVPPTQSKKEKKDKVEKEKSEKETTSKKNSHKKTRPRLKNVDRSSAQHLEVTVGDLTVIITDFKEKTKSPPASSAASADQHSQSGSSSDNTERGMSRSSSPRGEASSLNGESH

SEQ ID NO: 8525 - protein, 117 aa, Homo sapiens
MGDKKSPTRPKRQPKPSSDEGYWDCSVCTFRNSAEAFKCMMCDVRKGTSTRDSKEGGKLVSYSTASLGVRGTLRNRVGGGSSEEKKQAEYLAPGRRRNIVHRGVGPGQRSGPSLKEA

SEQ ID NO: 8526 - protein, 478 aa, Homo sapiens
MGRKKKKQLKPWCWYCNRDFDDEKILIQHQKAKHFKCHICHKKLYTGPGLAIHCMQVHKETIDAVPNAIPGRTDIELEIYGMEGIPEKDMDERRRLLEQKTQESQKKKQQDDSDEYDDDDSAASTSFQPQPVQPQQGYIPPMAQPGLPPVPGAPGMPPGIPPLMPGVPPLMPGMPPVMPGMPPGMMPMGGMMPPGPGIPPLMPGMPPGMPPPVPRPGIPPMTQAQAVSAPGILNRPPAPTATVPAPQPPVTKPLFPSAGQMGTPVTSSSTASSNSESLSASSKALFPSTAQAQAAVQGPVGTDFKPLNSTPATTTEPPKPTFPAYTQSTASTTSTTNSTAAKPAASITSKPATLTTTSATSKLIHPDEDISLEERRAQLPKYQRNLPRPGQAPIGNPPVGPIGGMMPPQPGIPQQQGMRPPMPPHGQYGGHHQGMPGYLPGAMPPYGQGPPMVPPYQGGPPRPPMGMRPPVMSQGGRY

SEQ ID NO: 8527 - protein, 463 aa, Homo sapiens
MGRKKKKQLKPWCWYCNRDFDDEKILIQHQKAKHFKCHICHKKLYTGPGLAIHCMQVHKETIDAVPNAIPGRTDIELEIYGMEGIPEKDMDERRRLLEQKTQESQKKKQQDDSDEYDDDDSAASTSFQPQPVQPQQGYIPPMAQPGLPPVPGAPGMPPGIPPLMPGVPPLMPGMPPVMPGMPPGLHHQRKYTQSFCGENIMMPMGGMMPPGPGIPPLMPGMPPGMPPPVPRPGIPPMTQAQAVSAPGILNRPPAPTATVPAPQPPVTKPLFPSAGQAQAAVQGPVGTDFKPLNSTPATTTEPPKPTFPAYTQSTASTTSTTNSTAAKPAASITSKPATLTTTSATSKLIHPDEDISLEERRAQLPKYQRNLPRPGQAPIGNPPVGPIGGMMPPQPGIPQQQGMRPPMPPHGQYGGHHQGMPGYLPGAMPPYGQGPPMVPPYQGGPPRPPMGMRPPVMSQGGRY

SEQ ID NO: 8528 - protein, 395 aa, Homo sapiens
MGRKKKKQLKPWCWYCNRDFDDEKILIQHQKAKHFKCHICHKKLYTGLPPVPGAPGMPPGIPPLMPGVPPLMPGMPPVMPGMPPGLHHQRKYTQSFCGENIMMPMGGMMPPGPGIPPLMPGMPPGMPPPVPRPGIPPMTQAQAVSAPGILNRPPAPTATVPAPQPPVTKPLFPSAGQMGTPVTSSSTASSNSESLSASSKALFPSTAQAQAAVQGPVGTDFKPLNSTPATTTEPPKPTFPAYTQSTASTTSTTNSTAAKPAASITSKPATLTTTSATSKLIHPDEDISLEERRAQLPKYQRNLPRPGQAPIGNPPVGPIGGMMPPQPGIPQQQGMRPPMPPHGQYGGHHQGMPGYLPGAMPPYGQGPPMVPPYQGGPPRPPMGMRPPVMSQGGRY

SEQ ID NO: 8529 - protein, 494 aa, Homo sapiens
MGRKKKKQLKPWCWYCNRDFDDEKILIQHQKAKHFKCHICHKKLYTGPGLAIHCMQVHKETIDAVPNAIPGRTDIELEIYGMEGIPEKDMDERRRLLEQKTQESQKKKQQDDSDEYDDDDSAASTSFQPQPVQPQQGYIPPMAQPGLPPVPGAPGMPPGIPPLMPGVPPLMPGMPPVMPGMPPGLHHQRKYTQSFCGENIMMPMGGMMPPGPGIPPLMPGMPPGMPPPVPRPGIPPMTQAQAVSAPGILNRPPAPTATVPAPQPPVTKPLFPSAGQMGTPVTSSSTASSNSESLSASSKALFPSTAQAQAAVQGPVGTDFKPLNSTPATTTEPPKPTFPAYTQSTASTTSTTNSTAAKPAASITSKPATLTTTSATSKLIHPDEDISLEERRAQLPKYQRNLPRPGQAPIGNPPVGPIGGMMPPQPGIPQQQGMRPPMPPHGQYGGHHQGMPGYLPGAMPPYGQGPPMVPPYQGGPPRPPMGMRPPVMSQGGRY

SEQ ID NO: 8530 - protein, 564 aa, Homo sapiens
MLGFPPGRPQLPVQLRPQTRMATALRDPASGSVTFEDVAVYFSWEEWDLLDEAQKHLYFDVMLENFALTSSLGCWCGVEHEETPSEQRISGERVPQFRTSKEGSSSQNADSCEICCLVLRDILHLAEHQGTNCGQKLHTCGKQFYISANLQQHQRQHITEAPFRSYVDTASFTQSCIVHVSEKPFTCREIRKDFLANMRFLHQDATQTGEKPNNSNKCAVAFYSGKSHHNWGKCSKAFSHIDTLVQDQRILTREGLFECSKCGKACTRRCNLIQHQKVHSEERPYECNECGKFFTYYSSFIIHQRVHTGERPYACPECGKSFSQIYSLNSHRKVHTGERPYECGECGKSFSQRSNLMQHRRVHTGERPYECSECGKSFSQNFSLIYHQRVHTGERPHECNECGKSFSRSSSLIHHRRLHTGERPYECSKCGKSFKQSSSFSSHRKVHTGERPYVCGECGKSFSHSSNLKNHQRVHTGERPVECSECSKSFSCKSNLIKHLRVHTGERPYECSECGKSFSQSSSLIQHRRVHTGKRPYQCSQCGKSFGCKSVLIQHQRVHIGEKP

SEQ ID NO: 8531 - protein, 555 aa, Homo sapiens
MLENFALTSSLGLISSWSHVVAQLGLGEVPSVLHRMFMTPASARWDQRGPGLHEWHLGKGMSSGCWCGVEHEETPSEQRISGERVPQFRTSKEGSSSQNADSCEICCLVLRDILHLAEHQGTNCGQKLHTCGKQFYISANLQQHQRQHITEAPFRSYVDTASFTQSCIVHVSEKPFTCREIRKDFLANMRFLHQDATQTGEKPNNSNKCAVAFYSGKSHHNWGKCSKAFSHIDTLVQDQRILTREGLFECSKCGKACTRRCNLIQHQKVHSEERPYECNECGKFFTYYSSFIIHQRVHTGERPYACPECGKSFSQIYSLNSHRKVHTGERPYECGECGKSFSQRSNLMQHRRVHTGERPYECSECGKSFSQNFSLIYHQRVHTGERPHECNECGKSFSRSSSLIHHRRLHTGERPYECSKCGKSFKQSSSFSSHRKVHTGERPYVCGECGKSFSHSSNLKNHQRVHTGERPVECSECSKSFSCKSNLIKHLRVHTGERPYECSECGKSFSQSSSLIQHRRVHTGKRPYQCSQCGKSFGCKSVLIQHQRVHIGEKP

SEQ ID NO: 8532 - protein, 576 aa, Homo sapiens
MRTLRQREVEYFSKATQLVRGSTKDRGAQVPIATEVLFKLTQGSVTFEDVAVYFSWEEWDLLDEAQKHLYFDVMLENFALTSSLGCWCGVEHEETPSEQRISGERVPQFRTSKEGSSSQNADSCEICCLVLRDILHLAEHQGTNCGQKLHTCGKQFYISANLQQHQRQHITEAPFRSYVDTASFTQSCIVHVSEKPFTCREIRKDFLANMRFLHQDATQTGEKPNNSNKCAVAFYSGKSHHNWGKCSKAFSHIDTLVQDQRILTREGLFECSKCGKACTRRCNLIQHQKVHSEERPYECNECGKFFTYYSSFIIHQRVHTGERPYACPECGKSFSQIYSLNSHRKVHTGERPYECGECGKSFSQRSNLMQHRRVHTGERPYECSECGKSFSQNFSLIYHQRVHTGERPHECNECGKSFSRSSSLIHHRRLHTGERPYECSKCGKSFKQSSSFSSHRKVHTGERPYVCGECGKSFSHSSNLKNHQRVHTGERPVECSECSKSFSCKSNLIKHLRVHTGERPYECSECGKSFSQSSSLIQHRRVHTGKRPYQCSQCGKSFGCKSVLIQHQRVHIGEKP

SEQ ID NO: 8533 - protein, 568 aa, Homo sapiens
MISAYCNLHLLGSSDSPASASQVAGTTGMRHHAQGSVTFEDVAVYFSWEEWDLLDEAQKHLYFDVMLENFALTSSLGCWCGVEHEETPSEQRISGERVPQFRTSKEGSSSQNADSCEICCLVLRDILHLAEHQGTNCGQKLHTCGKQFYISANLQQHQRQHITEAPFRSYVDTASFTQSCIVHVSEKPFTCREIRKDFLANMRFLHQDATQTGEKPNNSNKCAVAFYSGKSHHNWGKCSKAFSHIDTLVQDQRILTREGLFECSKCGKACTRRCNLIQHQKVHSEERPYECNECGKFFTYYSSFIIHQRVHTGERPYACPECGKSFSQIYSLNSHRKVHTGERPYECGECGKSFSQRSNLMQHRRVHTGERPYECSECGKSFSQNFSLIYHQRVHTGERPHECNECGKSFSRSSSLIHHRRLHTGERPYECSKCGKSFKQSSSFSSHRKVHTGERPYVCGECGKSFSHSSNLKNHQRVHTGERPVECSECSKSFSCKSNLIKHLRVHTGERPYECSECGKSFSQSSSLIQHRRVHTGKRPYQCSQCGKSFGCKSVLIQHQRVHIGEKP

SEQ ID NO: 8534 - protein, 503 aa, Homo sapiens
MLENFALTSSLGCWCGVEHEETPSEQRISGERVPQFRTSKEGSSSQNADSCEICCLVLRDILHLAEHQGTNCGQKLHTCGKQFYISANLQQHQRQHITEAPFRSYVDTASFTQSCIVHVSEKPFTCREIRKDFLANMRFLHQDATQTGEKPNNSNKCAVAFYSGKSHHNWGKCSKAFSHIDTLVQDQRILTREGLFECSKCGKACTRRCNLIQHQKVHSEERPYECNECGKFFTYYSSFIIHQRVHTGERPYACPECGKSFSQIYSLNSHRKVHTGERPYECGECGKSFSQRSNLMQHRRVHTGERPYECSECGKSFSQNFSLIYHQRVHTGERPHECNECGKSFSRSSSLIHHRRLHTGERPYECSKCGKSFKQSSSFSSHRKVHTGERPYVCGECGKSFSHSSNLKNHQRVHTGERPVECSECSKSFSCKSNLIKHLRVHTGERPYECSECGKSFSQSSSLIQHRRVHTGKRPYQCSQCGKSFGCKSVLIQHQRVHIGEKP

SEQ ID NO: 8535 - protein, 544 aa, Homo sapiens
MATALRDPASGSVTFEDVAVYFSWEEWDLLDEAQKHLYFDVMLENFALTSSLGCWCGVEHEETPSEQRISGERVPQFRTSKEGSSSQNADSCEICCLVLRDILHLAEHQGTNCGQKLHTCGKQFYISANLQQHQRQHITEAPFRSYVDTASFTQSCIVHVSEKPFTCREIRKDFLANMRFLHQDATQTGEKPNNSNKCAVAFYSGKSHHNWGKCSKAFSHIDTLVQDQRILTREGLFECSKCGKACTRRCNLIQHQKVHSEERPYECNECGKFFTYYSSFIIHQRVHTGERPYACPECGKSFSQIYSLNSHRKVHTGERPYECGECGKSFSQRSNLMQHRRVHTGERPYECSECGKSFSQNFSLIYHQRVHTGERPHECNECGKSFSRSSSLIHHRRLHTGERPYECSKCGKSFKQSSSFSSHRKVHTGERPYVCGECGKSFSHSSNLKNHQRVHTGERPVECSECSKSFSCKSNLIKHLRVHTGERPYECSECGKSFSQSSSLIQHRRVHTGKRPYQCSQCGKSFGCKSVLIQHQRVHIGEKP

SEQ ID NO: 8536 - protein, 577 aa, Homo sapiens
MLGFPPGRPQLPVQLRPQTRMATALRDPASVPIATEVLFKLTQGSVTFEDVAVYFSWEEWDLLDEAQKHLYFDVMLENFALTSSLGCWCGVEHEETPSEQRISGERVPQFRTSKEGSSSQNADSCEICCLVLRDILHLAEHQGTNCGQKLHTCGKQFYISANLQQHQRQHITEAPFRSYVDTASFTQSCIVHVSEKPFTCREIRKDFLANMRFLHQDATQTGEKPNNSNKCAVAFYSGKSHHNWGKCSKAFSHIDTLVQDQRILTREGLFECSKCGKACTRRCNLIQHQKVHSEERPYECNECGKFFTYYSSFIIHQRVHTGERPYACPECGKSFSQIYSLNSHRKVHTGERPYECGECGKSFSQRSNLMQHRRVHTGERPYECSECGKSFSQNFSLIYHQRVHTGERPHECNECGKSFSRSSSLIHHRRLHTGERPYECSKCGKSFKQSSSFSSHRKVHTGERPYVCGECGKSFSHSSNLKNHQRVHTGERPVECSECSKSFSCKSNLIKHLRVHTGERPYECSECGKSFSQSSSLIQHRRVHTGKRPYQCSQCGKSFGCKSVLIQHQRVHIGEKP

SEQ ID NO: 8537 - protein, 629 aa, Homo sapiens
MLGFPPGRPQLPVQLRPQTRMATALRDPASVPIATEVLFKLTQGSVTFEDVAVYFSWEEWDLLDEAQKHLYFDVMLENFALTSSLGLISSWSHVVAQLGLGEVPSVLHRMFMTPASARWDQRGPGLHEWHLGKGMSSGCWCGVEHEETPSEQRISGERVPQFRTSKEGSSSQNADSCEICCLVLRDILHLAEHQGTNCGQKLHTCGKQFYISANLQQHQRQHITEAPFRSYVDTASFTQSCIVHVSEKPFTCREIRKDFLANMRFLHQDATQTGEKPNNSNKCAVAFYSGKSHHNWGKCSKAFSHIDTLVQDQRILTREGLFECSKCGKACTRRCNLIQHQKVHSEERPYECNECGKFFTYYSSFIIHQRVHTGERPYACPECGKSFSQIYSLNSHRKVHTGERPYECGECGKSFSQRSNLMQHRRVHTGERPYECSECGKSFSQNFSLIYHQRVHTGERPHECNECGKSFSRSSSLIHHRRLHTGERPYECSKCGKSFKQSSSFSSHRKVHTGERPYVCGECGKSFSHSSNLKNHQRVHTGERPVECSECSKSFSCKSNLIKHLRVHTGERPYECSECGKSFSQSSSLIQHRRVHTGKRPYQCSQCGKSFGCKSVLIQHQRVHIGEKP

SEQ ID NO: 8538 - protein, 511 aa, Homo sapiens
MAAAEAVHHIHLQNFSRSLLETLNGQRLGGHFCDVTVRIREASLRAHRCVLAAGSPFFQDKLLLGHSEIRVPPVVPAQTVRQLVEFLYSGSLVVAQGEALQVLTAASVLRIQTVIDECTQIIARARAPGTSAPTPLPTPVPPPLAPAQLRHRLRHLLAARPPGHPGAAHSRKQRQPARLQLPAPPTPAKAEGPDADPSLSAAPDDRGDEDDEESDDETDGEDGEGGGPGEGQAPPSFPDCAAGFLTAAADSACEEPPAPTGLADYSGAGRDFLRGAGSAEDVFPDSYVSTWHDEDGAVPEGCPTETPVQPDCILSGSRPPGVKTPGPPVALFPFHLGAPGPPAPPPSAPSGPAPAPPPAFYPTLQPEAAPSTQLGEVPAPSAAPTTAPSGTPARTPGAEPPTYECSHCRKTFSSRKNYTKHMFIHSGEKPHQCAVCWRSFSLRDYLLKHMVTHTGVRAFQCAVCAKRFTQKSSLNVHMRTHRPERAPCPACGKVFSHRALLERHLAAHPAP

SEQ ID NO: 8539 - protein, 224 aa, Homo sapiens
MADEQEIMCKLESIKEIRNKTLQMEKIKARLKAEFEALESEERHLKEYKQEMDLLLQEKMAHVEELRLIHADINVMENTIKQSENDLNKLLESTRRLHDEYKPLKEHVDALRMTLGLQRLPDLCEEEEKLSLDYFEKQKAEWQTEPQEPPIPESLAAAAAAAQQLQVARKQDTRQTATFRQQPPPMKACLSCHQQIHRNAPICPLCKAKSRSRNPKKPKRKQDE

SEQ ID NO: 8540 - protein, 133 aa, Homo sapiens
MADEQEIMCKLESIKEIRNKTLQMEKIKARLKAEFEALESEERHLKEYKQEMDLLLQEKMAHVEELRLIHADINVMENTIKQSENDLNKLLESTRRLHDEYKPLKEHVDALRMTLGLQRLPDLCEEEEKLSLE

SEQ ID NO: 8541 - protein, 201 aa, Homo sapiens
MEKIKARLKAEFEALESEERHLKEYKQEMDLLLQEKMAHVEELRLIHADINVMENTIKQSENDLNKLLESTRRLHDEYKPLKEHVDALRMTLGLQRLPDLCEEEEKLSLDYFEKQKAEWQTEPQEPPIPESLAAAAAAAQQLQVARKQDTRQTATFRQQPPPMKACLSCHQQIHRNAPICPLCKAKSRSRNPKKPKRKQDE

SEQ ID NO: 8542 - protein, 176 aa, Homo sapiens
MADEQEIMCKLESIKEIRNKTLQMEKIKARLKAEFEALESEERHLKEYKQEMDLLLQEKMAHVEELRLIHADINVMENTIKQSENDLNKLLESTRRLHDEYKPLKEHVDALRMTLGLQRLPDLCEEEEKLSLEPACHVTSKFTGMHLYALFARPRVGPGTPKSRNGSRMNKEREST

SEQ ID NO: 8543 - protein, 219 aa, Homo sapiens
MIHFHLIFLYVARNKTLQMEKIKARLKAEFEALESEERHLKEYKQEMDLLLQEKMAHVEELRLIHADINVMENTIKQSENDLNKLLESTRRLHDEYKPLKEHVDALRMTLGLQRLPDLCEEEEKLSLDYFEKQKAEWQTEPQEPPIPESLAAAAAAAQQLQVARKQDTRQTATFRQQPPPMKACLSCHQQIHRNAPICPLCKAKSRSRNPKKPKRKQDE

SEQ ID NO: 8544 - protein, 412 aa, Homo sapiens
MAKRPGPPGSREMGLLTFRDIAIEFSLAEWQCLDHAQQNLYRDVMLENYRNLFSLGMTVSKPDLIACLEQNKEPQNIKRNEMAAKHPVTCSHFNQDLQPEQSIKDSLQKVIPRTYGKCGHENLQLKKCCKRVDECEVHKGGYNDLNQCLSNTQNKIFQTHKCVKVFSKFSNSNRHNARYTGKKHLKCKKYGKSFCMFSHLNQHQIIHTKEKSYKCEECGKSFNHSSSGTTHKRILTGEKPYRCEECGKAFRWPSNLTRHKRIHTGEKPYACEECGQAFRRSSTLTNHKRIHTGERPYKCEECGKAFSVSSALIYHKRIHTGEKPYTCEECGKAFNCSSTLKTHKIIHTGEKPYTCEECGRTFNCSSTVKAHKRIHTGEKPYKCEECDKAFKWHSSLAKHKIIHTGEKPYKCK

SEQ ID NO: 8545 - protein, 707 aa, Homo sapiens
MAAEVYFGDLELFEPFDHPEESIPKPVHTRFKDDDGDEEDENGVGDAELRERLRQCEETIEQLRAENQELKRKLNILTRPSGILVNDTKLDGPILQILFMNNAISKQYHQEIEEFVSNLVKRFEEQQKNDVEKTSFNLLPQPSSIVLEEDHKVEESCAIKNNKEAFSVVGSVLYFTNFCLDKLGQPLLNENPQLSEGWEIPKYHQVFSHIVSLEGQEIQVKAKRPKPHCFNCGSEEHQMKDCPMPRNAARISEKRKEYMDACGEANNQNFQQRYHAEEVEERFGRFKPGVISEELQDALGVTDKSLPPFIYRMRQLGYPPGWLKEAELENSGLALYDGKDGTDGETEVGEIQQNKSVTYDLSKLVNYPGFNISTPRGIPDEWRIFGSIPMQACQQKDVFANYLTSNFQAPGVKSGNKRSSSHSSPGSPKKQKNESNSAGSPADMELDSDMEVPHGSQSSESFQFQPPLPPDTPPLPRGTPPPVFTPPLPKGTPPLTPSDSPQTRTASGAVDEDALTLEELEEQQRRIWAALEQAESVNSDSDVPVDTPLTGNSVASSPCPNELDLPVPEGKTSEKQTLDEPEVPEIFTKKSEAGHASSPDSEVTSLCQKEKAELAPVNTEGALLDNGSVVPNCDISNGGSQKLFPADTSPSTATKIHSPIPDMSKFATGITPFEFENMAESTGMYLRIRSLLKNSPRNQQKNKKASE

SEQ ID NO: 8546 - protein, 469 aa, Homo sapiens
MKDCPMPRNAARISEKRKEYMDACGEANNQNFQQRYHAEEVEERFGRFKPGVISEELQDALGVTDKSLPPFIYRMRQLGYPPGWLKEAELENSGLALYDGKDGTDGETEVGEIQQNKSVTYDLSKLVNYPGFNISTPRGIPDEWRIFGSIPMQACQQKDVFANYLTSNFQAPGVKSGNKRSSSHSSPGSPKKQKNESNSAGSPADMELDSDMEVPHGSQSSESFQFQPPLPPDTPPLPRGTPPPVFTPPLPKGTPPLTPSDSPQTRTASGAVDEDALTLEELEEQQRRIWAALEQAESVNSDSDVPVDTPLTGNSVASSPCPNELDLPVPEGKTSEKQTLDEPEVPEIFTKKSEAGHASSPDSEVTSLCQKEKAELAPVNTEGALLDNGSVVPNCDISNGGSQKLFPADTSPSTATKIHSPIPDMSKFATGITPFEFENMAESTGMYLRIRSLLKNSPRNQQKNKKASE

SEQ ID NO: 8547 - protein, 510 aa, Homo sapiens
MAMRELNADSCSSPQMGAMWETSGSVKENSSQSKKYSTKIENLGPESACRHFWSFRYHEATGPLETISQLQKLCHQWLRPEIHSKEQILEMLVLEQFLSILPKETQNWVQKHHPQNVKQALVLVEFLQREPDGTKNEVTAHELGKEAVLLGGTAVAPGFKWKPAEPQPMGVFQKEYWNTYRVLQEQLGWNTHKETQPVYERAVHDQQMLALSEQKRIKHWKMASKLILPESLSLLTFEDVAVYFSEEEWQLLNPLEKTLYNDVMQDIYETVISLGLKLKNDTGNDHPISVSTSEIQTSGCEVSKKTRMKIAQKTMGRENPGDTHSVQKWHRAFPRKKRKKPATCKQELPKLMDLHGKGPTGEKPFKCQECGKSFRVSSDLIKHHRIHTGEKPYKCQQCDRRFRWSSDLNKHFMTHQGIKPYRCSWCGKSFSHNTNLHTHQRIHTGEKPFKCDECGKRFIQNSHLIKHQRTHTGEQPYTCSLCKRNFSRRSSLLRHQKLHRRREACLVSPN

SEQ ID NO: 8548 - protein, 415 aa, Homo sapiens
MAMRELNADSCSSPQMGAMWETSGSVKENSSQSKKYSTKIENLGPESACRHFWSFRYHEATGPLETISQLQKLCHQWLRPEIHSKEQILEMLVLEQFLSILPKETQNWVQKHHPQNVKQALVLVEFLQREPDGTKNESLLTFEDVAVYFSEEEWQLLNPLEKTLYNDVMQDIYETVISLGLKLKNDTGNDHPISVSTSEIQTSGCEVSKKTRMKIAQKTMGRENPGDTHSVQKWHRAFPRKKRKKPATCKQELPKLMDLHGKGPTGEKPFKCQECGKSFRVSSDLIKHHRIHTGEKPYKCQQCDRRFRWSSDLNKHFMTHQGIKPYRCSWCGKSFSHNTNLHTHQRIHTGEKPFKCDECGKRFIQNSHLIKHQRTHTGEQPYTCSLCKRNFSRRSSLLRHQKLHRRREACLVSPN

SEQ ID NO: 8549 - protein, 871 aa, Homo sapiens
MAEEFVTLKDVGMDFTLGDWEQLGLEQGDTFWDTALDNCQDLFLLDPPRPNLTSHPDGSEDLEPLAGGSPEATSPDVTETKNSPLMEDFFEEGFSQEIIEMLSKDGFWNSNFGEACIEDTWLDSLLGDPESLLRSDIATNGESPTECKSHELKRGLSPVSTVSTGEDSMVHNVSEKTLTPAKSKEYRGEFFSYSDHSQQDSVQEGEKPYQCSECGKSFSGSYRLTQHWITHTREKPTVHQECEQGFDRNASLSVYPKTHTGYKFYVCNEYGTTFSQSTYLWHQKTHTGEKPCKSQDSDHPPSHDTQPGEHQKTHTDSKSYNCNECGKAFTRIFHLTRHQKIHTRKRYECSKCQATFNLRKHLIQHQKTHAAKTTSECQECGKIFRHSSLLIEHQALHAGEEPYKCNERGKSFRHNSTLKIHQRVHSGEKPYKCSECGKAFHRHTHLNEHRRIHTGYRPHKCQECVRSFSRPSHLMRHQAIHTAEKPYSCAECKETFSDNNRLVQHQKMHTVKTPYECQECGERFICGSTLKCHESVHAREKQGFFVSGKILDQNPEQKEKCFKCNKCEKTFSCSKYLTQHERIHTRGVKPFECDQCGKAFGQSTRLIHHQRIHSRVRLYKWGEQGKAISSASLIKLQSFHTKEHPFKCNECGKTFSHSAHLSKHQLIHAGENPFKCSKCDRVFTQRNYLVQHERTHARKKPLVCNECGKTFRQSSCLSKHQRIHSGEKPYVCDYCGKAFGLSAELVRHQRIHTGEKPYVCQECGKAFTQSSCLSIHRRVHTGEKPYRCGECGKAFAQKANLTQHQRIHTGEKPYSCNVCGKAFVLSAHLNQHLRVHTQETLYQCQRCQKAFRCHSSLSRHQRVHNKQQYCL

SEQ ID NO: 8550 - protein, 563 aa, Homo sapiens
MMTAESREATGLSPQAAQEKDGIVIVKVEEEDEEDHMWGQDSTLQDTPPPDPEIFRQRFRRFCYQNTFGPREALSRLKELCHQWLRPEINTKEQILELLVLEQFLSILPKELQVWLQEYRPDSGEEAVTLLEDLELDLSGQQVPGQVHGPEMLARGMVPLDPVQESSSFDLHHEATQSHFKHSSRKPRLLQSRALPAAHIPAPPHEGSPRDQAMASALFTADSQAMVKIEDMAVSLILEEWGCQNLARRNLSRDNRQENYGSAFPQGGENRNENEESTSKAETSEDSASRGETTGRSQKEFGEKRDQEGKTGERQQKNPEEKTRKEKRDSGPAIGKDKKTITGERGPREKGKGLGRSFSLSSNFTTPEEVPTGTKSHRCDECGKCFTRSSSLIRHKIIHTGEKPYECSECGKAFSLNSNLVLHQRIHTGEKPHECNECGKAFSHSSNLILHQRIHSGEKPYECNECGKAFSQSSDLTKHQRIHTGEKPYECSECGKAFNRNSYLILHRRIHTREKPYKCTKCGKAFTRSSTLTLHHRIHARERASEYSPASLDAFGAFLKSCV

SEQ ID NO: 8551 - protein, 644 aa, Homo sapiens
MAEAVAAPISPWTMAATIQAMERKIESQAARLLSLEGRTGMAEKKLADCEKTAVEFGNQLEGKWAVLGTLLQEYGLLQRRLENVENLLRNRNFWILRLPPGSKGESPKEWGKLEDWQKELYKHVMRGNYETLVSLDYAISKPEVLSQIEQGKEPCNWRRPGPKIPDVPVDPSPGSGPPVPAPDLLMQIKQEGELQLQEQQALGVEAWAAGQPDIGEEPWGLSQLDSGAGDISTDATSGVHSNFSTTIPPTSWQTDLPPHHPSSACSDGTLKLNTAASTEDVKIVIKTEVQEEEVVATPVHPTDLEAHGTLFGPGQATRFFPSPAQEGAWESQGSSFPSQDPVLGLREPARPERDMGELSPAVAQEETPPGDWLFGGVRWGWNFRCKPPVGLNPRTGPEGLPYSSPDNGEAILDPSQAPRPFNEPCKYPGRTKGFGHKPGLKKHPAAPPGGRPFTCATCGKSFQLQVSLSAHQRSCGAPDGSGPGTGGGGSGSGGGGGGSGGGSARDGSALRCGECGRCFTRPAHLIRHRMLHTGERPFPCTECEKRFTERSKLIDHYRTHTGVRPFTCTVCGKSFIRKDHLRKHQRNHAAGAKTPARGQPLPTPPAPPDPFKSPASKGPLASTDLVTDWTCGLSVLGPTDGGDM

SEQ ID NO: 8552 - protein, 645 aa, Homo sapiens
MAEAVAAPISPWTMAATIQAMERKIESQAARLLSLEGRTGMAEKKLADCEKTAVEFGNQLEGKWAVLGTLLQEYGLLQRRLENVENLLRNRNFWILRLPPGSKGESPKEWGKLEDWQKELYKHVMRGNYETLVSLDYAISKPEVLSQIEQGKEPCNWRRPGPKIPDVPVDPSPGSGPPVPAPDLLMQIKQEGELQLQEQQALGVEAWAAGQPDIGEEPWGLSQLDSGAGDISTDATSGVHSNFSTTIPPTSWQTDLPPHHPSSACSDGTLKLNTAASTEADVKIVIKTEVQEEEVVATPVHPTDLEAHGTLFGPGQATRFFPSPAQEGAWESQGSSFPSQDPVLGLREPARPERDMGELSPAVAQEETPPGDWLFGGVRWGWNFRCKPPVGLNPRTGPEGLPYSSPDNGEAILDPSQAPRPFNEPCKYPGRTKGFGHKPGLKKHPAAPPGGRPFTCATCGKSFQLQVSLSAHQRSCGAPDGSGPGTGGGGSGSGGGGGGSGGGSARDGSALRCGECGRCFTRPAHLIRHRMLHTGERPFPCTECEKRFTERSKLIDHYRTHTGVRPFTCTVCGKSFIRKDHLRKHQRNHAAGAKTPARGQPLPTPPAPPDPFKSPASKGPLASTDLVTDWTCGLSVLGPTDGGDM

SEQ ID NO: 8553 - protein, 459 aa, Homo sapiens
MQIKQEGELQLQEQQALGVEAWAAGQPDIGEEPWGLSQLDSGAGDISTDATSGVHSNFSTTIPPTSWQTDLPPHHPSSACSDGTLKLNTAASTEDVKIVIKTEVQEEEVVATPVHPTDLEAHGTLFGPGQATRFFPSPAQEGAWESQGSSFPSQDPVLGLREPARPERDMGELSPAVAQEETPPGDWLFGGVRWGWNFRCKPPVGLNPRTGPEGLPYSSPDNGEAILDPSQAPRPFNEPCKYPGRTKGFGHKPGLKKHPAAPPGGRPFTCATCGKSFQLQVSLSAHQRSCGAPDGSGPGTGGGGSGSGGGGGGSGGGSARDGSALRCGECGRCFTRPAHLIRHRMLHTGERPFPCTECEKRFTERSKLIDHYRTHTGVRPFTCTVCGKSFIRKDHLRKHQRNHAAGAKTPARGQPLPTPPAPPDPFKSPASKGPLASTDLVTDWTCGLSVLGPTDGGDM

SEQ ID NO: 8554 - protein, 570 aa, Homo sapiens
MESLGLHTVTLSDGTTAYVQQAVKGEKLLEGQVIQLEDGTTAYIHQVTVQKEALSFEDGQPVQLEDGSMAYIHRTPREGYDPSTLEAVQLEDGSTAYIHHPVAVPSESTILAVQTEVGLEDLAAEDDEGFSADAVVALEQYASKVLHDSQIPRNGKGQQVGDRAFRCGYKGCGRLYTTAHHLKVHERAHTGDRPYRCDFPSCGKAFATGYGLKSHVRTHTGEKPYKCPEELCSKAFKTSGDLQKHVRTHTGERPFQCPFEGCGRSFTTSNIRKVHVRTHTGERPYTCPEPHCGRGFTSATNYKNHVRIHTGEKPYVCTVPGCGKRFTEYSSLYKHHVVHTHCKPYTCSTCGKTYRQTSTLAMHKRSAHGELEATEESEQALYEQQQLEAASAAEESPPPKRPRIAYLSEVKEERDDIPAQVAMVTEEDGAPQVALITQDGAQQVSLSPEDLQALGSAISMVTQHGSTTLTIPSPDADLATSGTHTVTMVSADGTQTQPVTIITSGAVVAEDSSVASLRHQQVALLATANGTHIAVQLEEQQTLEEAINVATAAMQQGAVTLETTVSESGC

SEQ ID NO: 8555 - protein, 515 aa, Homo sapiens
MESLGLHTVTLSDGTTAYVQQAVKGEKLLEGQVIQLEDGTTAYIHQVTVQKEALSFEDGQPVQLEDGSMAYIHRTPREGYDPSTLEAVQLEDGSTAYIHHPVAVPSESTILAVQTEVGLEDLAAEDDEGFSADAVVALEQYASKVLHDSQIPRNGKGQQVGDRAFRCGYKGCGRLYTTAHHLKVHERAHTGDRPYRCDFPSCGKAFATGYGLKSHVRTHTGEKPYKCPEELCSKAFKTSGDLQKHVRTHTGERPFQCPFEGCGRSFTTSNIRKVHVRTHTGERPYTCPEPHCGRGFTSATNYKNHVRIHTGEKPYVCTVPGCGKRFTEYSSLYKHHVVHTHCKPYTCSTCGKTYRQTSTLAMHKRSAHGELEATEESEQALYEQQQLEAASAAEESPPPKRPRIAYLSEVKEERDDIPAQVAMVTEEDGAPQVALITQDGAQQVTIITSGAVVAEDSSVASLRHQQVALLATANGTHIAVQLEEQQTLEEAINVATAAMQQGAVTLETTVSESGC

SEQ ID NO: 8556 - protein, 1370 aa, Homo sapiens
MDPSDFPSPFDPLTLPEKPLAGDLPVDMEFGEDLLESQTAPTRGWAPPGPSPSSGALDLLDTPAGLEKDPGVLDGATELLGLGGLLYKAPSPPEVDHGPEGTLAWDAGDQTLEPGPGGQTPEVVPPDPGAGANSCSPEGLLEPLAPDSPITLQSPHIEEEETTSIATARRGSPGQEEELPQGQPQSPNAPPSPSVGETLGDGINSSQTKPGGSSPPAHPSLPGDGLTAKASEKPPERKRSERVRRAEPPKPEVVDSTESIPVSDEDSDAMVDDPNDEDFVPFRPRRSPRMSLRSSVSQRAGRSAVGTKMTCAHCRTPLQKGQTAYQRKGLPQLFCSSSCLTTFSKKPSGKKTCTFCKKEIWNTKDSVVAQTGSGGSFHEFCTSVCLSLYEAQQQRPIPQSGDPADATRCSICQKTGEVLHEVSNGSVVHRLCSDSCFSKFRANKGLKTNCCDQCGAYIYTKTGSPGPELLFHEGQQKRFCNTTCLGAYKKKNTRVYPCVWCKTLCKNFEMLSHVDRNGKTSLFCSLCCTTSYKVKQAGLTGPPRPCSFCRRSLSDPCYYNKVDRTVYQFCSPSCWTKFQRTSPEGGIHLSCHYCHSLFSGKPEVLDWQDQVFQFCCRDCCEDFKRLRGVVSQCEHCRQEKLLHEKLRFSGVEKSFCSEGCVLLYKQDFTKKLGLCCITCTYCSQTCQRGVTEQLDGSTWDFCSEDCKSKYLLWYCKAARCHACKRQGKLLETIHWRGQIRHFCNQQCLLRFYSQQNQPNLDTQSGPESLLNSQSPESKPQTPSQTKVENSNTVRTPEENGNLGKIPVKTRSAPTAPTPPPPPPPATPRKNKAAMCKPLMQNRGVSCKVEMKSKGSQTEEWKPQVIVLPIPVPIFVPVPMHLYCQKVPVPFSMPIPVPVPMFLPTTLESTDKIVETIEELKVKIPSNPLEADILAMAEMIAEAEELDKASSDLCDLVSNQSAEGLLEDCDLFGPARDDVLAMAVKMANVLDEPGQDLEADFPKNPLDINPSVDFLFDCGLVGPEDVSTEQDLPRTMRKGQKRLVLSESCSRDSMSSQPSCTGLNYSYGVNAWKCWVQSKYANGETSKGDELRFGPKPMRIKEDILACSAAELNYGLAQFVREITRPNGERYEPDSIYYLCLGIQQYLLENNRMVNIFTDLYYLTFVQELNKSLSTWQPTLLPNNTVFSRVEEEHLWECKQLGVYSPFVLLNTLMFFNTKFFGLQTAEEHMQLSFTNVVRQSRKCTTPRGTTKVVSIRYYAPVRQRKGRDTGPGKRKREDEAPILEQRENRMNPLRCPVKFYEFYLSKCPESLRTRNDVFYLQPERSCIAESPLWYSVIPMDRSMLESMLNRILAVREIYEELGRPGEEDLD

SEQ ID NO: 8557 - protein, 1358 aa, Homo sapiens
MDPSDFPSPFDPLTLPEKPLAGDLPVDMEFGEDLLESQTAPTRGWAPPGPSPSSGALDLLDTPAGLEKDPGVLDGATELLGLGGLLYKAPSPPEVDHGPEGTLAWDAGDQTLEPGPGGQTPEVVPPDPGAGANSCSPEGLLEPLAPDSPITLQSPHIEEEETTSIATARRGSPGQEEELPQGQPQSPNAPPSPSVGETLGDGINSSQTKPGGSSPPAHPSLPGDGLTAKASEKPPERKRSERVRRAEPPKPEVVDSTESIPVSDEDSDAMVDDPNDEDFVPFRPRRSPRMSLRSSVSQRAGRSAVGTKMTCAHCRTPLQKGQTAYQRKGLPQLFCSSSCLTTFSKKPSGKKTCTFCKKEIWNTKDSVVAQTGSGGSFHEFCTSVCLSLYEAQQQRPIPQSGDPADATRCSICQKTGEVLHEVSNGSVVHRLCSDSCFSKFRANKGLKTNCCDQCGAYIYTKTGSPGPELLFHEGQQKRFCNTTCLGAYKKKNTRVYPCVWCKTLCKNFEMLSHVDRNGKTSLFCSLCCTTSYKVKQAGLTGPPRPCSFCRRSLSDPCYYNKVDRTVYQFCSPSCWTKFQRTSPEGGIHLSCHYCHSLFSGKPEVLDWQDQVFQFCCRDCCEDFKRLRGVVSQCEHCRQEKLLHEKLRFSGVEKSFCSEGCVLLYKQDFTKKLGLCCITCTYCSQTCQRGVTEQLDGSTWDFCSEDCKSKYLLWYCKAARCHACKRQGKLLETIHWRGQIRHFCNQQCLLRFYSQQNQPNLDTQSGPESLLNSQSPESKPQTPSQTKVENSNTIPVKTRSAPTAPTPPPPPPPATPRKNKAAMCKPLMQNRGVSCKVEMKSKGSQTEEWKPQVIVLPIPVPIFVPVPMHLYCQKVPVPFSMPIPVPVPMFLPTTLESTDKIVETIEELKVKIPSNPLEADILAMAEMIAEAEELDKASSDLCDLVSNQSAEGLLEDCDLFGPARDDVLAMAVKMANVLDEPGQDLEADFPKNPLDINPSVDFLFDCGLVGPEDVSTEQDLPRTMRKGQKRLVLSESCSRDSMSSQPSCTGLNYSYGVNAWKCWVQSKYANGETSKGDELRFGPKPMRIKEDILACSAAELNYGLAQFVREITRPNGERYEPDSIYYLCLGIQQYLLENNRMVNIFTDLYYLTFVQELNKSLSTWQPTLLPNNTVFSRVEEEHLWECKQLGVYSPFVLLNTLMFFNTKFFGLQTAEEHMQLSFTNVVRQSRKCTTPRGTTKVVSIRYYAPVRQRKGRDTGPGKRKREDEAPILEQRENRMNPLRCPVKFYEFYLSKCPESLRTRNDVFYLQPERSCIAESPLWYSVIPMDRSMLESMLNRILAVREIYEELGRPGEEDLD

SEQ ID NO: 8558 - protein, 495 aa, Homo sapiens
MDPSDFPSPFDPLTLPEKPLAGDLPVDMEFGEDLLESQTAPTRGWAPPGPSPSSGALDLLDTPAGLEKDPGVLDGATELLGLGGLLYKAPSPPEVDHGPEGTLAWDAGDQTLEPGPGGQTPEVVPPDPGAGANSCSPEGLLEPLAPDSPITLQSPHIEEEETTSIATARRGSPGQEEELPQGQPQSPNAPPSPSVGETLGDGINSSQTKPGGSSPPAHPSLPGDGLTAKASEKPPERKRSERVRRAEPPKPEVVDSTESIPVSDEDSDAMVDDPNDEDFVPFRPRRSPRMSLRSSVSQRAGRSAVGTKMTCAHCRTPLQKGQTAYQRKGLPQLFCSSSCLTTFSKKPSGKKTCTFCKKEIWNTKDSVVAQTGSGGSFHEFCTSVCLSLYEAQQQRPIPQSGDPADATRCSICQKTGEVLHEVSNGSVVHRLCSDSCFSKFRANKGLKTNCCDQCGAYIYTKTGSPGPELLFHEGQQKRFCNTTCLGAYKKVGPRE

SEQ ID NO: 8559 - protein, 396 aa, Homo sapiens
MPRVKAAQAGRQSSAKRHLAEQFAVGEIITDMAKKEWKVGLPIGQGGFGCIYLADMNSSESVGSDAPCVVKVEPSDNGPLFTELKFYQRAAKPEQIQKWIRTRKLKYLGVPKYWGSGLHDKNGKSYRFMIMDRFGSDLQKIYEANAKRFSRKTVLQLSLRILDILEYIHEHEYVHGDIKASNLLLNYKNPDQVYLVDYGLAYRYCPEGVHKEYKEDPKRCHDGTIEFTSIDAHNGVAPSRRGDLEILGYCMIQWLTGHLPWEDNLKDPKYVRDSKIRYRENIASLMDKCFPEKNKPGEIAKYMETVKLLDYTEKPLYENLRDILLQGLKAIGSKDDGKLDLSVVENGGLKAKTITKKRKKEIEESKEPGVEDTEWSNTQTEEAIQTRSRTRKRVQK

SEQ ID NO: 8560 - protein, 617 aa, Homo sapiens
MISPSLELLHSGLCKFPEVEGKMTTFKEAVTFKDVAVVFTEEELGLLDPAQRKLYRDVMLENFRNLLSVGNQPFHQDTFHFLGKEKFWKMKTTSQREGNSGGKIQIEMETVPEAGPHEEWSCQQIWEQIASDLTRSQNSIRNSSQFFKEGDVPCQIEARLSISHVQQKPYRCNECKQSFSDVSVFDLHQQSHSGEKSHTCGECGKSFCYSPALHIHQRVHMGEKCYKCDVCGKEFNQSSHLQTHQRVHTGEKPFKCGQCGKGFHSRSALNVHCKLHTGEKPYNCEECGKAFIHDSQLQEHQRIHTGEKPFKCDICGKSFRVRSRLNRHSMVHTGEKPFRCDTCGKNFRQRSALNSHSMVHIEEKPYKCEQCGKGFICRRDFCKHQMVHTGEKPYNCKECGKTFRWSSCLLNHQQVHSGQKSFKCEECGKGFYTNSRRSSHQRSHNGEKPYNCEECGKDYKRRLDLEFHQRVHTGERPYNCKECGKSFGWASCLLKHQRLHSGEKPFKCEECGKRFTQSSQLHSHQTCHTGEKLYKCEQCEKGYNSKFNLDMHQRVHGGERPYNCKECGKSFGWASCLLKHQRLHSGEKPLKSGVWEEIYSEFTASFTSVSLCGRKAI

SEQ ID NO: 8561 - protein, 833 aa, Homo sapiens
MVHGSVTFRDVAIDFSQEEWECLQPDQRTLYRDVMLENYSHLISLGSSISKPDVITLLEQEKEPWIVVSKETSRWYPDLESKYGPEKISPENDIFEINLPKHVIKQISKTLGLEAFYFRNDSEYRSRFEGRQGHQEGYINQKIISYEEMPAYTHASPIHNTHKPYECKECGKYFSCGSNLIQHQSIHTGEKPYKCKECGKAFQLHIQLTRHQKFHTGEKTFECKECGKAFNLPTQLNRHKNIHTVKKLFECKECGKSFNRSSNLTQHQSIHAGVKPYQCKECGKAFNRGSNLIQHQKIHSNEKPFVCRECEMAFRYHYQLIEHCRIHTGEKPFECKECRKAFTLLTKLVRHQKIHMGEKPFECRECGKAFSLLNQLNRHKNIHTGEKPFECKECGKSFNRSSNLIQHQSIHADVKPYECKECGKGFNRGANLIQHQKIHSNEKPFVCRECEMAFRYHYQLIQHCQIHTGGKPFECKECGKAFSLLTQLARHKNIHTGEKPFECKDCGKAFNRGSNLVQHQSIHTGEKPYECKECGKAFRLHLQLSQHEKTHTGEKPFECKECGKFFRRGSNLNQHRSIHTGKKPFECKECGKAFRLHMHLIRHQKFHTGEKPFECKECGKAFSLHTQLNHHKNIHTGEKPFKCKECGKSFNRVSNLVQHQSIHAGVKPYECKECGKGFSRVSNLIQHQKTHSSAKPFVCKECRKTFRYHYQLTEHYRIHTGEKPFECKECGKAFGLLTQLAQHQIIHTGEKPFKCKECGKAFNRGSNLVQPQSIHTGEKPYECKECGKAFRLHLQLSLHQKLVQVRNPLNVRNVGQPSDISSNLLNIRKFILG

SEQ ID NO: 8562 - protein, 127 aa, Homo sapiens
MPSCDPGPGPACLPTKTFRSYLPRCHRTYSCVHCRAHLAKHDELISKSFQGSHGRAYLFNSVVNVGCGPAEQRLLLTGLHSVADIFCESCKTTLGWKYEQAFETSQKYKEGKYIIEMSHMVKDNGWD

SEQ ID NO: 8563 - protein, 452 aa, Homo sapiens
MAAGEPRSLLFFQKPVTFEDVAVNFTQEEWDCLDASQRVLYQDVMSETFKNLTSVARIFLHKPELITKLEQEEEQWRETRVLQASQAGPPFFCYTCGKCFSRRSYLYSHQFVHNPKLTNSCSQCGKLFRSPKSLSYHRRMHLGERPFCCTLCDKTYCDASGLSRHRRVHLGYRPHSCSVCGKSFRDQSELKRHQKIHQNQEPVDGNQECTLRIPGTQAEFQTPIARSQRSIQGLLDVNHAPVARSQEPIFRTEGPMAQNQASVLKNQAPVTRTQAPITGTLCQDARSNSHPVKPSRLNVFCCPHCSLTFSKKSYLSRHQKAHLTEPPNYCFHCSKSFSSFSRLVRHQQTHWKQKSYLCPICDLSFGEKEGLMDHWRGYKGKDLCQSSHHKCRVILGQWLGFSHDVPTMAGEEWKHGGDQSPPRIHTPRRRGLREKACKGDKTKEAVSILKHK

SEQ ID NO: 8564 - protein, 516 aa, Homo sapiens
MFEQLKPIEPRDCWREARVKKKPVTFEDVAVNFTQEEWDCLDASQRVLYQDVMSETFKNLTSVARIFLHKPELITKLEQEEEQWREFVHLPNTEGLSEGKKKELREQHPSLRDEGTSDDKVFLACRGAGQCPLSAPAGTMDRTRVLQASQAGPPFFCYTCGKCFSRRSYLYSHQFVHNPKLTNSCSQCGKLFRSPKSLSYHRRMHLGERPFCCTLCDKTYCDASGLSRHRRVHLGYRPHSCSVCGKSFRDQSELKRHQKIHQNQEPVDGNQECTLRIPGTQAEFQTPIARSQRSIQGLLDVNHAPVARSQEPIFRTEGPMAQNQASVLKNQAPVTRTQAPITGTLCQDARSNSHPVKPSRLNVFCCPHCSLTFSKKSYLSRHQKAHLTEPPNYCFHCSKSFSSFSRLVRHQQTHWKQKSYLCPICDLSFGEKEGLMDHWRGYKGKDLCQSSHHKCRVILGQWLGFSHDVPTMAGEEWKHGGDQSPPRIHTPRRRGLREKACKGDKTKEAVSILKHK

SEQ ID NO: 8565 - protein, 536 aa, Homo sapiens
MFEQLKPIEPVQKTLPWVGEVAATLQEAMKRDCWREARVKKKPVTFEDVAVNFTQEEWDCLDASQRVLYQDVMSETFKNLTSVARIFLHKPELITKLEQEEEQWREFVHLPNTEGLSEGKKKELREQHPSLRDEGTSDDKVFLACRGAGQCPLSAPAGTMDRTRVLQASQAGPPFFCYTCGKCFSRRSYLYSHQFVHNPKLTNSCSQCGKLFRSPKSLSYHRRMHLGERPFCCTLCDKTYCDASGLSRHRRVHLGYRPHSCSVCGKSFRDQSELKRHQKIHQNQEPVDGNQECTLRIPGTQAEFQTPIARSQRSIQGLLDVNHAPVARSQEPIFRTEGPMAQNQASVLKNQAPVTRTQAPITGTLCQDARSNSHPVKPSRLNVFCCPHCSLTFSKKSYLSRHQKAHLTEPPNYCFHCSKSFSSFSRLVRHQQTHWKQKSYLCPICDLSFGEKEGLMDHWRGYKGKDLCQSSHHKCRVILGQWLGFSHDVPTMAGEEWKHGGDQSPPRIHTPRRRGLREKACKGDKTKEAVSILKHK

SEQ ID NO: 8566 - protein, 300 aa, Homo sapiens
MHSLKKVTFEDVAIDFTQEEWAMMDTSKRKLYRDVMLENISHLVSLGYQISKSYIILQLEQGKELWREGREFLQDQNPDRESALKKKHMISMHPITRKDASTSMTMENSLILEDPFECNDSGEDCTHSSTITQRLLTHSGKKPYVSKQCGKSLRNLFSPKPHKQIHTKGKSYQCNLCEKAYTNCFRLRRHKMTHTGERPYACHLCGKAFTQCSHLRRHEKTHTGERPYKCHQCGKAFIQSFNLRRHERTHLGKKCYECDKSGKAFSQSSGFRGNKIIHTGEKPHACLLCGKAFSLSSDLR

SEQ ID NO: 8567 - protein, 652 aa, Homo sapiens
MINAQELLTLEDVTVEFTWEEWQLLGPFQKDLYRDVMLEIYSNLLSMGYQVSKPDALSKLERGEEPWTMEDERHSRICPENNEVDDHLQDHLENQRMLKSVEQYHEHNAFGNTASQTKSLCLFRENHDTFELYIKTLKSNLSLVNQNKSCEINNSTKFSGDGKSFLHGNYEELYSAAKFSVSTKANSTKSQVSKHQRTHEIEKNHVCSECGKAFVKKSQLTDHERVHTGEKPYGCTLCAKVFSRKSRLNEHQRIHKREKSFICSECGKVFTMKSRLIEHQRTHTGEKPYICNECGKGFPGKRNLIVHQRNHTGEKSYICSECGKGFTGKSMLIIHQRTHTGEKPYICSECGKGFTTKHYVIIHQRNHTGEKPYICNECGKGFTMKSRMIEHQRTHTGEKPYICSECGKGFPRKSNLIVHQRNHTVEKSYLCSECGKGFTVKSMLIIHQRTHTGEKPYTCSECGKGFPLKSRLIVHQRTHTGEKPYRCSECGKGFIVNSGLMLHQRTHTGEKPYICNECGKGFAFKSNLVVHQRTHTGEKPFMCSECGKGFTMKRYLIVHQQIHTEEKSCICSECGRGFAKETELALHKQVHTGEKPYGCNECGKGFTMKSRLIVHQRTHTGEKPFVCSECRKAFSSKRNLIVHQRTHNGNKP

SEQ ID NO: 8568 - protein, 76 aa, Homo sapiens
MARGQQKIQSQQKNAKKQAGQKKKQGHDQKAAAKAALIYTCTVCRTQMPDPKTFKQHFESKHPKTPLPPELADVQA

SEQ ID NO: 8569 - protein, 1518 aa, Homo sapiens
MAAVGSGGYARNDAGEKLPSVMAGVPARRGQSSPPPAPPICLRRRTRLSTASEETVQNRVSLEKVLGITAQNSSGLTCDPGTGHVAYLAGCVVVILDPKENKQQHIFNTARKSLSALAFSPDGKYIVTGENGHRPAVRIWDVEEKNQVAEMLGHKYGVACVAFSPNMKHIVSMGYQHDMVLNVWDWKKDIVVASNKVSCRVIALSFSEDSSYFVTVGNRHVRFWFLEVSTETKVTSTVPLVGRSGILGELHNNIFCGVACGRGRMAGSTFCVSYSGLLCQFNEKRVLEKWINLKVSLSSCLCVSQELIFCGCTDGIVRIFQAHSLHYLANLPKPHYLGVDVAQGLEPSFLFHRKAEAVYPDTVALTFDPIHQWLSCVYKDHSIYIWDVKDINRVGKVWSELFHSSYVWNVEVYPEFEDQRACLPSGSFLTCSSDNTIRFWNLDSSPDSHWQKNIFSNTLLKVVYVENDIQHLQDMSHFPDRGSENGTPMDVKAGVRVMQVSPDGQHLASGDRSGNLRIHELHFMDELVKVEAHDAEVLCLEYSKPETGLTLLASASRDRLIHVLNVEKNYNLEQTLDDHSSSITAIKFAGNRDIQMISCGADKSIYFRSAQQGSDGLHFVRTHHVAEKTTLYDMDIDITQKYVAVACQDRNVRVYNTVNGKQKKCYKGSQGDEGSLLKVHVDPSGTFLATSCSDKSISVIDFYSGECIAKMFGHSEIITSMKFTYDCHHLITVSGDSCVFIWHLGPEITNCMKQHLLEIDHRQQQQHTNDKKRSGHPRQDTYVSTPSEIHSLSPGEQTEDDLEEECEPEEMLKTPSKDSLDPDPRCLLTNGKLPLWAKRLLGDDDVADGLAFHAKRSYQPHGRWAERAGQEPLKTILDAQDLDCYFTPMKPESLENSILDSLEPQSLASLLSESESPQEAGRGHPSFLPQQKESSEASELILYSLEAEVTVTGTDSQYCRKEVEAGPGDQQGDSYLRVSSDSPKDQSPPEDSGESEADLECSFAAIHSPAPPPDPAPRFATSLPHFPGCAGPTEDELSLPEGPSVPSSSLPQTPEQEKFLRHHFETLTESPCRALGDVEASEAEDHFFNPRLSISTQFLSSLQKASRFTHTFPPRATQCLVKSPEVKLMDRGGSQPRAGTGYASPDRTHVLAAGKAEETLEAWRPPPPCLTSLASCVPASSVLPTDRNLPTPTSAPTPGLAQGVHAPSTCSYMEATASSRARISRSISLGDSEGPIVATLAQPLRRPSSVGELASLGQELQAITTATTPSLDSEGQEPALRSWGNHEARANLRLTLSSACDGLLQPPVDTQPGVTVPAVSFPAPSPVEESALRLHGSAFRPSLPAPESPGLPAHPSNPQLPEARPGIPGGTASLLEPTSGALGLLQGSPARWSEPWVPVEALPPSPLELSRVGNILHRLQTTFQEALDLYRVLVSSGQVDTGQQQARTELVSTFLWIHSQLEAECLVGTSVAPAQALPSPGPPSPPTLYPLASPDLQALLEHYSELLVQAVRRKARGH

SEQ ID NO: 8570 - protein, 483 aa, Homo sapiens
MAAVGSGGYARNDAGEKLPSVMAGVPARRGQSSPPPAPPICLRRRTRLSTASEETVQNRVSLEKVLGITAQNSSGLTCDPGTGHVAYLAGCVVVILDPKENKQQHIFNTARKSLSALAFSPDGKYIVTGENGHRPAVRIWDVEEKNQVAEMLGHKYGVACVAFSPNMKHIVSMGYQHDMVLNVWDWKKDIVVASNKVSCRVIALSFSEDSSYFVTVGNRHVRFWFLEVSTETKVTSTVPLVGRSGILGELHNNIFCGVACGRGRMAGSTFCVSYSGLLCQFNEKRVLEKWINLKVSLSSCLCVSQELIFCGCTDGIVRIFQAHSLHYLANLPKPHYLGVDVAQGLEPSFLFHRKAEAVYPDTVALTFDPIHQWLSCVYKDHSIYIWDVKDINRVGKVWSELFHSSYVWNVEVYPEFEDQRACLPSGSFLTCSSDNTIRFWNLDSSPDSHWQKNIFSNLAPALQMCGRGHSRQPNTPSPGEIAS

SEQ ID NO: 8571 - protein, 414 aa, Homo sapiens
MAAVGSGGYARNDAGEKLPSVMAGVPARRGQSSPPPAPPICLRRRTRLSTASEETVQNRVSLEKVLGITAQNSSGLTCDPGTGHVAYLAGCVVVILDPKENKQQHIFNTARKSLSALAFSPDGKYIVTGENGHRPAVRIWDVEEKNQVAEMLGHKYGVACVAFSPNMKHIVSMGYQHDMVLNVWDWKKDIVVASNKVSCRVIALSFSEDSSYFVTVGNRHVRFWFLEVSTETKVTSTVPLVGRSGILGELHNNIFCGVACGRGRMAGSTFCVSYSGLLCQFNEKRVLEKWINLKVSLSSCLCVSQELIFCGCTDGIVRIFQAHSLHYLANLPKPHYLGVDVAQGLEPSFLFHRKAEAVYPDTVALTFDPIHQWLSCVYKDHSIYIWDVKDINRVGKVWSELFHSSYVWNVEALS

SEQ ID NO: 8572 - protein, 1523 aa, Homo sapiens
MAAVGSGGYARNDAGEKLPSVMAGVPARRGQSSPPPAPPICLRRRTRLSTASEETVQNRVSLEKVLGITAQNSSGLTCDPGTGHVAYLAGCVVVILDPKENKQQHIFNTARKSLSALAFSPDGKYIVTGENGHRPAVRIWDVEEKNQVAEMLGHKYGVACVAFSPNMKHIVSMGYQHDMVLNVWDWKKDIVVASNKVSCRVIALSFSEDSSYFVTVGNRHVRFWFLEVSTETKVTSTVPLVGRSGILGELHNNIFCGVACGRGRMAGSTFCVSYSGLLCQFNEKRVLEKWINLKVSLSSCLCVSQELIFCGCTDGIVRIFQAHSLHYLANLPKPHYLGVDVAQGLEPSFLFHRKAEAVYPDTVALTFDPIHQWLSCVYKDHSIYIWDVKDINRVGKVWSELFHSSYVWNVEVYPEFEDQRACLPSGSFLTCSSDNTIRFWNLDSSPDSHWQKNIFSNTLLKVVYVENDIQHLQDMSHFPDRGSENGTPMDVKAGVRVMQVSPDGQHLASGDRSGNLRIHELHFMDELVKVEAHDAEVLCLEYSKPETGLTLLASASRDRLIHVLNVEKNYNLEQTLDDHSSSITAIKFAGNRDIQMISCGADKSIYFRSAQQGSDGLHFVRTHHVAEKTTLYDMDIDITQKYVAVACQDRNVRVYNTVNGKQKKCYKGSQGDEGSLLKVHVDPSGTFLATSCSDKSISVIDFYSGECIAKMFGHSEIITSMKFTYDCHHLITVSGDSCVFIWHLGPEITNCMKQHLLEIDHRQQQQHTNDKKRSGHPRQDTYVSTPSEIHSLSPGEQTEDDLEEECEPEEMLKTPSKDSLDPDPRCLLTNGKLPLWAKRLLGDDDVADGLAFHAKRSYQPHGRWAERAGQEPLKTILDAQDLDCYFTPMKPESLENSILDSLEPQSLASLLSESESPQEAGRGHPSFLPQQKESSEASELILYSLEAEVTVTGTDSQYCRKEVEAGPGDQQGDSYLRVSSDSPKDQSPPEDSGESEADLECSFAAIHSPAPPPDPAPRFATSLPHFPGCAGPTEDELSLPEGPSVPSSSLPQTPEQEKFLRHHFETLTESPCRELFPAALGDVEASEAEDHFFNPRLSISTQFLSSLQKASRFTHTFPPRATQCLVKSPEVKLMDRGGSQPRAGTGYASPDRTHVLAAGKAEETLEAWRPPPPCLTSLASCVPASSVLPTDRNLPTPTSAPTPGLAQGVHAPSTCSYMEATASSRARISRSISLGDSEGPIVATLAQPLRRPSSVGELASLGQELQAITTATTPSLDSEGQEPALRSWGNHEARANLRLTLSSACDGLLQPPVDTQPGVTVPAVSFPAPSPVEESALRLHGSAFRPSLPAPESPGLPAHPSNPQLPEARPGIPGGTASLLEPTSGALGLLQGSPARWSEPWVPVEALPPSPLELSRVGNILHRLQTTFQEALDLYRVLVSSGQVDTGQQQARTELVSTFLWIHSQLEAECLVGTSVAPAQALPSPGPPSPPTLYPLASPDLQALLEHYSELLVQAVRRKARGH

SEQ ID NO: 8573 - protein, 79 aa, Homo sapiens
MKLAKTAVLDPATYTSFSPGLSTCSSSQPPGDRRKGLLGCVGSGHCPLPTPAQFPKVQRPPTLLGGKNTSTQTTLHPVI

SEQ ID NO: 8574 - protein, 140 aa, Homo sapiens
MRRERPELRDAEGRLRLRAGCLVTAWPRAPSGAGSWSMAAASPWPASWGFPDASSTVPSLCTEARAGRGGPATARSRVSADSQGGRAGSSSPSSALRLCCAGPSQAHPGPSPAVLPGRCGLLGSFPRPPAPQGRWGPSLG

SEQ ID NO: 8575 - protein, 198 aa, Homo sapiens
METGRQTGVSAEMFAMPRDLKGSKKDGIPEDLDGNLEEPRDQEGELRSEDVMDLTEGDNEASASAPPAAKRRKTDTKGKKERKPTVDAEEAQRMTTLLSAMSEEQLSRYEVCRRSAFPKACIAGLMRSITGRSVSENVAIAMAGIAKVFVGEVVEEALDVCEMWGEMPPLQPKHLREAVRRLKPKGLFPNSNYKKIMF

SEQ ID NO: 8576 - protein, 183 aa, Homo sapiens
MQCWQQPFLRFLQQPFFLATASLAGSSSSFNVLIPKRDEDGDGEGPGDVTAGVSRAAGSPSGWEAPWVQQPRCCRRATPVCCAGQGPPRSLQQGGSEVLLGQLCSPEPDWLPSSGPKVAKQVFQVAAELLQHPEHFVPSSVPEGCVHKPGSTCDGSLKGRAYPSCVPKRDPEHSREESHPLSG

SEQ ID NO: 8577 - protein, 150 aa, Homo sapiens
MSSRRSSLSPWKCPWFVYCFERPISREAGPVVHQSPTVLYLHSELAARQTQGRLLPREPAAEDLRLSLPGGHAALGLFKLQGKDSYPHPPTVLLGEDLSSSGWNSWVFGILNISRDEEAIGILTTILQLRETESSAVKWTHTKHSRELGP

SEQ ID NO: 8578 - protein, 323 aa, Homo sapiens
MSRPRMRLVVTADDFGYCPRRDEGIVEAFLAGAVTSVSLLVNGAATESAAELARRHSIPTGLHANLSEGRPVGPARRGASSLLGPEGFFLGKMGFREAVAAGDVDLPQVREELEAQLSCFRELLGRAPTHADGHQHVHVLPGVCQVFAEALQAYGVRFTRLPLERGVGGCTWLEAPARAFACAVERDARAAVGPFSRHGLRWTDAFVGLSTCGRHMSAHRVSGALARVLEGTLAGHTLTAELMAHPGYPSVPPTGGCGEGPDAFSCSWERLHELRVLTAPTLRAQLAQDGVQLCALDDLDSKRPGEEVPCEPTLEPFLEPSLL

SEQ ID NO: 8579 - protein, 149 aa, Homo sapiens
MSRPRMRLVVTADDFGYCPRRDEGIVEAFLAGAVTSVSLLVNGAATESAAELARRHSIPTGLHANLSEGRPVGPARRGASSLLGPEGFFLGKMGFREAVAAGDVDLPQVREELEAQLSCFRELLGRAPTHADGHQHVHVLPGGQTPSWA

SEQ ID NO: 8580 - protein, 136 aa, Homo sapiens
MSRPRMRLVVTADDFGYCPRRDEGIVEAFLAGAVTSVSLLVNGAATESAAELARRHSIPTGLHANLSEGRPVGPARRGASSLLGPEGFFLGKMGFREAVAAGDVDLPQVRSRSYRRMLARTPRAPPGGCGRSSRPN

SEQ ID NO: 8581 - protein, 451 aa, Homo sapiens
MAKLYEAVTFKDVAVIFTEEELGLLDPAQRKLYRDVMLENFRNLLSVGGKIQTEMETVPEAGTHEEFSCKQIWEQIASDLTRSQDTTISNSQLFEQDDNPSQIKARLSTVHTREKPFQGENCKQFFSDVSFFDLPQQLYSGEKSHTCDECGKSFCYISALHIHQRVHMGVKCYKCDVCGKEFSQSSRLQTHQRVHTGEKPFKCEQCGKGFRCRSALKVHCKLHMREKPYNCEKCGKAFMHNFQLQKHHRIHTGEKPFKCEICGKSFCLRSSLNRHCMVHTAEKLYKSEKYGRGFIDRLDLHKHQMIHMGQKPYNCKECGKSFKWSSYLLVHQRVHTGEKPYKCEECGKGYISKSGLDFHHRTHTGERSYNCDNCGKSFRHASSILNHKKLHCQRKPLKCEDCGKRLVCRSYCKDQQRDHSGENPSKCEDCGKRYKRRLNLDIILSLFLNDI

SEQ ID NO: 8582 - protein, 491 aa, Homo sapiens
MIDSGEKKPGRRAEEAVTFKDVAVIFTEEELGLLDPAQRKLYRDVMLENFRNLLSVGHQPFHGDTFHFLREEKFWVMGTTSQREGNLGGKIQTEMETVPEAGTHEEFSCKQIWEQIASDLTRSQDTTISNSQLFEQDDNPSQIKARLSTVHTREKPFQGENCKQFFSDVSFFDLPQQLYSGEKSHTCDECGKSFCYISALHIHQRVHMGVKCYKCDVCGKEFSQSSRLQTHQRVHTGEKPFKCEQCGKGFRCRSALKVHCKLHMREKPYNCEKCGKAFMHNFQLQKHHRIHTGEKPFKCEICGKSFCLRSSLNRHCMVHTAEKLYKSEKYGRGFIDRLDLHKHQMIHMGQKPYNCKECGKSFKWSSYLLVHQRVHTGEKPYKCEECGKGYISKSGLDFHHRTHTGERSYNCDNCGKSFRHASSILNHKKLHCQRKPLKCEDCGKRLVCRSYCKDQQRDHSGENPSKCEDCGKRYKRRLNLDIILSLFLNDI

SEQ ID NO: 8583 - protein, 947 aa, Homo sapiens
MATRVRTASIWVPPLQERNSSWDRIRKLQGQESILGQGTPGLQPLPGTPRQKQKSRRIEKVLEWLFISQEQPKITKSWGPLSFMDVFVDFTWEEWQLLDPAQKCLYRSVMLENYSNLVSLGYQHTKPDIIFKLEQGEELCMVQAQVPNQTCPNTVWKIDDLMDWHQENKDKLGSTAKSFECTTFGKLCLLSTKYLSRQKPHKCGTHGKSLKYIDFTSDYARNNPNGFQVHGKSFFHSKHEQTVIGIKYCESIESGKTVNKKSQLMCQQMYMGEKPFGCSCCEKAFSSKSYLLVHQQTHAEEKPYGCNECGKDFSSKSYLIVHQRIHTGEKLHECSECRKTFSFHSQLVIHQRIHTGENPYECCECGKVFSRKDQLVSHQKTHSGQKPYVCNECGKAFGLKSQLIIHERIHTGEKPYECNECQKAFNTKSNLMVHQRTHTGEKPYVCSDCGKAFTFKSQLIVHQGIHTGVKPYGCIQCGKGFSLKSQLIVHQRSHTGMKPYVCNECGKAFRSKSYLIIHTRTHTGEKLHECNNCGKAFSFKSQLIIHQRIHTGENPYECHECGKAFSRKYQLISHQRTHAGEKPYECTDCGKAFGLKSQLIIHQRTHTGEKPFECSECQKAFNTKSNLIVHQRTHTGEKPYSCNECGKAFTFKSQLIVHKGVHTGVKPYGCSQCAKTFSLKSQLIVHQRSHTGVKPYGCSECGKAFRSKSYLIIHMRTHTGEKPHECRECGKSFSFNSQLIVHQRIHTGENPYECSECGKAFNRKDQLISHQRTHAGEKPYGCSECGKAFSSKSYLIIHMRTHSGEKPYECNECGKAFIWKSLLIVHERTHAGVNPYKCSQCEKSFSGKLRLLVHQRMHTREKPYECSECGKAFIRNSQLIVHQRTHSGEKPYGCNECGKTFSQKSILSAHQRTHTGEKPCKCTECGKAFCWKSQLIMHQRTHVDDKH

SEQ ID NO: 8584 - protein, 786 aa, Homo sapiens
MDWHQENKDKLGSTAKSFECTTFGKLCLLSTKYLSRQKPHKCGTHGKSLKYIDFTSDYARNNPNGFQVHGKSFFHSKHEQTVIGIKYCESIESGKTVNKKSQLMCQQMYMGEKPFGCSCCEKAFSSKSYLLVHQQTHAEEKPYGCNECGKDFSSKSYLIVHQRIHTGEKLHECSECRKTFSFHSQLVIHQRIHTGENPYECCECGKVFSRKDQLVSHQKTHSGQKPYVCNECGKAFGLKSQLIIHERIHTGEKPYECNECQKAFNTKSNLMVHQRTHTGEKPYVCSDCGKAFTFKSQLIVHQGIHTGVKPYGCIQCGKGFSLKSQLIVHQRSHTGMKPYVCNECGKAFRSKSYLIIHTRTHTGEKLHECNNCGKAFSFKSQLIIHQRIHTGENPYECHECGKAFSRKYQLISHQRTHAGEKPYECTDCGKAFGLKSQLIIHQRTHTGEKPFECSECQKAFNTKSNLIVHQRTHTGEKPYSCNECGKAFTFKSQLIVHKGVHTGVKPYGCSQCAKTFSLKSQLIVHQRSHTGVKPYGCSECGKAFRSKSYLIIHMRTHTGEKPHECRECGKSFSFNSQLIVHQRIHTGENPYECSECGKAFNRKDQLISHQRTHAGEKPYGCSECGKAFSSKSYLIIHMRTHSGEKPYECNECGKAFIWKSLLIVHERTHAGVNPYKCSQCEKSFSGKLRLLVHQRMHTREKPYECSECGKAFIRNSQLIVHQRTHSGEKPYGCNECGKTFSQKSILSAHQRTHTGEKPCKCTECGKAFCWKSQLIMHQRTHVDDKH

SEQ ID NO: 8585 - protein, 81 aa, Homo sapiens
MVQAQVPNQTCPNTVWKIDDLMDWHQENKDKLGSTAKSFECTTFGKLCLLSTKYLSRQKPHKCGTHGKSLKYIDFTSDYAR

SEQ ID NO: 8586 - protein, 100 aa, Homo sapiens
MATRVRTASIWGTNTPNLISSSSWNKEKSCVWCRPKFQIRPVQTQSGKLMILWIGIRKIKTSWEVWQKALNALHLENYVFLVQSIFQDKNLINVARMERV

SEQ ID NO: 8587 - protein, 135 aa, Homo sapiens
MATRVRTASIWVPPLQERNSSWDRIRKLQGQESILGQGTPGLQPLPGTPRQKQKSRRIEKVLEWLFISQEQPKITKSWTQSGKLMILWIGIRKIKTSWEVRQKALNALHLENYVFLVQSIFQDKNLINVARMERV

SEQ ID NO: 8588 - protein, 44 aa, Homo sapiens
MATRVRTASIWGTNTPNLISSSSWNKEKSCVWCRPKFQIRPVQF

SEQ ID NO: 8589 - protein, 116 aa, Homo sapiens
MATRVRTASIWGPLSFMDVFVDFTWEEWQLLDPAQKCLYRSVMLENYSNLVSLGYQHTKPDIIFKLEQGEELCMVQAQVPNQTCPILKAGKSKAKVLAGLVSGEGPLCASKMTPCC

SEQ ID NO: 8590 - protein, 727 aa, Homo sapiens
MAADSREEKDGELNVLDDILTEVPEQDDELYNPESEQDKNEKKGSKRKSDRMESTDTKRQKPSVHSRQLVSKPLSSSVSNNKRIVSTKGKSATEYKNEEYQRSERNKRLDADRKIRLSSSASREPYKNQPEKTCVRKRDPERRAKSPTPDGSERIGLEVDRRASRSSQSSKEEVNSEEYGSDHETGSSGSSDEQGNNTENEEEGVEEDVEEDEEVEEDAEEDEEVDEDGEEEEEEEEEEEEEEEEEEEEYEQDERDQKEEGNDYDTRSEASDSGSESVSFTDGSVRSGSGTDGSDEKKKERKRARGISPIVFDRSGSSASESYAGSEKKHEKLSSSVRAVRKDQTSKLKYVLQDARFFLIKSNNHENVSLAKAKGVWSTLPVNEKKLNLAFRSARSVILIFSVRESGKFQGFARLSSESHHGGSPIHWVLPAGMSAKMLGGVFKIDWICRRELPFTKSAHLTNPWNEHKPVKIGRDGQEIELECGTQLCLLFPPDESIDLYQVIHKMRHKRRMHSQPRSRGRPSRREPVRDVGRRRPEDYDIHNSRKKPRIDYPPEFHQRPGYLKDPRYQEVDRRFSGVRRDVFLNGSYNDYVREFHNMGPPPPWQGMPPYPGMEQPPHHPYYQHHAPPPQAHPPYSGHHPVPHEARYRDKRVHDYDMRVDDFLRRTQAVVSGRRSRPRERDRERERDRPRDNRRDRERDRGRDRERERERLCDRDRDRGERGRYRR

SEQ ID NO: 8591 - protein, 709 aa, Homo sapiens
MAADSREEKDGELNVLDDILTEVPEQDDELYNPESEQDKNEKKGSKRKSDRMESTDTKRQKPSVHSRQLVSKPLSSSVSNNKRIVSTKGKSATEYKNEEYQRSERNKRLDADRKIRLSSSASREPYKNQPEKTCVRKRDPERRAKSPTPDGSERIGLEVDRRASRSSQSSKEEVNSEEYGSDHETGSSGSSDEQGNNTENEEEGVEEDVEEDEEVEEDAEEDEEVDEDGEEEEEEEEEEEEEEEEEEEEYEQDERDQKEEGNDYDTRSEASDSGSESVSFTDGSVRSGSGTDGSDEKKKERKRARGISPIVFDRSGSSASESYADQTSKLKYVLQDARFFLIKSNNHENVSLAKAKGVWSTLPVNEKKLNLAFRSARSVILIFSVRESGKFQGFARLSSESHHGGSPIHWVLPAGMSAKMLGGVFKIDWICRRELPFTKSAHLTNPWNEHKPVKIGRDGQEIELECGTQLCLLFPPDESIDLYQVIHKMRHKRRMHSQPRSRGRPSRREPVRDVGRRRPEDYDIHNSRKKPRIDYPPEFHQRPGYLKDPRYQEVDRRFSGVRRDVFLNGSYNDYVREFHNMGPPPPWQGMPPYPGMEQPPHHPYYQHHAPPPQAHPPYSGHHPVPHEARYRDKRVHDYDMRVDDFLRRTQAVVSGRRSRPRERDRERERDRPRDNRRDRERDRGRDRERERERLCDRDRDRGERGRYRR

SEQ ID NO: 8592 - protein, 417 aa, Homo sapiens
MAVSLTAAETLALQGTQGQEKMMMMGPKEEEQSCEYETRLPGNHSTSQEIFRQRFRHLRYQETPGPREALSQLRVLCCEWLRPEKHTKEQILEFLVLEQFLTILPEELQSWVRGHHPKSGEEAVTVLEDLEKGLEPEPQVPGPAHGPAQEEPWEKKESLGAAQEALSIQLQPKETQPFPKSEQVYLHFLSVVTEDGPEPKDKGSLPQPPITEVESQVFSEKLATDTSTFEATSEGTLELQQRNPKAERLRWSPAQEESFRQMVVIHKEIPTGKKDHECSECGKTFIYNSHLVVHQRVHSGEKPYKCSDCGKTFKQSSNLGQHQRIHTGEKPFECNECGKAFRWGAHLVQHQRIHSGEKPYECNECGKAFSQSSYLSQHRRIHSGEKPFICKECGKAYGWCSELIRHRRVHARKEPSH

SEQ ID NO: 8593 - protein, 408 aa, Homo sapiens
MAVSLTAAETLALQGTQGQEKMMMMGPKEEEQSCEYETRLPGNHSTSQEIFRQRFRHLRYQETPGPREALSQLRVLCCEWLRPEKHTKEQILEFLVLEQFLTILPEELQSWVRGHHPKSGEEAVTVLEDLEKGLEPEPQVPGPAHGPAQEEPWEKKESLGAAQEALSIQLQPKETQPFPKSVVTEDGPEPKDKGSLPQPPITEVESQVFSEKLATDTSTFEATSEGTLELQQRNPKAERLRWSPAQEESFRQMVVIHKEIPTGKKDHECSECGKTFIYNSHLVVHQRVHSGEKPYKCSDCGKTFKQSSNLGQHQRIHTGEKPFECNECGKAFRWGAHLVQHQRIHSGEKPYECNECGKAFSQSSYLSQHRRIHSGEKPFICKECGKAYGWCSELIRHRRVHARKEPSH

SEQ ID NO: 8594 - protein, 356 aa, Homo sapiens
MDKEKLDVKIEYCNYAMDSSVENMYVNKVWVQCENENCLKWRLLSSEDSAKVDHDEPWYCFMNTDSRYNNCSISEEDFPEESQLHQCGFKIVYSQLPLGSLVLVKLQNWPSWPGILCPDRFKGKYVTYDPDGNVEEYHIEFLGDPHSRSWIKATFVGHYSITLKPEKCKNKKKWYKSALQEACLLYGYSHEQRLEMCCLSKLQDKSETHDKVAALVKKRKQTSKNNIEKKKPKFRKRKRKAILKCSFENVYSDDALSKENRVVCETEVLLKELEQMLQQALQPTATPDESEEGHGEEINMGEKLSKCSPEAPAGSLFENHYEEDYLVIDGIKLKAGECIEDITNKFKEIDALMSEF

SEQ ID NO: 8595 - protein, 241 aa, Homo sapiens
MSLLSAIDTSAASVYQPAQLLNWVYLSLQDTHQASAFDAFRPEPTAGAAPPELAFGKGRPEQLGSPLHSSYLNSFFQLQRGEALSNSVYKGASPYGSLNNIADGLSSLTEHFSDLTLTSEARKPSKRPPPNYLCHLCFNKGHYIKDCPQARPKGEGLTPYQGKKRCFGEYKCPKCKRKWMSGNSWANMGQECIKCHINVYPHKQRPLEKPDGLDVSDQSKEHPQHLCEKCKVLGYYCRRVQ

SEQ ID NO: 8596 - protein, 193 aa, Homo sapiens
MAQASLLACEGLAGVSLVPTAASKKMMLSQIASKQAENGERAGSPDVLRCSSQGHRKDSDKSRSRKDDDSLSEASHSKKTVKKVVVVEQNGSFQVKIPKNFVCEHCFGAFRSSYHLKRHILIHTGEKPFECDICDMRFIQKYHLERHKRVHSGEKPYQCERCHQCFSRTDRLLRHKRMCQGCQSKTSDGQFSL

SEQ ID NO: 8597 - protein, 215 aa, Homo sapiens
MCWGKHWPRPEGRNLACSKGSPGWRTAGQGSGSYGAATLGKGTEQRGVGALRRGLLSFTCFCLSNWTSGAGFSEMGRSRFEEGRLGYSSDVLSARPTMSPTEMLRSRALNLGAATVLRRHRAPQGTSSYQEGRRAHEATSAESDDDNGVQVLASLAVSCAQHSRHKDPVGTQLQQACAQVPTSRAPLWPCPSHRLMHSTDGPLDPEPLSTLLPAA

SEQ ID NO: 8598 - protein, 855 aa, Homo sapiens
MAAAATLRLSAQGTVTFEDVAVNFTWEEWNLLSEAQRCLYRDVTLENLALISSLGCWCGVEDEAAPSKQSIYIQRETQVRTPMAGVSPKKAHPCEMCGPILGDILHVADHQGTHHKQKLHRCEAWGNKLYDSGNFHQHQNEHIGEKPYRGSVEEALFAKRCKLHVSGESSVFSESGKDFLPRSGLLQQEASHTGEKSNSKTECVSPIQCGGAHYSCGESMKHFSTKHILSQHQRLLTREECYVCCECGKSFSKYASLSNHQRVHTEKKHECGECGKSFSKYVSFSNHQRVHTEKKHECGECGKSFSKYVSFSNHQRVHTGKRPYECGECGKSFSKYASFSNHQRVHTEKKHYECGECGKSFSKYVSFSNHQRVHTGKRPYECGECGKSFSKYASFSNHQRVHTDKKHYECGECGKSFSQKSSLIQHQRFHTGEKPYGCEECGKSFSSEGHLRSHQRVHAGERPFKCGECVKSFSHKRSLVHHQRVHSGERPYQCGECGKSFSQKGNLVLHQRVHTGARPYECGECGKSFSSKGHLRNHQQIHTGDRLYECGECGKSFSHKGTLILHQRVHPRERSYGCGECGKSFSSIGHLRSHQRVHTGERPYECGECGKSFSHKRSLVHHQRMHTGERPYKCGDCGKSFNEKGHLRNHQRVHTTERPFKCGECGKCFSHKGNLILHQHGHTGERPYVCRECGKLFKKKSHLLVHQRIHNGEKPYACEACQKFFRNKYQLIAHQRVHTGERPYECNDCGKSFTHSSTFCVHKRIHTGEKPYECSECGKSFAESSSFTKHKRVHTGEKPYECSECGKSFAESSSLTKHKRVHTGEKPYKCEKCGKLFNKKSHLLVHQSSHWRKAI

SEQ ID NO: 8599 - protein, 896 aa, Homo sapiens
MTEESEETVLYIEHRYVCSECNQLYGSLEEVLMHQNSHVPQQHFELVGVADPGVTVATDTASGTGLYQTLVQESQYQCLECGQLLMSPSQLLEHQELHLKMMAPQEAVPAEPSPKAPPLSSSTIHYECVDCKALFASQELWLNHRQTHLRATPTKAPAPVVLGSPVVLGPPVGQARVAVEHSYRKAEEGGEGATVPSAAATTTEVVTEVELLLYKCSECSQLFQLPADFLEHQATHFPAPVPESQEPALQQEVQASSPAEVPVSQPDPLPASDHSYELRNGEAIGRDRRGRRARRNNSGEAGGAATQELFCSACDQLFLSPHQLQQHLRSHREGVFKCPLCSRVFPSPSSLDQHLGDHSSESHFLCVDCGLAFGTEALLLAHRRAHTPNPLHSCPCGKTFVNLTKFLYHRRTHGVGGVPLPTTPVPPEEPVIGFPEPAPAETGEPEAPEPPVSEETSAGPAAPGTYRCLLCSREFGKALQLTRHQRFVHRLERRHKCSICGKMFKKKSHVRNHLRTHTGERPFPCPDCSKPFNSPANLARHRLTHTGERPYRCGDCGKAFTQSSTLRQHRLVHAQHFPYRCQECGVRFHRPYRLLMHRYHHTGEYPYKCRECPRSFLLRRLLEVHQLVVHAGRQPHRCPSCGAAFPSSLRLREHRCAAAAAQAPRRFECGTCGKKVGSAARLQAHEAAHAAAGPGEVLAKEPPAPRAPRATRAPVASPAALGSTATASPAAPARRRGLECSECKKLFSTETSLQVHRRIHTGERPYPCPDCGKAFRQSTHLKDHRRLHTGERPFACEVCGKAFAISMRLAEHRRIHTGERPYSCPDCGKSYRSFSNLWKHRKTHQQQHQAAVRQQLAEAEAAVGLAVMETAVEALPLVEAIEIYPLAEAEGVQISG

SEQ ID NO: 8600 - protein, 985 aa, Homo sapiens
MPRATWANSKERSWAESERGPRDTGNGGSKAERHIQEIETGRGGDRAKAHRRQRMRLRGTERASLGPGRRLGDSRGTDMPGARAQGLAAATEESEETVLYIEHRYVCSECNQLYGSLEEVLMHQNSHVPQQHFELVGVADPGVTVATDTASGTGLYQTLVQESQYQCLECGQLLMSPSQLLEHQELHLKMMAPQEAVPAEPSPKAPPLSSSTIHYECVDCKALFASQELWLNHRQTHLRATPTKAPAPVVLGSPVVLGPPVGQARVAVEHSYRKAEEGGEGATVPSAAATTTEVVTEVELLLYKCSECSQLFQLPADFLEHQATHFPAPVPESQEPALQQEVQASSPAEVPVSQPDPLPASDHSYELRNGEAIGRDRRGRRARRNNSGEAGGAATQELFCSACDQLFLSPHQLQQHLRSHREGVFKCPLCSRVFPSPSSLDQHLGDHSSESHFLCVDCGLAFGTEALLLAHRRAHTPNPLHSCPCGKTFVNLTKFLYHRRTHGVGGVPLPTTPVPPEEPVIGFPEPAPAETGEPEAPEPPVSEETSAGPAAPGTYRCLLCSREFGKALQLTRHQRFVHRLERRHKCSICGKMFKKKSHVRNHLRTHTGERPFPCPDCSKPFNSPANLARHRLTHTGERPYRCGDCGKAFTQSSTLRQHRLVHAQHFPYRCQECGVRFHRPYRLLMHRYHHTGEYPYKCRECPRSFLLRRLLEVHQLVVHAGRQPHRCPSCGAAFPSSLRLREHRCAAAAAQAPRRFECGTCGKKVGSAARLQAHEAAHAAAGPGEVLAKEPPAPRAPRATRAPVASPAALGSTATASPAAPARRRGLECSECKKLFSTETSLQVHRRIHTGERPYPCPDCGKAFRQSTHLKDHRRLHTGERPFACEVCGKAFAISMRLAEHRRIHTGERPYSCPDCGKSYRSFSNLWKHRKTHQQQHQAAVRQQLAEAEAAVGLAVMETAVEALPLVEAIEIYPLAEAEGVQISG

SEQ ID NO: 8601 - protein, 402 aa, Homo sapiens
MAAAAALRAPAQSSVTFEDVAVNFSLEEWSLLNEAQRCLYRDVMLETLTLISSLGCWHGGEDEAAPSKQSTCIHIYKDQGGHSGERPYECGEYRKLFKNKSCLTEPRRDHKHRNVRTGERPYECSKYGKLFHQKPTLHIHERFHTGQKTYECSECGKSFHQSSSLLQRQTLHTRERPYECIECGKAFAEKSSLINHRKVHSGAKRYECNECGKSFAYTSSLIKHRRIHTGERPYECSECGRSFAENSSLIKHLRVHTGERPYECVECGKSFRRSSSLLQHQRVHTRERPYECSECGKSFSLRSNLIHHQRVHTGERHECGQCGKSFSRKSSLIIHLRVHTGERPYECSDCGKSFAENSSLIKHLRVHTGERPYECIDCGKSFRHSSSFRRHQRVHTGMRPYK

SEQ ID NO: 8602 - protein, 210 aa, Homo sapiens
MAAAAALRAPAQVVGMEGKMRQHLLSRARVYIYTKTREVIVEKGLMSVGNIGNYLRTSPASLNPEEITNTGMFALEKGLMSAANMGNYFTKSLHSIFMRDFILGKRPMSAVSVENHFTKALHSCSVRHFTLEKGLMSVLNVGKPLLKSPVSLTTGKFTLEQSVMNAMNVGSPLLIHLVSLNTGGFTLERGLMSAVNVGDPLLKTPVLLNT

SEQ ID NO: 8603 - protein, 359 aa, Homo sapiens
MLETLTLISSLGCWHGGEDEAAPSKQSTCIHIYKDQGGHSGERPYECGEYRKLFKNKSCLTEPRRDHKHRNVRTGERPYECSKYGKLFHQKPTLHIHERFHTGQKTYECSECGKSFHQSSSLLQRQTLHTRERPYECIECGKAFAEKSSLINHRKVHSGAKRYECNECGKSFAYTSSLIKHRRIHTGERPYECSECGRSFAENSSLIKHLRVHTGERPYECVECGKSFRRSSSLLQHQRVHTRERPYECSECGKSFSLRSNLIHHQRVHTGERHECGQCGKSFSRKSSLIIHLRVHTGERPYECSDCGKSFAENSSLIKHLRVHTGERPYECIDCGKSFRHSSSFRRHQRVHTGMRPYK

SEQ ID NO: 8604 - protein, 386 aa, Homo sapiens
MILGSLSRAGPLPLLRQPPIMQPPLDLKQILPFPLEPAPTLGLFSNYSTMDPVQKAVLSHTFGGPLLKTKRPVISCNICQIRFNSQSQAEAHYKGNRHARRVKGIEAAKTRGREPGVREPGDPAPPGSTPTNGDGVAPRPVSMENGLGPAPGSPEKQPGSPSPPSIPETGQGVTKGEGGTPAPASLPGGSKEEEEKAKRLLYCALCKVAVNSLSQLEAHNKGTKHKTILEARSGLGPIKAYPRLGPPTPGEPEAPAQDRTFHCEICNVKVNSEVQLKQHISSRRHRDGVAGKPNPLLSRHKKSRGAGELAGTLTFSKELPKSLAGGLLPSPLAVAAVMAAAAGSPLSLRPAPAAPLLQGPPITHPLLHPAPGPIRTAHGPILFSPY

SEQ ID NO: 8605 - protein, 366 aa, Homo sapiens
MQPPLDLKQILPFPLEPAPTLGLFSNYSTMDPVQKAVLSHTFGGPLLKTKRPVISCNICQIRFNSQSQAEAHYKGNRHARRVKGIEAAKTRGREPGVREPGDPAPPGSTPTNGDGVAPRPVSMENGLGPAPGSPEKQPGSPSPPSIPETGQGVTKGEGGTPAPASLPGGSKEEEEKAKRLLYCALCKVAVNSLSQLEAHNKGTKHKTILEARSGLGPIKAYPRLGPPTPGEPEAPAQDRTFHCEICNVKVNSEVQLKQHISSRRHRDGVAGKPNPLLSRHKKSRGAGELAGTLTFSKELPKSLAGGLLPSPLAVAAVMAAAAGSPLSLRPAPAAPLLQGPPITHPLLHPAPGPIRTAHGPILFSPY

SEQ ID NO: 8606 - protein, 285 aa, Homo sapiens
MQPPLDLKQILPFPLEPAPTLGLFSNYSTMDPVQKAVLSHTFGGPLLKTKRPVISCNICQIRFNSQSQAEAHYKGNRHARRVKGIEAAKTRGREPGVREPGDPAPPGSTPTNGDGVAPRPGTKHKTILEARSGLGPIKAYPRLGPPTPGEPEAPAQDRTFHCEICNVKVNSEVQLKQHISSRRHRDGVAGKPNPLLSRHKKSRGAGELAGTLTFSKELPKSLAGGLLPSPLAVAAVMAAAAGSPLSLRPAPAAPLLQGPPITHPLLHPAPGPIRTAHGPILFSPY

SEQ ID NO: 8607 - protein, 305 aa, Homo sapiens
MILGSLSRAGPLPLLRQPPIMQPPLDLKQILPFPLEPAPTLGLFSNYSTMDPVQKAVLSHTFGGPLLKTKRPVISCNICQIRFNSQSQAEAHYKGNRHARRVKGIEAAKTRGREPGVREPGDPAPPGSTPTNGDGVAPRPGTKHKTILEARSGLGPIKAYPRLGPPTPGEPEAPAQDRTFHCEICNVKVNSEVQLKQHISSRRHRDGVAGKPNPLLSRHKKSRGAGELAGTLTFSKELPKSLAGGLLPSPLAVAAVMAAAAGSPLSLRPAPAAPLLQGPPITHPLLHPAPGPIRTAHGPILFSPY

SEQ ID NO: 8608 - protein, 856 aa, Homo sapiens
MDISKGLPGMQGGLHIWISENRKMVPVPEGAYGNFFEEHCYVILHVPQSPKATQGASSDLHYWVGKQAGAEAQGAAEAFQQRLQDELGGQTVLHREAQGHESDCFCSYFRPGIIYRKGGLASDLKHVETNLFNIQRLLHIKGRKHVSATEVELSWNSFNKGDIFLLDLGKMMIQWNGPKTSISEKARGLALTYSLRDRERGGGRAQIGVVDDEAKAPDLMQIMEAVLGRRVGSLRAATPSKDINQLQKANVRLYHVYEKGKDLVVLELATPPLTQDLLQEEDFYILDQGGFKIYVWQGRMSSLQERKAAFSRAVGFIQAKGYPTYTNVEVVNDGAESAAFKQLFRTWSEKRRRNQKLGGRDKSIHVKLDVGKLHTQPKLAAQLRMVDDGSGKVEVWCIQDLHRQPVDPKRHGQLCAGNCYLVLYTYQRLGRVQYILYLWQGHQATADEIEALNSNAEELDVMYGGVLVQEHVTMGSEPPHFLAIFQGQLVIFQERAGHHGKGQSASTTRLFQVQGTDSHNTRTMEVPARASSLNSSDIFLLVTASVCYLWFGKGCNGDQREMARVVVTVISRKNEETVLEGQEPPHFWEALGGRAPYPSNKRLPEEVPSFQPRLFECSSHMGCLVLAEVGFFSQEDLDKYDIMLLDTWQEIFLWLGEAASEWKEAVAWGQEYLKTHPAGRSPATPIVLVKQGHEPPTFIGWFFTWDPYKWTSHPSHKEVVDGSPAAASTISEITAEVNNLRLSRWPGNGRAGAVALQALKGSQDSSENDLVRSPKSAGSRTSSSVSSTSATINGGLRREQLMHQAVEDLPEGVDPARREFYLSDSDFQDIFGKSKEEFYSMATWRQRQEKKQLGFF

SEQ ID NO: 8609 - protein, 842 aa, Homo sapiens
MDISKGLPGMQGGLHIWISENRKMVPVPEGAYGNFFEEHCYVILHVPQSPKATQGASSDLHYWVGKQAGAEAQGAAEAFQQRLQDELGGQTVLHREAQGHESDCFCSYFRPGIIYRKGGLASDLKHVETNLFNIQRLLHIKGRKHVSATEVELSWNSFNKGDIFLLDLGKMMIQWNGPKTSISEKARGLALTYSLRDRERGGGRAQIGVVDDEAKAPDLMQIMEAVLGRRVGSLRAATPSKDINQLQKANVRLYHVYEKGKDLLQEEDFYILDQGGFKIYVWQGRMSSLQERKAAFSRAVGFIQAKGYPTYTNVEVVNDGAESAAFKQLFRTWSEKRRRNQKLGGRDKSIHVKLDVGKLHTQPKLAAQLRMVDDGSGKVEVWCIQDLHRQPVDPKRHGQLCAGNCYLVLYTYQRLGRVQYILYLWQGHQATADEIEALNSNAEELDVMYGGVLVQEHVTMGSEPPHFLAIFQGQLVIFQERAGHHGKGQSASTTRLFQVQGTDSHNTRTMEVPARASSLNSSDIFLLVTASVCYLWFGKGCNGDQREMARVVVTVISRKNEETVLEGQEPPHFWEALGGRAPYPSNKRLPEEVPSFQPRLFECSSHMGCLVLAEVGFFSQEDLDKYDIMLLDTWQEIFLWLGEAASEWKEAVAWGQEYLKTHPAGRSPATPIVLVKQGHEPPTFIGWFFTWDPYKWTSHPSHKEVVDGSPAAASTISEITAEVNNLRLSRWPGNGRAGAVALQALKGSQDSSENDLVRSPKSAGSRTSSSVSSTSATINGGLRREQLMHQAVEDLPEGVDPARREFYLSDSDFQDIFGKSKEEFYSMATWRQRQEKKQLGFF

SEQ ID NO: 8610 - protein, 438 aa, Homo sapiens
MRTLLPPALLTCWLLAPVNSIHPECRFHLEIQEEETKCAELLRSQTEKHKACSGVWDNITCWRPANVGETVTVPCPKVFSNFYSKAGNISKNCTSDGWSETFPDFVDACGYSDPEDESKITFYILVKAIYTLGYSVSLMSLATGSIILCLFRKLHCTRNYIHLNLFLSFILRAISVLVKDDVLYSSSGTLHCPDQPSSWVGCKLSLVFLQYCIMANFFWLLVEGLYLHTLLVAMLPPRRCFLAYLLIGWGLPTVCIGAWTAARLYLEDTGCWDTNDHSVPWWVIRIPILISIIVNFVLFISIIRILLQKLTSPDVGGNDQSQYKRLAKSTLLLIPLFGVHYMVFAVFPISISSKYQILFELCLGSFQGLVVAVLYCFLNSEVQCELKRKWRSRCPTPSASRDYRVCGSSFSRNGSEGALQFHRGSRAQSFLQTETSVI

SEQ ID NO: 8611 - protein, 422 aa, Homo sapiens
MPLWEAPSDHPANPPATLQGHTSLPGCQEEPARDPQSGLPQITSESSSFSEGSLPSWSSGPAGAKLNASHEGIGSSSDGNGDSKAATERVVSAMDTVRRKHPEITFYILVKAIYTLGYSVSLMSLATGSIILCLFRKLHCTRNYIHLNLFLSFILRAISVLVKDDVLYSSSGTLHCPDQPSSWVGCKLSLVFLQYCIMANFFWLLVEGLYLHTLLVAMLPPRRCFLAYLLIGWGLPTVCIGAWTAARLYLEDTGCWDTNDHSVPWWVIRIPILISIIVNFVLFISIIRILLQKLTSPDVGGNDQSQYKRLAKSTLLLIPLFGVHYMVFAVFPISISSKYQILFELCLGSFQGLVVAVLYCFLNSEVQCELKRKWRSRCPTPSASRDYRVCGSSFSRNGSEGALQFHRGSRAQSFLQTETSVI

SEQ ID NO: 8612 - protein, 664 aa, Homo sapiens
MEGFMDSGTQTDAVVVLSLAQAAVLGLVSENELFGATISAEAFYPDLGPELSGAAMGEPEPPGPDVYQLACNGRALEEPAEEEVLEVEAACEKHTRRKTRPPVRLVPKVKFEKVEEEEQEVYEVSVPGDDKDAGPAEAPAEAASGGCDALVQSSAVKMIDLSAFSRKPRTLRHLPRTPRPELNVAPYDPHFPAPARDGFPEPSMALPGPEALPTECGFEPPHLAPLSDPEAPSMESPEPVKPEQGFVWQEASEFEADTAGSTVERHKKAQLDRLDINVQIDDSYLVEAGDRQKRWQCRMCEKSYTSKYNLVTHILGHNGIKPHSCPHCSKLFKQPSHLQTHLLTHQGTRPHKCQVCHKAFTQTSHLKRHMLLHSEVKPYSCHFCGRGFAYPSELKAHEVKHESGRCHVCVECGLDFSTLTQLKRHLASHQGPTLYQCLECDKSFHYRSQLQNHMLKHQNVRPFVCTECGMEFSQIHHLKQHSLTHKGVKEFKCEVCGREFTLQANMKRHMLIHTSVRPYQCHICFKTFVQKQTLKTHMIVHSPVKPFKCKVCGKSFNRMYNLLGHMHLHAGSKPFKCPYCSSKFNLKGNLSRHMKVKHGVMDIGLDSQDPMMELTGTDPSELDGQQEMEDFEENAYSYASVDSSAEASVLTEQAMKEMAYYNVL

SEQ ID NO: 8613 - protein, 478 aa, Homo sapiens
MLSDELESKPELLVQFVQNTSIPLGQGLVESEAKDITCLSLLPVTEASECSRLMLPDDTTNHSNSSKEVPSSAVLRSLRVNVGPDGEETRAQTVQKSPEFLSTSESSSLLQDLQPSDSTSFILLNLTRAGLGSSAEHLVFVQDEAEDSGNDFLSSESTDSSIPWFLRVQELAHDSLIAATRAQLAKNAKTSSNGENVHLGSGDGQSKDSGPLPQVEKKLKCTVEGCDRTFVWPAHFKYHLKTHRNDRSFICPAEGCGKSFYVLQRLKVHMRTHNGEKPFMCHESGCGKQFTTAGNLKNHRRIHTGEKPFLCEAQGCGRSFAEYSSLRKHLVVHSGEKPHQCQVCGKTFSQSGSRNVHMRKHHLQLGAAGSQEQEQTAEPLMGSSLLEEASVPSKNLVSMNSQPSLGGESLNLPNTNSILGVDDEVLAEGSPRSLSSVPDVTHHLVTMQSGRQSYEVSVLTAVNPQELLNQGDLTERRT

SEQ ID NO: 8614 - protein, 272 aa, Homo sapiens
MLSDELESKPELLVQFVQNTSIPLGQGLVESEAKDITCLSLLPVTEASECSRLMLPDDTTNHSNSSKEVPSSAVLRSLRVNVGPDGEETRAQTVQKSPEFLSTSESSSLLQDLQPSDSTSFILLNLTRAGLGSSAEHLVFVQDEAEDSGNDFLSSESTDSSIPWFLRVQELAHDSLIAATRAQLAKNAKTSSNGENVHLGSGDGQSKDSGPLPQVEKKLKCTVEGCDRTFVWPAHFKYHLKTHRRLWEKLLCAAEAEGAHEDPQWREALYVP

SEQ ID NO: 8615 - protein, 431 aa, Homo sapiens
MLSDELESKPELLVQFVQNTSIPLGQGLVESEAKDITCLSLLPVTEASECSRLMLPDDTTNHSNSSKEVPSSAVLRSLRVNVGPDGEETRAQTVQKSPEFLSTSESSSLLQDLQPSDSTSFILLNLTRAGLGSSAEHLVFVQDEAEDSGNDFLSSESTDSSIPWFLRVQELAHDSLIAATRAQLAKNAKTSSNGENVHLGSGDGQSKDSGPLPQVEKKLKCTVEGCDRTFVWPAHFKYHLKTHRNDRSFICPAEGCGKSFYVLQRLKVHMRTHNGEKPFMCHESGCGKQFTTAGNLKNHRRIHTGEKPFLCEAQGCGRSFAEYSSLRKHLVVHSGEKPHQCQVCGKTFSQSGSRNVHMRKHHLQLGAAGSQEQEQTEVLAEGSPRSLSSVPDVTHHLVTMQSGRQSYEVSVLTAVNPQELLNQGDLTERRT

SEQ ID NO: 8616 - protein, 405 aa, Homo sapiens
MLSDELESKPELLVQFVQNTSIPLGQGLVESEAKDITCLSLLPVTEASECSRLMLPGLGSSAEHLVFVQDEAEDSGNDFLSSESTDSSIPWFLRVQELAHDSLIAATRAQLAKNAKTSSNGENVHLGSGDGQSKDSGPLPQVEKKLKCTVEGCDRTFVWPAHFKYHLKTHRNDRSFICPAEGCGKSFYVLQRLKVHMRTHNGEKPFMCHESGCGKQFTTAGNLKNHRRIHTGEKPFLCEAQGCGRSFAEYSSLRKHLVVHSGEKPHQCQVCGKTFSQSGSRNVHMRKHHLQLGAAGSQEQEQTAEPLMGSSLLEEASVPSKNLVSMNSQPSLGGESLNLPNTNSILGVDDEVLAEGSPRSLSSVPDVTHHLVTMQSGRQSYEVSVLTAVNPQELLNQGDLTERRT

SEQ ID NO: 8617 - protein, 516 aa, Homo sapiens
MLSDELESKPELLVQFVQNTSIPLGQGLVESEAKDITCLSLLPVTEASECSRLMLPEPVPWREEDGKSGCSDLNDTTNHSNSSKEVPSSAVLRSLRVNVGPDGEETRAQTVQKSPEFLSTSESSSLLQDLQPSDSTSFILLNLTRAGLGSSAEHLVFVQDEAEDSGNDFLSSESTDSSIPWFLRVQELAHDSLIAATRAQLAKNAKTSSNGENVHLGSGDGQSKDSGPLPQVEKKLKCTVEGCDRTFVWPAHFKYHLKTHRNDRSFICPAEGCGKSFYVLQRLKVHMRTHNGEKPFMCHESGCGKQFTTAGNLKNHRRIHTGEKPFLCEAQGCGRSFAEYSSLRKHLVVHSGEKPHQCQVCGKTFSQSGSRNVHMRKHHLQLGAAGSQEQEQTAEPLMGSSLLEEASVPSKNLVSMNSQPSLGGESLNLPNTNSILGVDDEVLAEGSPRSLSSVPDVTHHLVTMQSGRQSYEVSVLTAVNPQESLAPLPRLECSGAFSAHCNLCLPGSSDSPASAS

SEQ ID NO: 8618 - protein, 977 aa, Homo sapiens
MERQKRKADIEKGLQFIQSTLPLKQEEYEAFLLKLVQNLFAEGNDLFREKDYKQALVQYMEGLNVADYAASDQVALPRELLCKLHVNRAACYFTMGLYEKALEDSEKALGLDSESIRALFRKARALNELGRHKEAYECSSRCSLALPHDESVTQLGQELAQKLGLRVRKAYKRPQELETFSLLSNGTAAGVADQGTSNGLGSIDDIETDCYVDPRGSPALLPSTPTMPLFPHVLDLLAPLDSSRTLPSTDSLDDFSDGDVFGPELDTLLDSLSLVQGGLSGSGVPSELPQLIPVFPGGTPLLPPVVGGSIPVSSPLPPASFGLVMDPSKKLAASVLDALDPPGPTLDPLDLLPYSETRLDALDSFGSTRGSLDKPDSFMEETNSQDHRPPSGAQKPAPSPEPCMPNTALLIKNPLAATHEFKQACQLCYPKTGPRAGDYTYREGLEHKCKRDILLGRLRSSEDQTWKRIRPRPTKTSFVGSYYLCKDMINKQDCKYGDNCTFAYHQEEIDVWTEERKGTLNRDLLFDPLGGVKRGSLTIAKLLKEHQGIFTFLCEICFDSKPRIISKGTKDSPSVCSNLAAKHSFYNNKCLVHIVRSTSLKYSKIRQFQEHFQFDVCRHEVRYGCLREDSCHFAHSFIELKVWLLQQYSGMTHEDIVQESKKYWQQMEAHAGKASSSMGAPRTHGPSTFDLQMKFVCGQCWRNGQVVEPDKDLKYCSAKARHCWTKERRVLLVMSKAKRKWVSVRPLPSIRNFPQQYDLCIHAQNGRKCQYVGNCSFAHSPEERDMWTFMKENKILDMQQTYDMWLKKHNPGKPGEGTPISSREGEKQIQMPTDYADIMMGYHCWLCGKNSNSKKQWQQHIQSEKHKEKVFTSDSDASGWAFRFPMGEFRLCDRLQKGKACPDGDKCRCAHGQEELNEWLDRREVLKQKLAKARKDMLLCPRDDDFGKYNFLLQEDGDLAGATPEAPAAAATATTGE

SEQ ID NO: 8619 - protein, 643 aa, Homo sapiens
MASVALEDVAVNFTREEWALLGPCQKNLYKDVMQETIRNLDCVGMKWKDQNIEDQYRYPRKNLRCRMLERFVESKDGTQCGETSSQIQDSIVTKNTLPGVGPYESRMSGEVIMGHSSLNCYIRVGAGHKPYEYHECGEKPDTHKQRGKAFSYHNSLQTHERLHTGKKPYNCKECGKSFSSLGNLQRHMAVQRGDGPYKCKLCGKAFFWPSLLHMHERTHTGEKPYECKQCSKAFSFYSSYLRHERTHTGEKLYECKQCSKAFPDYSSCLRHERTHTGKKPYTCKQCGKAFSASTSLRRHETTHTDEKPYACQQCGKAFHHLGSFQRHMVMHTRDGPHKCKICGKGFDCPSSLKSHERTHTGEKLYECKQCGKALSHSSSFRRHMTMHTGDGPHKCKICGKAFVYPSVFQRHEKTHTAEKPYKCKQCGKAYRISSSLRRHETTHTGEKPYKCKCGKAFIDFYSFQNHKTTHAGEKPYECKECGKAFSCFQYLSQHRRTHTGEKPYECNTCKKAFSHFGNLKVHERIHSGEKPYECKECGKAFSWLTCFLRHERIHMREKPYECQQCGKAFTHSRFLQGHEKTHTGENPYECKECGKAFASLSSLHRHKKTHWKKTHTGENPYGCKECGKAFASLSSLHRHKKTH

SEQ ID NO: 8620 - protein, 645 aa, Homo sapiens
MDQASVALEDVAVNFTREEWALLGPCQKNLYKDVMQETIRNLDCVGMKWKDQNIEDQYRYPRKNLRCRMLERFVESKDGTQCGETSSQIQDSIVTKNTLPGVGPYESRMSGEVIMGHSSLNCYIRVGAGHKPYEYHECGEKPDTHKQRGKAFSYHNSLQTHERLHTGKKPYNCKECGKSFSSLGNLQRHMAVQRGDGPYKCKLCGKAFFWPSLLHMHERTHTGEKPYECKQCSKAFSFYSSYLRHERTHTGEKLYECKQCSKAFPDYSSCLRHERTHTGKKPYTCKQCGKAFSASTSLRRHETTHTDEKPYACQQCGKAFHHLGSFQRHMVMHTRDGPHKCKICGKGFDCPSSLKSHERTHTGEKLYECKQCGKALSHSSSFRRHMTMHTGDGPHKCKICGKAFVYPSVFQRHEKTHTAEKPYKCKQCGKAYRISSSLRRHETTHTGEKPYKCKCGKAFIDFYSFQNHKTTHAGEKPYECKECGKAFSCFQYLSQHRRTHTGEKPYECNTCKKAFSHFGNLKVHERIHSGEKPYECKECGKAFSWLTCFLRHERIHMREKPYECQQCGKAFTHSRFLQGHEKTHTGENPYECKECGKAFASLSSLHRHKKTHWKKTHTGENPYGCKECGKAFASLSSLHRHKKTH

SEQ ID NO: 8621 - protein, 1252 aa, Homo sapiens
MPGAPGSLEMGPLTFRDVTIEFSLEEWQCLDTVQQNLYRDVMLENYRNLVFLGMAVFKPDLITCLKQGKEPWNMKRHEMVTKPPVMRSHFTQDLWPDQSTKDSFQEVILRTYARCGHKNLRLRKDCKSANEGKMHKEGYNKLNQCRTATQRKIFQCNKHMKVFHKYSNRNKVRHTKKKTFKCIKCSKSFFMLSCLIRHKRIHIRQNIYKCEERGKAFKSFSTLTKHKIIHTEDKPYKYKKCGNAFKFSSTFTKHKRIHTGETPFRCEECGKAFNQSSNLTDHKRIHTGEKTYKCEECGKAFKGSSNFNAHKVIHTAEKPYKCEDCGKTFNHFSALRKHKIIHTGKKPYKREECGKAFSQSSTLRKHEIIHTGEKPYKCEECGKAFKWSSKLTVHKVVHTGEKPYKCEECGKAFSQFSTLKKHKIIHTGKKPYKCEECGKAFNSSSTLMKHKIIHTGEKPYKCEECGKAFRQSSHLTRHKAIHTGEKPYKCEECGKAFNHFSDLRRHKIIHTGKKPYKCEECGKAFSQSSTLRNHQIIHTGEKPYKCEECGKAFKWSSKLTVHKVIHTGEKPCKCEECGKAFKHFSALRKHKVIHTREKLYKCEECGKAFNNSSILAKHKIIHTGKKPYKCEECGKAFRQSSHLTRHKAIHTGEKPYKCEECGKAFSHFSALRRHKIIHTGKKPYKCEECGKAFSHFSALRRHKIIHTGEKPYKCEECGKAFKWSSKLTVHKVIHTAEKPCKCEECGKSFKHFSALRKHKVIHTREKLYKCEECVKAFNSFSALMKHKVIHTGEKPYKCEECGKAFKWSSKLTVHKVIHTGEKPCKCEECGKAFKHFSALRKHKVIHTGKKPYKCEECGKAFSQSSSLRKHEIIHSGEKPYKCEECGKAFKWLSKLTVHKVIHTAEKPCKCEECGKAFKHFSALRKHKIIHTGKKPYKCEECGKAFNDSSTLMKHKIIHTGKKPYKCAECGKAFKQSSHLTRHKAIHTGEKPYKCEECGKDFNNSSTLKKHKLIHTREKLYKCEECVKAFNNFSALMKHKIIHTGEKPYKCEECGKAFKWSSKLTEHKVIHTGEKPCKCEECDKAFKHFSALRKHKVIHTGKKPYQCDECGKAFNNSSTLTKHKIIHTGEKPYKCEECGKAFSQSSILTKHKIIHSVEKPYKCEECGKAFNQSSHLTRHKTIHTGEKPYKCEECGKAFIQCSYLIRHKTIHTREKPTNVKKVPKLLSNPHTLLDKTIHTGEKPYKCEECAKAF

SEQ ID NO: 8622 - protein, 605 aa, Homo sapiens
MAAGQREARPQVSLTFEDVAVLFTRDEWRKLAPSQRNLYRDVMLENYRNLVSLGLPFTKPKVISLLQQGEDPWEVEKDGSGVSSLGSKSSHKTTKSTQTQDSSFQGLILKRSNRNVPWDLKLEKPYIYEGRLEKKQDKKGSFQIVSATHKKIPTIERSHKNTELSQNFSPKSVLIRQQILPREKTPPKCEIQGNSLKQNSQLLNQPKITADKRYKCSLCEKTFINTSSLRKHEKNHSGEKLFKCKECSKAFSQSSALIQHQITHTGEKPYICKECGKAFTLSTSLYKHLRTHTVEKSYRCKECGKSFSRRSGLFIHQKIHAEENPCKYNPGRKASSCSTSLSGCQRIHSRKKSYLCNECGNTFKSSSSLRYHQRIHTGEKPFKCSECGRAFSQSASLIQHERIHTGEKPYRCNECGKGFTSISRLNRHRIIHTGEKFYNCNECGKALSSHSTLIIHERIHTGEKPCKCKVCGKAFRQSSALIQHQRMHTGERPYKCNECGKTFRCNSSLSNHQRIHTGEKPYRCEECGISFGQSSALIQHRRIHTGEKPFKCNTCGKTFRQSSSRIAHQRIHTGEKPYECNTCGKLFNHRSSLTNHYKIHIEEDP

SEQ ID NO: 8623 - protein, 1163 aa, Homo sapiens
MDRNREAEMELRRGPSPTRAGRGHEVDGDKATCHTCCICGKSFPFQSSLSQHMRKHTGEKPYKCPYCDHRASQKGNLKIHIRSHRTGTLIQGHEPEAGEAPLGEMRASEGLDACASPTKSASACNRLLNGASQADGARVLNGASQADSGRVLLRSSKKGAEGSACAPGEAKAAVQCSFCKSQFERKKDLELHVHQAHKPFKCRLCSYATLREESLLSHIERDHITAQGPGSGEACVENGKPELSPGEFPCEVCGQAFSQTWFLKAHMKKHRGSFDHGCHICGRRFKEPWFLKNHMKAHGPKTGSKNRPKSELDPIATINNVVQEEVIVAGLSLYEVCAKCGNLFTNLDSLNAHNAIHRRVEASRTRAPAEEGAEGPSDTKQFFLQCLNLRPSAAGDSCPGTQAGRRVAELDPVNSYQAWQLATRGKVAEPAEYLKYGAWDEALAGDVAFDKDRREYVLVSQEKRKREQDAPAAQGPPRKRASGPGDPAPAGHLDPRSAARPNRRAAATTGQGKSSECFECGKIFRTYHQMVLHSRVHRRARRERDSDGDRAARARCGSLSEGDSASQPSSPGSACAAADSPGSGLADEAAEDSGEEGAPEPAPGGQPRRCCFSEEVTSTELSSGDQSHKMGDNASERDTGESKAGIAASVSILENSSRETSRRQEQHRFSMDLKMPAFHPKQEVPVPGDGVEFPSSTGAEGQTGHPAEKLSDLHNKEHSGGGKRALAPDLMPLDLSARSTRDDPSNKETASSLQAALVVHPCPYCSHKTYYPEVLWMHKRIWHRVSCNSVAPPWIQPNGYKSIRSNLVFLSRSGRTGPPPALGGKECQPLLLARFTRTQVPGGMPGSKSGSSPLGVVTKAASMPKNKESHSGGPCALWAPGPDGYRQTKPCHGQEPHGAATQGPLAKPRQEASSKPVPAPGGGGFSRSATPTPTVIARAGAQPSANSKPVEKFGVPPAGAGFAPTNKHSAPDSLKAKFSAQPQGPPPAKGEGGAPPLPPREPPSKAAQELRTLATCAAGSRGDAALQAQPGVAGAPPVLHSIKQEPVAEGHEKRLDILNIFKTYIPKDFATLYQGWGVSGPGLEHRGTLRTQARPGEFVCIECGKSFHQPGHLRAHMRAHSVVFESDGPRGSEVHTTSADAPKQGRDHSNTGTVQTVPLRKGT

SEQ ID NO: 8624 - protein, 358 aa, Homo sapiens
MESLRGNTAQGPTNEEDYKNEGQLSRQTKCPAQKKSSFENTVVRKVSVTLKEIFTGEEGPESSEFSLSPNLDAQQKIPKGHGSPISRKNSKDNSDLIKHQRLFSQRKPCKCNECEKAFSYQSDLLVHSRIHGGEKPFECNKCGKSFSRSTHLIEHQRTHTGEKPYECNECGKAFSRSTHLSLHQRIHTGEKPYECSECGKAFSRSTNLSQHQRTHTQERPYKCNECGKAFGDRSTIIQHQRIHTGENPYECSKCGKAFSWISSLTEHQRTHTGENPYECSECGKVFSRSSSLTEHQRIHSGEKPHECRVCGKGFSRSSSLIIHQRTHTGEKPYKCNDCGKAFCQSSTLIRHQHLHTKE

SEQ ID NO: 8625 - protein, 446 aa, Homo sapiens
METQADLVSQEPQALLDSALPSKVPAFSDKDSLGDEMLAAALLKAKSQELVTFEDVAVYFIRKEWKRLEPAQRDLYRDVMLENYGNVFSLDRETRTENDQEISEDTRSHGVLLGRFQKDISQGLKFKEAYEREVSLKRPLGNSPGERLNRKMPDFGQVTVEEKLTPRGERSEKYNDFGNSFTVNSNLISHQRLPVGDRPHKCDECSKSFNRTSDLIQHQRIHTGEKPYECNECGKAFSQSSHLIQHQRIHTGEKPYECSDCGKTFSCSSALILHRRIHTGEKPYECNECGKTFSWSSTLTHHQRIHTGEKPYACNECGKAFSRSSTLIHHQRIHTGEKPYECNECGKAFSQSSHLYQHQRIHTGEKPYECMECGGKFTYSSGLIQHQRIHTGENPYECSECGKAFRYSSALVRHQRIHTGEKPLNGIGMSKSSLRVTTELNIREST

SEQ ID NO: 8626 - protein, 131 aa, Homo sapiens
METQADLVSQEPQALLDSALPSKVPAFSDKDSLGDEMLAAALLKAKSQELVTFEDVAVYFIRKEWKRLEPAQRDLYRDVMLENYGNVFSLDWIHVCLTTQKVMLAWLTGTLSVAKGLCSSELASVEPPDTF

SEQ ID NO: 8627 - protein, 482 aa, Homo sapiens
MAAPEKMTFPEKPSHKKYRAALKKEKRKKRRQELARLRDSGLSQKEEEEDTFIEEQQLEEEKLLERERQRLHEEWLLREQKAQEEFRIKKEKEEAAKKRQEEQERKLKEQWEEQQRKEREEEEQKRQEKKEKEEALQKMLDQAENELENGTTWQNPEPPVDFRVMEKDRANCPFYSKTGACRFGDRCSRKHNFPTSSPTLLIKSMFTTFGMEQCRRDDYDPDASLEYSEEETYQQFLDFYEDVLPEFKNVGKVIQFKVSCNLEPHLRGNVYVQYQSEEECQAALSLFNGRWYAGRQLQCEFCPVTRWKMAICGLFEIQQCPRGKHCNFLHVFRNPNNEFWEANRDIYLSPDRTGSSFGKNSERRERMGHHDDYYSRLRGRRNPSPDHSYKRNGESERKSSRHRGKKSHKRTSKSRERHNSRSRGRNRDRSRDRSRGRGSRSRSRSRSRRSRRSRSQSSSRSRSRGRRRSGNRDRTVQSPKSK

SEQ ID NO: 8628 - protein, 116 aa, Homo sapiens
MACPGFLWALVISTCLEFSMAQTVTQSQPEMSVQEAETVTLSCTYDTSESDYYLFWYKQPPSRQMILVIRQEAYKQQNATENRFSVNFQKAAKSFSLKISDSQLGDAAMYFCAYRS

SEQ ID NO: 8629 - protein, 513 aa, Homo sapiens
MAMEIDSRPGGLPGSSCNLGAAREHMQAVTRNYITHPRVTYRTVCSVNGPLVVLDRVKFAQYAEIVHFTLPDGTQRSGQVLEVAGTKAIVQVFEGTSGIDARKTTCEFTGDILRTPVSEDMLGRVFNGSGKPIDKGPVVMAEDFLDINGQPINPHSRIYPEEMIQTGISPIDVMNSIARGQKIPIFSAAGLPHNEIAAQICRQAGLVKKSKAVLDYHDDNFAIVFAAMGVNMETARFFKSDFEQNGTMGNVCLFLNLANDPTIERIITPRLALTTAEFLAYQCEKHVLVILTDMSSYAEALREVSAAREEVPGRRGFPGYMYTDLATIYERAGRVEGRGGSITQIPILTMPNDDITHPIPDLTGFITEGQIYVDRQLHNRQIYPPINVLPSLSRLMKSAIGEGMTRKDHGDVSNQLYACYAIGKDVQAMKAVVGEEALTSEDLLYLEFLQKFEKNFINQGPYENRSVFESLDLGWKLLRIFPKEMLKRIPQAVIDEFYSREGALQDLAPDTAL

SEQ ID NO: 8630 - protein, 283 aa, Homo sapiens
MAVPPTYADLGKSARDVFTKGYGFGLIKLDLKTKSENGLEFTSSGSANTETTKVTGSLETKYRWTEYGLTFTEKWNTDNTLGTEITVEDQLARGLKLTFDSSFSPNTGKKNAKIKTGYKREHINLGCDMDFDIAGPSIRGALVLGYEGWLAGYQMNFETAKSRVTQSNFAVGYKTDEFQLHTNVNDGTEFGGSIYQKVNKKLETAVNLAWTAGNSNTRFGIAAKYQIDPDACFSAKVNNSSLIGLGYTQTLKPGIKLTLSALLDGKNVNAGGHKLGLGLEFQA

SEQ ID NO: 8631 - protein, 118 aa, Homo sapiens
MASQSQGIQQLLQAEKRAAEKVADARKRKARRLKQAKEEAQMEVEQYRREREHEFQSKQQAAMGSQGNLSAEVEQATRRQVQGMQSSQQRNRERVLAQLLGMVCDVRPQVHPNYRISA

SEQ ID NO: 8632 - protein, 78 aa, Homo sapiens
MASQSQGIQQLLQAEKRAAEKVADARKRKARRLKQATRRQVQGMQSSQQRNRERVLAQLLGMVCDVRPQVHPNYRISA

SEQ ID NO: 8633 - protein, 77 aa, Homo sapiens
MEVEQYRREREHEFQSKQQAAMGSQGNLSAEVEQATRRQVQGMQSSQQRNRERVLAQLLGMVCDVRPQVHPNYRISA

SEQ ID NO: 8634 - protein, 202 aa, Homo sapiens
MERGAGAKLLPLLLLLRATGFTCAQTDGRNGYTAVIEVTSGGPWGDWAWPEMCPDGFFASGFSLKVEPPQGIPGDDTALNGIRLHCARGNVLGNTHVVESQSGSWGEWSEPLWCRGGAYLVAFSLRVEAPTTLGDNTAANNVRFRCSDGEELQGPGLSWGDFGDWSDHCPKGACGLQTKIQGPRGLGDDTALNDARLFCCRS

SEQ ID NO: 8635 - protein, 70 aa, Homo sapiens
MERGAGAKLLPLLLLLRATGFTCAQTDGRNGYTAVIEVTSGGPWGDWAWPEMCPDGFFASGFSLKLGRME

SEQ ID NO: 8636 - protein, 102 aa, Homo sapiens
MERGAGAKLLPLLLLLRATGFTCAQTDGRNGYTAVIEVTSGGPWGDWAWPEMCPDGFFASGFSLKVEPPQGIPGDDTALNGIRLHCARGNVLGNTHVLGRME

SEQ ID NO: 8637 - protein, 114 aa, Homo sapiens
MERGAGAKLLPLLLLLRATGFTCAQTDGRNGYTAVIEVTSGGPWGDWAWPEMCPDGFFASGFSLKVEPPQGIPGDDTALNGIRLHCARGNVLGNTHVVESQSGRWGAGVEDPLG

SEQ ID NO: 8638 - protein, 156 aa, Homo sapiens
WASQVSENRPVCKAVIQGKQLEGLVDTGADVSIIALNQWPKNWPKQKTVTGLVGIVTASEVYQSTEILHCLGPHNQESTVQPMITSIPLNLWGRDLLQQWGAEITMTATLYSPMSQKIMTKMGYIPGKGLGKNEDGIKVPIEAKINHGREGTGYPF

SEQ ID NO: 8639 - protein, 525 aa, Homo sapiens
MLRTILDAPQRLLKEGRASRQLVLVVVFVALLLDNMLFTVVVPIVPTFLYDMEFKEVNSSLHLGHAGSSPHALASPAFSTIFSFFNNNTVAVEESVPSGIAWMNDTASTIPPPATEAISAHKNNCLQGTGFLEEEITRVGVLFASKAVMQLLVNPFVGPLTNRIGYHIPMFAGFVIMFLSTVMFAFSGTYTLLFVARTLQGIGSSFSSVAGLGMLASVYTDDHERGRAMGTALGGLALGLLVGAPFGSVMYEFVGKSAPFLILAFLALLDGALQLCILQPSKVSPESAKGTPLFMLLKDPYILVAAGSICFANMGVAILEPTLPIWMMQTMCSPKWQLGLAFLPASVSYLIGTNLFGVLANKMGRWLCSLIGMLVVGTSLLCVPLAHNIFGLIGPNAGLGLAIGMVDSSMMPIMGHLVDLRHTSVYGSVYAIADVAFCMGFAIGPSTGGAIVKAIGFPWLMVITGVINIVYAPLCYYLRSPPAKEEKLAILSQDCPMETRMYATQKPTKEFPLGEDSDEEPDHEE

SEQ ID NO: 8640 - protein, 472 aa, Homo sapiens
MLRTILDAPQRLLKEGRASRQLVLVVVFVALLLDNMLFTVVVPIVPTFLYDMEFKEVNSSLHLGHAGSSPHALASPAFSTIFSFFNNNTVAVEESVPSGIAWMNDTASTIPPPATEAISAHKNNCLQGTGFLEEEITRVGVLFASKAVMQLLVNPFVGPLTNRIGYHIPMFAGFVIMFLSTVMFAFSGTYTLLFVARTLQGIGSSFSSVAGLGMLASVYTDDHERGRAMGTALGGLALGLLVGAPFGSVMYEFVGKSAPFLILAFLALLDGALQLCILQPSKVSPESAKGTPLFMLLKDPYILVAAGSICFANMGVAILEPTLPIWMMQTMCSPKWQLGLAFLPASVSYLIGTNLFGVLANKMGRWLCSLIGMLVVGTSLLCVPLAHNIFGLIGPNAGLGLAIGMVDSSMMPIMGHLVDLRHTSVYGSVYAIADVAFCMGFAIGYSESGLPHGDPDVCNPEAHEGISSGGGQ

SEQ ID NO: 8641 - protein, 493 aa, Homo sapiens
MLRTILDAPQRLLKEGRASRQLVLVVVFVALLLDNMLFTVVVPIVPTFLYDMEFKEVNSSLHLGHAGSSPHALASPAFSTIFSFFNNNTVAVEESVPSGIAWMNDTASTIPPPATEAISAHKNNCLQGTGFLEEEITRVGVLFASKAVMQLLVNPFVGPLTNRIGYHIPMFAGFVIMFLSTVMFAFSGTYTLLFVARTLQGIGSSFSSVAGLGMLASVYTDDHERGRAMGTALGGLALGLLVGAPFGSVMYEFVGKSAPFLILAFLALLDGALQLCILQPSKVSPESAKGTPLFMLLKDPYILVAAGLAFLPASVSYLIGTNLFGVLANKMGRWLCSLIGMLVVGTSLLCVPLAHNIFGLIGPNAGLGLAIGMVDSSMMPIMGHLVDLRHTSVYGSVYAIADVAFCMGFAIGPSTGGAIVKAIGFPWLMVITGVINIVYAPLCYYLRSPPAKEEKLAILSQDCPMETRMYATQKPTKEFPLGEDSDEEPDHEE

SEQ ID NO: 8642 - protein, 548 aa, Homo sapiens
MPALRPLLPLLLLLRLTSGAGLLPGLGSHPGVCPNQLSPNLWVDAQSTCERECSRDQDCAAAEKCCINVCGLHSCVAARFPGSPAAPTTAASCEGFVCPQQGSDCDIWDGQPVCRCRDRCEKEPSFTCASDGLTYYNRCYMDAEACLRGLHLHIVPCKHVLSWPPSSPGPPETTARPTPGAAPVPPALYSSPSPQAVQVGGTASLHCDVSGRPPPAVTWEKQSHQRENLIMRPDQMYGNVVVTSIGQLVLYNARPEDAGLYTCTARNAAGLLRADFPLSVVQREPARDAAPSIPAPAECLPDVQACTGPTSPHLVLWHYDPQRGGCMTFPARGCDGAARGFETYEACQQACARGPGDACVLPAVQGPCRGWEPRWAYSPLLQQCHPFVYGGCEGNGNNFHSRESCEDACPVPRTPPCRACRLRSKLALSLCRSDFAIVGRLTEVLEEPEAAGGIARVALEDVLKDDKMGLKFLGTKYLEVTLSGMDWACPCPNMTAGDGPLVIMGEVRDGVAVLDAGSYVRAASEKRVKKILELLEKQACELLNRFQD

SEQ ID NO: 8643 - protein, 809 aa, Homo sapiens
MEDEQPDSLEGWVPVREGLFAEPERHRLRFLVAWNGAEGKFAVTCHDRTAQQRRLREGARLGPEPEPKPEAAVSPSSWAGLLSAAGLRGAHRQLAALWPPLERCFPRLPPELDVGGGGAWGLGLGLWALLWPTRAGPGEAALQELCGQLERYLGAAADGCGGATVRDALFPAEGGAADCESPREFRERALRARWVEADARLRQVIQGHGKANTMVALMNVYQEEDEAYQELVTVATMFFQYLLQPFRAMREVATLCKLDILKSLDEDDLGPRRVVALEKEAEEWTRRAEEAVVSIQDITVNYFKETVKALAGMQKEMEQDAKRFGQAAWATAIPRLEKLQLMLARETLQLMRAKELCLNHKRAEIQGKMEDLPEQEKNTNVVDELEIQFYEIQLELYEVKFEILKNEEILLTTQLDSLKRLIKEKQDEVVYYDPCENPEELKVIDCVVGLQDDKNLEVKELRRQCQQLESKRGRICAKRASLRSRKDQCKENHRFRLQQAEESIRYSRQHHSIQMKRDKIKEEEQKKKEWINQERQKTLQRLRSFKDKRLAQSVRNTSGSEPVAPNLPSDLSQQMCLPASHAVSVIHPSSRKTRGVPLSEAGNVKSPKCQNCHGNIPVQVFVPVGDQTHSKSSEELSLPPPPPPPPPPPPPPPPPPPPLRALSSSSQAATHQNLGFRAPVKDDQPRPLVCESPAERPRDSLESFSCPGSMDEVLASLRHGRAPLRKVEVPAVRPPHASINEHILAAIRQGVKLKKVHPDLGPNPSSKPTSNRRTSDLERSIKAALQRIKRVSADSEEDSDEQDPGQWDG

SEQ ID NO: 8644 - protein, 156 aa, Homo sapiens
WASQVSENRPVCKAIIQGKQFEGLVDTGADVSIIALNQWPKNWPKQKAVTGLVGIGTASEVYQSTEILHCLGPDNQESTVQPMITSIPLNLWGRDLLQQWGAEITMPTPLYSPTSQKIMTKMGYIPGKGLGKNEDGIKVPVEAKINQKREGIGYPF

SEQ ID NO: 8645 - protein, 222 aa, Homo sapiens
MALHIHEACILLLVIPGLVTSAAISHEDYPADEGDQISSNDNLIFDDYRGKGCVDDSGFVYKLGERFFPGHSNCPCVCALDGPVCDQPECPKIHPKCTKVEHNGCCPECKEVKNFCEYHGKNYKILEEFKPSPCEWCRCEPSNEVHCVVADCAVPECVNPVYEPEQCCPVCKNGPNCFAGTTIIPAGIEVKVDECNICHCHNGDWWKPAQCSKRECQGKQTV

SEQ ID NO: 8646 - protein, 138 aa, Homo sapiens
MALHIHEACILLLVIPGLVTSAAISHEDYPADEGDQISSNDNLIFDDYRGKGCVDDSGFVYKLGERFFPGHSNCPCVCALDGPVCDQPECPKIHPKCTKVEHNGCCPECKEVKNFCEYHGKNYKILEEFKVCVTLHIY

SEQ ID NO: 8647 - protein, 839 aa, Homo sapiens
MDCYTANWNPLGDSAFYRKYELYSMDWDLKEELRDCLVAAAPYGGPIALLRNPWRKEKAASVRPVLDIYSASGMPLASLLWKSGPVVSLGWSAEEELLCVQEDGAVLVYGLHGDFRRHFSMGNEVLQNRVLDARIFHTEFGSGVAILTGAHRFTLSANVGDLKLRRMPEVPGLQSAPSCWTVLCQDRVAHILLAVGPDLYLLDHAACSAVTPPGLAPGVSSFLQMAVSFTYRHLALFTDTGYIWMGTASLKEKLCEFNCNIRAPPKQMVWCSRPRSKERAVVVAWERRLMVVGDAPESIQFVLDEDSYLVPELDGVRIFSRSTHEFLHEVPAASEEIFKIASMAPGALLLEAQKEYEKESQKADEYLREIQELGQLTQAVQQCIEAAGHEHQPDMQKSLLRAASFGKCFLDRFPPDSFVHMCQDLRVLNAVRDYHIGIPLTYSQYKQLTIQVLLDRLVLRRLYPLAIQICEYLRLPEVQGVSRILAHWACYKVQQKDVSDEDVARAINQKLGDTPGVSYSDIAARAYGCGRTELAIKLLEYEPRSGEQVPLLLKMKRSKLALSKAIESGDTDLVFTVLLHLKNELNRGDFFMTLRNQPMALSLYRQFCKHQELETLKDLYNQDDNHQELGSFHIRASYAAEERIEGRVAALQTAADAFYKAKNEFAAKATEDQMRLLRLQRRLEDELGGQFLDLSLHDTVTTLILGGHNKRAEQLARDFRIPDKRLWWLKLTALADLEDWEELEKFSKSKKSPIGYLPFVEICMKQHNKYEAKKYASRVGPEQKVKALLLVGDVAQAADVAIEHRNEAELSLVLSHCTGATDGATADKIQRARAQAQKK

SEQ ID NO: 8648 - protein, 695 aa, Homo sapiens
MDCYTANWNPLGDSAFYRKYELYSMDWDLKEELRDCLVAAAPYGGPIALLRNPWRKEKAASVRPVLDIYSASGMPLASLLWKSGPVVSLGWSAEEELLCVQEDGAVLVYGLHGDFRRHFSMGNEVLQNRVLDARIFHTEFGSGVAILTGAHRFTLSANVGDLKLRRMPEVPGLQSAPSCWTVLCQDRVAHILLAVGPDLYLLDHAACSAVTPPGLAPGVSSFLQMAVSFTYRHLALFTDTGYIWMGTASLKEKLCEFNCNIRAPPKQMVWCSRPRSKERAVVVAWERRLMVVGDAPESIQYKQLTIQVLLDRLVLRRLYPLAIQICEYLRLPEVQGVSRILAHWACYKVQQKDVSDEDVARAINQKLGDTPGVSYSDIAARAYGCGRTELAIKLLEYEPRSGEQVPLLLKMKRSKLALSKAIESGDTDLVFTVLLHLKNELNRGDFFMTLRNQPMALSLYRQFCKHQELETLKDLYNQDDNHQELGSFHIRASYAAEERIEGRVAALQTAADAFYKAKNEFAAKATEDQMRLLRLQRRLEDELGGQFLDLSLHDTVTTLILGGHNKRAEQLARDFRIPDKRLWWLKLTALADLEDWEELEKFSKSKKSPIGYLPFVEICMKQHNKYEAKKYASRVGPEQKVKALLLVGDVAQAADVAIEHRNEAELSLVLSHCTGATDGATADKIQRARAQAQKK

SEQ ID NO: 8649 - protein, 1800 aa, Homo sapiens
MATDSGDPASTEDSEKPDGISFENRVPQVAATLTVEARLKEKNSTFSASGETVERKRFFRKSVEMTEDDKVAESSPKDERIKAAMNIPRVDKLPSNVLRGGQEVKYEQCSKSTSEISKDCFKEKNEKEMEEEAEMKAVATSPSGRFLKFDIELGRGAFKTVYKGLDTETWVEVAWCELQDRKLTKAEQQRFKEEAEMLKGLQHPNIVRFYDSWESILKGKKCIVLVTELMTSGTLKTYLKRFKVMKPKVLRSWCRQILKGLQFLHTRTPPIIHRDLKCDNIFITGPTGSVKIGDLGLATLMRTSFAKSVIGTPEFMAPEMYEEHYDESVDVYAFGMCMLEMATSEYPYSECQNAAQIYRKVTSGIKPASFNKVTDPEVKEIIEGCIRQNKSERLSIRDLLNHAFFAEDTGLRVELAEEDDCSNSSLALRLWVEDPKKLKGKHKDNEAIEFSFNLETDTPEEVAYEMVKSGFFHESDSKAVAKSIRDRVTPIKKTREKKPAGCLEERRDSQCKSMGNVFPQPQNTTLPLAPAQQTGAECEETEVDQHVRQQLLQRKPQQHCSSVTGDNLSEAGAASVIHSDTSSQPSVAYSSNQTMGSQMVSNIPQAEVNVPGQIYSSQQLVGHYQQVSGLQKHSKLTQPQILPLVQGQSTVLPVHVLGPTVVSQPQVSPLTVQKVPQIKPVSQPVGAEQQAALLKPDLVRSLNQDVATTKENVSSPDNPSGNGKQDRIKQRRASCPRPEKGTKFQLTVLQVSTSGDNMVECQLETHNNKMVTFKFDVDGDAPEDIADYMVEDNFVLESEKEKFVEELRAIVGQAQEILHVHFATERATGVDSITVDSNSSQTGSSEQVQINSTSTQTSNESAPQSSPVGRWRFCINQTIRNRETQSPPSLQHSMSAVPGRHPLPSPKNTSNKEISRDTLLTIENNPCHRALFTSKSEHKDVVDGKISECASVETKQPAILYQVEDNRQIMAPVTNSSSYSTTSVRAVPAECEGLTKQASIFIPVYPCHQTASQADALMSHPGESTQTSGNSLTTLAFDQKPQTLSVQQPAMDAEFISQEGETTVNTEASSPKTVIPTQTPGLEPTTLQPTTVLESDGERPPKLEFADNRIKTLDEKLRNLLYQEHSISSIYPESQKDTQSIDSPFSSSAEDTLSCPVTEVIAISHCGIKDSPVQSPNFQQTGSKLLSNVAASQPANISVFKRDLNVITSVPSELCLHEMSSDASLPGDPEAYPAAVSSGGAIHLQTGGGYFGLSFTCPSLKNPISKKSWTRKLKSWAYRLRQSTSFFKRSKVRQVETEEMRSAIAPDPIPLTRESTADTRALNRCKAMSGSFQRGRFQVITIPQQQSAKMTSFGIEHISVFSETNHSSEEAFIKTAKSQLVEIEPATQNPKTSFSYEKLQALQETCKENKGVPKQGDNFLSFSAACETDVSSVTPEKEFEETSATGSSMQSGSELLLKEREILTAGKQPSSDSEFSASLAGSGKSVAKTGPESNQCLPHHEEQAYAQTQSSLFYSPSSPMSSDDESEIEDEDLKVELQRLREKHIQEVVNLQTQQNKELQELYERLRSIKDSKTQSTEIPLPPASPRRPRSFKSKLRSRPQSLTHVDNGIVATGKSCLINELENPLCVESNAASCQQSPASKKGMFTDDLHKLVDDWTKEAVGNSLIKPSLNQLKQSQHKLETENWNKVSENTPSTMGYTSTWISSLSQIRGAVPTSLPQGLSLPSFPGPLSSYGMPHVCQYNAVAGAGYPVQWVGISGTTQQSVVIPAQSGGPFQPGMNMQAFPTSSVQNPATIPPGPK

SEQ ID NO: 8650 - protein, 1790 aa, Homo sapiens
MATDSGDPASTEDSEKPDGISFENRVPQVAATLTVEARLKEKNSTFSASGETVERKRFFRKSVEMTEDDKVAESSPKDERIKAAMNIPRVDKLPSNVLRGGQEVKYEQCSKSTSEISKDCFKEKNEKEMEEEAEMKAVATSPSGRFLKFDIELGRGAFKTVYKGLDTETWVEVAWCELQDRKLTKAEQQRFKEEAEMLKGLQHPNIVRFYDSWESILKGKKCIVLVTELMTSGTLKTYLKRFKVMKPKVLRSWCRQILKGLQFLHTRTPPIIHRDLKCDNIFITGPTGSVKIGDLGLATLMRTSFAKSVIGTPEFMAPEMYEEHYDESVDVYAFGMCMLEMATSEYPYSECQNAAQIYRKVTSGIKPASFNKVTDPEVKEIIEGCIRQNKSERLSIRDLLNHAFFAEDTGLRVELAEEDDCSNSSLALRLWVEDPKKLKGKHKDNEAIEFSFNLETDTPEEVAYEMVKSGFFHESDSKAVAKSIRDRVTPIKKTREKKPAGCLEERRDSQCKSMGNVFPQPQNTTLPLAPAQQTGAECEETEVDQHVRQQLLQRKPQQHCSSVTGDNLSEAGAASVIHSDTSSQPSVAYSSNQTMGSQMVSNIPQAEVNVPGQIYSSQQLVGHYQQVSGLQKHSKLTQPQILPLVQGQSTVLPVHVLGPTVVSQPQVSPLTVQKVPQIKPVSQPVGAEQQAALLKPDLVRSLNQDVATTKENVSSPDNPSGNGKQDRIKQRRASCPRPEKGTKFQLTVLQVSTSGDNMVECQLETHNNKMVTFKFDVDGDAPEDIADYMVEDNFVLESEKEKFVEELRAIVGQAQEILHVHFATERATGVDSITVDSNSSQTGSSEQVQINSTSTQTSNESAPQSSPVGRWRFCINQTIRNRETQSPPSLQHSMSAVPGRHPLPSPKNTSNKEISRDTLLTIENNPCHRALFTSKSEHKDVVDGKISECASVETKQPAILYQVEDNRQIMAPVTNSSSYSTTSVRAVPAECEGLTKQASIFIPVYPCHQTASQADALMSHPGESTQTSGNSLTTLAFDQKPQTLSVQQPAMDAEFISQEGETTVNTEASSPKTVIPTQTPGLEPTTLQPTTVLESDGERPPKLEFADNRIKTLDEKLRNLLYQEHSISSIYPESQKDTQSIDSPFSSSAEDTLSCPVTEVIAISHCGIKDSPVQSPNFQQTGSKLLSNVAASQPANISVFKRDLNVITSVPSELCLHEMSSDASLPGDPEAYPAAVSSGGAIHLQTGGGYFGLSFTCPSLKNPISKKSWTRKLKSWAYRLRQSTSFFKRSKVRQVETEEMRSAIAPDPIPLTRESTADTRALNRCKAMSGSFQRGRFQVITIPQQQSAKMTSFGIEHISVFSETNHSSEEAFIKTAKSQLVEIEPATQNPKTSFSYEKLQALQETCKENKGVPKQGDNFLSFSAACETDVSSVTPEKEFEETSATGSSMQSGSELLLKEREILTAGKQPSSDSEFSASLAGSGKSVAKTGPESNQCLPHHEEQAYAQTQSSLFYSPSSPMSSDDESEIEDEDLKVELQRLREKHIQEVVNLQTQQNKELQELYERLRSIKDSKTQSTEIPLPPASPRRPRSFKSKLRSRPQSLTHVDNGIVATDPLCVESNAASCQQSPASKKGMFTDDLHKLVDDWTKEAVGNSLIKPSLNQLKQSQHKLETENWNKVSENTPSTMGYTSTWISSLSQIRGAVPTSLPQGLSLPSFPGPLSSYGMPHVCQYNAVAGAGYPVQWVGISGTTQQSVVIPAQSGGPFQPGMNMQAFPTSSVQNPATIPPGPK

SEQ ID NO: 8651 - protein, 1743 aa, Homo sapiens
MATDSGDPASTEDSEKPDGISFENRVPQVAATLTVEARLKEKNSTFSASGETVERKRFFRKSVEMTEDDKVAESSPKDERIKAAMNIPRVDKLPSNVLRGGQEVKYEQCSKSTSEISKDCFKEKNEKEMEEEAEMKAVATSPSGRFLKFDIELGRGAFKTVYKGLDTETWVEVAWCELQDRKLTKAEQQRFKEEAEMLKGLQHPNIVRFYDSWESILKGKKCIVLVTELMTSGTLKTYLKRFKVMKPKVLRSWCRQILKGLQFLHTRTPPIIHRDLKCDNIFITGPTGSVKIGDLGLATLMRTSFAKSVIGTPEFMAPEMYEEHYDESVDVYAFGMCMLEMATSEYPYSECQNAAQIYRKVTSGIKPASFNKVTDPEVKEIIEGCIRQNKSERLSIRDLLNHAFFAEDTGLRVELAEEDDCSNSSLALRLWVEDPKKLKGKHKDNEAIEFSFNLETDTPEEVAYEMVKSGFFHESDSKAVAKSIRDRVTPIKKTREKKPAGCLEERRDSQCKSMGNVFPQPQNTTLPLAPAQQTGAECEETEVDQHVRQQLLQRKPQQHCSSVTGDNLSEAGAASVIHSDTSSQPSVAYSSNQTMGSQMVSNIPQAEVNVPGQIYSSQQLVGHYQQVSGLQKHSKLTQPQILPLVQGQSTVLPVHVLGPTVVSQPQVSPLTVQKVPQIKPVSQPVGAEQQAALLKPDLVRSLNQDVATTKENVSSPDNPSGNGKQDRIKQRRASCPRPEKGTKFQLTVLQVSTSGDNMVECQLETHNNKMVTFKFDVDGDAPEDIADYMVEDNFVLESEKEKFVEELRAIVGQAQEILHVHFATERATGVDSITVDSNSSQTGSSEQVQINSTSTQTSNESAPQSSPVGRWRFCINQTIRNRETQSPPSLQHSMSAVPGRHPLPSPKNTSNKEISRDTLLTIENNPCHRALFTSKSEHKDVVDGKISECASVETKQPAILYQVEDNRQIMAPVTNSSSYSTTSVRAVPAECEGLTKQASIFIPVYPCHQTASQADALMSHPGESTQTSGNSLTTLAFDQKPQTLSVQQPAMDAEFISQEGETTVNTEASSPKTVIPTQTPGLEPTTLQPTTVLESDGERPPKLEFADNRIKTLDEKLRNLLYQEHSISSIYPESQKDTQSIDSPFSSSAEDTLSCPVTEVIAISHCGIKDSPVQSPNFQQTGSKLLSNVAASQPANISVFKRDLNVITSVPSELCLHEMSSDASLPGDPEAYPAAVSSGGAIHLQTGVETEEMRSAIAPDPIPLTRESTADTRALNRCKAMSGSFQRGRFQVITIPQQQSAKMTSFGIEHISVFSETNHSSEEAFIKTAKSQLVEIEPATQNPKTSFSYEKLQALQETCKENKGVPKQGDNFLSFSAACETDVSSVTPEKEFEETSATGSSMQSGSELLLKEREILTAGKQPSSDSEFSASLAGSGKSVAKTGPESNQCLPHHEEQAYAQTQSSLFYSPSSPMSSDDESEIEDEDLKVELQRLREKHIQEVVNLQTQQNKELQELYERLRSIKDSKTQSTEIPLPPASPRRPRSFKSKLRSRPQSLTHVDNGIVATDPLCVESNAASCQQSPASKKGMFTDDLHKLVDDWTKEAVGNSLIKPSLNQLKQSQHKLETENWNKVSENTPSTMGYTSTWISSLSQIRGAVPTSLPQGLSLPSFPGPLSSYGMPHVCQYNAVAGAGYPVQWVGISGTTQQSVVIPAQSGGPFQPGMNMQAFPTSSVQNPATIPPGPK

SEQ ID NO: 8652 - protein, 1753 aa, Homo sapiens
MATDSGDPASTEDSEKPDGISFENRVPQVAATLTVEARLKEKNSTFSASGETVERKRFFRKSVEMTEDDKVAESSPKDERIKAAMNIPRVDKLPSNVLRGGQEVKYEQCSKSTSEISKDCFKEKNEKEMEEEAEMKAVATSPSGRFLKFDIELGRGAFKTVYKGLDTETWVEVAWCELQDRKLTKAEQQRFKEEAEMLKGLQHPNIVRFYDSWESILKGKKCIVLVTELMTSGTLKTYLKRFKVMKPKVLRSWCRQILKGLQFLHTRTPPIIHRDLKCDNIFITGPTGSVKIGDLGLATLMRTSFAKSVIGTPEFMAPEMYEEHYDESVDVYAFGMCMLEMATSEYPYSECQNAAQIYRKVTSGIKPASFNKVTDPEVKEIIEGCIRQNKSERLSIRDLLNHAFFAEDTGLRVELAEEDDCSNSSLALRLWVEDPKKLKGKHKDNEAIEFSFNLETDTPEEVAYEMVKSGFFHESDSKAVAKSIRDRVTPIKKTREKKPAGCLEERRDSQCKSMGNVFPQPQNTTLPLAPAQQTGAECEETEVDQHVRQQLLQRKPQQHCSSVTGDNLSEAGAASVIHSDTSSQPSVAYSSNQTMGSQMVSNIPQAEVNVPGQIYSSQQLVGHYQQVSGLQKHSKLTQPQILPLVQGQSTVLPVHVLGPTVVSQPQVSPLTVQKVPQIKPVSQPVGAEQQAALLKPDLVRSLNQDVATTKENVSSPDNPSGNGKQDRIKQRRASCPRPEKGTKFQLTVLQVSTSGDNMVECQLETHNNKMVTFKFDVDGDAPEDIADYMVEDNFVLESEKEKFVEELRAIVGQAQEILHVHFATERATGVDSITVDSNSSQTGSSEQVQINSTSTQTSNESAPQSSPVGRWRFCINQTIRNRETQSPPSLQHSMSAVPGRHPLPSPKNTSNKEISRDTLLTIENNPCHRALFTSKSEHKDVVDGKISECASVETKQPAILYQVEDNRQIMAPVTNSSSYSTTSVRAVPAECEGLTKQASIFIPVYPCHQTASQADALMSHPGESTQTSGNSLTTLAFDQKPQTLSVQQPAMDAEFISQEGETTVNTEASSPKTVIPTQTPGLEPTTLQPTTVLESDGERPPKLEFADNRIKTLDEKLRNLLYQEHSISSIYPESQKDTQSIDSPFSSSAEDTLSCPVTEVIAISHCGIKDSPVQSPNFQQTGSKLLSNVAASQPANISVFKRDLNVITSVPSELCLHEMSSDASLPGDPEAYPAAVSSGGAIHLQTGVETEEMRSAIAPDPIPLTRESTADTRALNRCKAMSGSFQRGRFQVITIPQQQSAKMTSFGIEHISVFSETNHSSEEAFIKTAKSQLVEIEPATQNPKTSFSYEKLQALQETCKENKGVPKQGDNFLSFSAACETDVSSVTPEKEFEETSATGSSMQSGSELLLKEREILTAGKQPSSDSEFSASLAGSGKSVAKTGPESNQCLPHHEEQAYAQTQSSLFYSPSSPMSSDDESEIEDEDLKVELQRLREKHIQEVVNLQTQQNKELQELYERLRSIKDSKTQSTEIPLPPASPRRPRSFKSKLRSRPQSLTHVDNGIVATGKSCLINELENPLCVESNAASCQQSPASKKGMFTDDLHKLVDDWTKEAVGNSLIKPSLNQLKQSQHKLETENWNKVSENTPSTMGYTSTWISSLSQIRGAVPTSLPQGLSLPSFPGPLSSYGMPHVCQYNAVAGAGYPVQWVGISGTTQQSVVIPAQSGGPFQPGMNMQAFPTSSVQNPATIPPGPK

SEQ ID NO: 8653 - protein, 796 aa, Homo sapiens
MPTTQQSPQDEQEKLLDEAIQAVKVQSFQMKRCLDKNKLMDALKHASNMLGELRTSMLSPKSYYELYMAISDELHYLEVYLTDEFAKGRKVADLYELVQYAGNIIPRLYLLITVGVVYVKSFPQSRKDILKDLVEMCRGVQHPLRGLFLRNYLLQCTRNILPDEGEPTDEETTGDISDSMDFVLLNFAEMNKLWVRMQHQGHSRDREKRERERQELRILVGTNLVRLSQLEGVNVERYKQIVLTGILEQVVNCRDALAQEYLMECIIQVFPDEFHLQTLNPFLRACAELHQNVNVKNIIIALIDRLALFAHREDGPGIPADIKLFDIFSQQVATVIQSRQDMPSEDVVSLQVSLINLAMKCYPDRVDYVDKVLETTVEIFNKLNLEHIATSSAVSKELTRLLKIPVDTYNNILTVLKLKHFHPLFEYFDYESRKSMSCYVLSNVLDYNTEIVSQDQVDSIMNLVSTLIQDQPDQPVEDPDPEDFADEQSLVGRFIHLLRSEDPDQQYLILNTARKHFGAGGNQRIRFTLPPLVFAAYQLAFRYKENSKVDDKWEKKCQKIFSFAHQTISALIKAELAELPLRLFLQGALAAGEIGFENHETVAYEFMSQAFSLYEDEISDSKAQLAAITLIIGTFERMKCFSEENHEPLRTQCALAASKLLKKPDQGRAVSTCAHLFWSGRNTDKNGEELHGGKRVMECLKKALKIANQCMDPSLQVQLFIEILNRYIYFYEKENDAVTIQVLNQLIQKIREDLPNLESSEETEQINKHFHNTLEHLRLRRESPESEGPIYEGLIL

SEQ ID NO: 8654 - protein, 393 aa, Homo sapiens
MGLLRGGLPCARAMARLGAVRSHYCALLLAAALAVCAFYYLGSGRETFSSATKRLKEARAGAPAAPSPPALELARGSVAPAPGAKAKSLEGGGAGPVDYHLLMMFTKAEHNAALQAKARVALRSLLRLAKFEAHEVLNLHFVSEEASREVAKGLLRELLPPAAGFKCKVIFHDVAVLTDKLFPIVEAMQKHFSAGLGTYYSDSIFFLSVAMHQIMPKEILQIIQLDLDLKFKTNIRELFEEFDSFLPGAIIGIAREMQPVYRHTFWQFRHENPQTRVGGPPPEGLPGFNSGVMLLNLEAMRQSPLYSRLLEPAQVQQLADKYHFRGHLGDQDFFTMIGMEHPKLFHVLDCTWNRQLCTWWRDHGYSDVFEAYFRCEGHVKIYHGNCNTPIPED

SEQ ID NO: 8655 - protein, 190 aa, Homo sapiens
MWPPRCKDPGRQSAEILQIIQLDLDLKFKTNIRELFEEFDSFLPGAIIGIAREMQPVYRHTFWQFRHENPQTRVGGPPPEGLPGFNSGVMLLNLEAMRQSPLYSRLLEPAQVQQLADKYHFRGHLGDQDFFTMIGMEHPKLFHVLDCTWNRQLCTWWRDHGYSDVFEAYFRCEGHVKIYHGNCNTPIPED

SEQ ID NO: 8656 - protein, 187 aa, Homo sapiens
MNGMSVLMKETLKSSVTPSPYEETGERQPSVNWAVSPHQTQNQWARWSWTSQPLELHTFWQFRHENPQTRVGGPPPEGLPGFNSGVMLLNLEAMRQSPLYSRLLEPAQVQQLADKYHFRGHLGDQDFFTMIGMEHPKLFHVLDCTWNRQLCTWWRDHGYSDVFEAYFRCEGHVKIYHGNCNTPIPED

SEQ ID NO: 8657 - protein, 501 aa, Homo sapiens
MVRKPVVSTISKGGYLQGNVNGRLPSLGNKEPPGQEKVQLKRKVTLLRGVSIIIGTIIGAGIFISPKGVLQNTGSVGMSLTIWTVCGVLSLFGALSYAELGTTIKKSGGHYTYILEVFGPLPAFVRVWVELLIIRPAATAVISLAFGRYILEPFFIQCEIPELAIKLITAVGITVVMVLNSMSVSWSARIQIFLTFCKLTAILIIIVPGVMQLIKGQTQNFKDAFSGRDSSITRLPLAFYYGMYAYAGWFYLNFVTEEVENPEKTIPLAICISMAIVTIGYVLTNVAYFTTINAEELLLSNAVAVTFSERLLGNFSLAVPIFVALSCFGSMNGGVFAVSRLFYVASREGHLPEILSMIHVRKHTPLPAVIVLHPLTMIMLFSGDLDSLLNFLSFARWLFIGLAVAGLIYLRYKCPDMHRPFKVPLFIPALFSFTCLFMVALSLYSDPFSTGIGFVITLTGVPAYYLFIIWDKKPRWFRIMSEKITRTLQIILEVVPEEDKL

SEQ ID NO: 8658 - protein, 476 aa, Homo sapiens
MDAVAFEDVAVNFTQEEWALLGPSQKNLYRYVMQETIRNLDCIRMIWEEQNTEDQYKNPRRNLRCHMVERFSESKDSSQCGETFSLIRDSIVNNSICPGEDPCQSAECEEVIMGHLSLNSHIRVDSGHKPHEYQEYGEKPHTHKQRGKAFSYHHSFQSRGRPHTGKKRYECKECGKTFSSRRNLRRHMVVQGGNRPYKCKLCGKAFFWPSLLRMHERTHTGEKPYECKQCSKAFPFYSSYRRHERMHTGEKPYECKQCSKALPDSSSYIRHERTHTGEKPYTCKQCGKAFSVSSSLRRHETTHSAEKPYECKQCGKTFHHLGSFQIHMKRHTGDRPHKCKICGKGFDRPSLVRYHERIHTGEKPYECKQCGKTLSHSSSFRRHMIMHTGGGPHKCKICGKAFVYPSVCQRHEKSHSGEKPYECKQCGKALSHSSSFRRHMVMHTGDGPNKCKVCGKAFVYPSVCQRHEKTHWRETI

SEQ ID NO: 8659 - protein, 228 aa, Homo sapiens
MDAVAFEDVAVNFTQEEWALLGPSQKNLYRYVMQETIRNLDCIRMIWEEQNTEDQYKNPRRNLRCHMVERFSESKDSSQCGETFSLIRDSIVNNSICPGEDPCQSAECEEVIMGHLSLNSHIRVDSGHKPHEYQEYGEKPHTHKQRGKAFSYHHSFQSRGRPHTGKKRYECKECGKTFSSRRNLRRHMVVQGGNRPYKFPIEDMRECTLGRNRMNVSSVLKPCLIPVP

SEQ ID NO: 8660 - protein, 544 aa, Homo sapiens
MAVMDLSSPWALTKQDSACFHLRNAEEERMIAVFLTTWLQEPMTFKDVAVEFTQEEWMMLDSAQRSLYRDVMLENYRNLTSVEYQLYRLTVISPLDQEEIRNMKKRIPQAICPDQKIQPKTKESTVQKILWEEPSNAVKMIKLTMHNWSSTLREDWECHKIRKQHKIPGGHWRQMIYAPKKTVPQELFRDYHELEENSKLGSKLIFSQSIFTSKHCQKCYSEIGCLKHNSIINNYVKNSISEKLYESHECDTTLWHFQRNQTVQKEYTYSKHGMHFTHNMFPVPNNLHMAQNACECNKDETLCHQSSLKKQGQTHTEKKHECNQCGKAFKRISNLTLYKKSHMGEKQYECKECGKVFNDSSTLRRHVRTHTGEKPYECNQCGKAFSQKTSLKAHMRTHTGEKPYECNQCGKSFGTSSYLIVHKRIHTGEKLYECSECGKAFNTSSHLKVHKKIHTGENVYECSDCGKVFSGVSSLRMHIRTHTGEKPYECKECRKAFSVSSSLRRHVRIHTGEKPYECIQCGKAFSQSSSLIIHKRIHTERETL

SEQ ID NO: 8661 - protein, 1941 aa, Homo sapiens
MAQGSGGREGALRTPAGGWHSPPSPDMQELLRSVERDLSIDPRQLAPAPGGTHVVALVPARWLASLRDRRLPLGPCPRAEGLGEAEVRTLLQRSVQRLPAGWTRVEVHGLRKRRLSYPLGGGLPFEDGSCGPETLTRFMQEVAAQNYRNLWRHAYHTYGQPYSHSPAPSAVPALDSVRQALQRVYGCSFLPVGETTQCPSYAREGPCPPRGSPACPSLLRAEALLESPEMLYVVHPYVQFSLHDVVTFSPAKLTNSQAKVLFILFRVLRAMDACHRQGLACGALSLYHIAVDEKLCSELRLDLSAYERPEEDENEEAPVARDEAGIVSQEEQGGQPGQPTGQEELRSLVLDWVHGRISNFHYLMQLNRLAGRRQGDPNYHPVLPWVVDFTTPHGRFRDLRKSKFRLNKGDKQLDFTYEMTRQAFVAGGAGGGEPPHVPHHISDVLSDITYYVYKARRTPRSVLCGHVRAQWEPHEYPASMERMQNWTPDECIPEFYTDPSIFRSIHPDMPDLDVPAWCSSSQEFVAAHRALLESREVSRDLHHWIDLTFGYKLQGKEAVKEKNVCLHLVDAHTHLASYGVVQLFDQPHPQRLAGAPALAPEPPLIPKLLVQTIQETTGREDFTENPGQLPNGVGRPVLEATPCEASWTRDRPVAGEDDLEQATEALDSISLAGKAGDQLGSSSQASPGLLSFSVASASRPGRRNKAAGADPGEGEEGRILLPEGFNPMQALEELEKTGNFLAKGLGGLLEVPEQPRVQPAVPLQCLLHRDMQALGVLLAEMVFATRVRTLQPDAPLWVRFQAVRGLCTRHPKEVPVSLQPVLDTLLQMSGPEVPMGAERGKLDQLFEYRPVSQGLPPPCPSQLLSPFSSVVPFPPYFPALHRFILLYQARRVEDEAQGRELVFALWQQLGAVLKDITPEGLEILLPFVLSLMSEEHTAVYTAWYLFEPVAKALGPKNANKYLLKPLIGAYESPCQLHGRFYLYTDCFVAQLMVRLGLQAFLTHLLPHVLQVLAGAEASQEESKDLAGAAEEEESGLPGAGPGSCAFGEEIPMDGEPPASSGLGLPDYTSGVSFHDQADLPETEDFQAGLYVTESPQPQEAEAVSLGRLSDKSSTSETSLGEERAPDEGGAPVDKSSLRSGDSSQDLKQSEGSEEEEEEEDSCVVLEEEEGEQEEVTGASELTLSDTVLSMETVVAGGSGGDGEEEEEALPEQSEGKEQKILLDTACKMVRWLSAKLGPTVASRHVARNLLRLLTSCYVGPTRQQFTVSSGESPPLSAGNIYQKRPVLGDIVSGPVLSCLLHIARLYGEPVLTYQYLPYISYLVAPGSASGPSRLNSRKEAGLLAAVTLTQKIIVYLSDTTLMDILPRISHEVLLPVLSFLTSLVTGFPSGAQARTILCVKTISLIALICLRIGQEMVQQHLSEPVATFFQVFSQLHELRQQDLKLDPAGRGEGQLPQVVFSDGQQRPVDPALLDELQKVFTLEMAYTIYVPFSCLLGDIIRKIIPNHELVGELAALYLESISPSSRNPASVEPTMPGTGPEWDPHGGGCPQDDGHSGTFGSVLVGNRIQIPNDSRPENPGPLGPISGVGGGGLGSGSDDNALKQELPRSVHGLSGNWLAYWQYEIGVSQQDAHFHFHQIRLQSFPGHSGAVKCVAPLSSEDFFLSGSKDRTVRLWPLYNYGDGTSETAPRLVYTQHRKSVFFVGQLEAPQHVVSCDGAVHVWDPFTGKTLRTVEPLDSRVPLTAVAVMPAPHTSITMASSDSTLRFVDCRKPGLQHEFRLGGGLNPGLVRALAISPSGRSVVAGFSSGFMVLLDTRTGLVLRGWPAHEGDILQIKAVEGSVLVSSSSDHSLTVWKELEQKPTHHYKSASDPIHTFDLYGSEVVTGTVSNKIGVCSLLEPPSQATTKLSSENFRGTLTSLALLPTKRHLLLGSDNGVIRLLA

SEQ ID NO: 8662 - protein, 692 aa, Homo sapiens
MDGEPPASSGLGLPDYTSGVSFHDQADLPETEDFQAGLYVTESPQPQEAEAVSLGRLSDKSSTYQYLPYISYLVAPGSASGPSRLNSRKEAGLLAAVTLTQKIIVYLSDTTLMDILPRISHEVLLPVLSFLTSLVTGFPSGAQARTILCVKTISLIALICLRIGQEMVQQHLSEPVATFFQVFSQLHELRQQDLKLDPAGRGEGQLPQVVFSDGQQRPVDPALLDELQKVFTLEMAYTIYVPFSCLLGDIIRKIIPNHELVGELAALYLESISPSSRNPASVEPTMPGTGPEWDPHGGGCPQDDGHSGTFGSVLVGNRIQIPNDSRPENPGPLGPISGVGGGGLGSGSDDNALKQELPRSVHGLSGNWLAYWQYEIGVSQQDAHFHFHQIRLQSFPGHSGAVKCVAPLSSEDFFLSGSKDRTVRLWPLYNYGDGTSETAPRLVYTQHRKSVFFVGQLEAPQHVVSCDGAVHVWDPFTGKTLRTVEPLDSRVPLTAVAVMPAPHTSITMASSDSTLRFVDCRKPGLQHEFRLGGGLNPGLVRALAISPSGRSVVAGFSSGFMVLLDTRTGLVLRGWPAHEGDILQIKAVEGSVLVSSSSDHSLTVWKELEQKPTHHYKSASDPIHTFDLYGSEVVTGTVSNKIGVCSLLEPPSQATTKLSSENFRGTLTSLALLPTKRHLLLGSDNGVIRLLA

SEQ ID NO: 8663 - protein, 890 aa, Homo sapiens
MDGEPPASSGLGLPDYTSGVSFHDQADLPETEDFQAGLYVTESPQPQEAEAVSLGRLSDKSSTSETSLGEERAPDEGGAPVDKSSLRSGDSSQDLKQSEGSEEEEEEEDSCVVLEEEEGEQEEVTGASELTLSDTVLSMETVVAGGSGGDGEEEEEALPEQSEGKEQKILLDTACKMVRWLSAKLGPTVASRHVARNLLRLLTSCYVGPTRQQFTVSSGESPPLSAGNIYQKRPVLGDIVSGPVLSCLLHIARLYGEPVLTYQYLPYISYLVAPGSASGPSRLNSRKEAGLLAAVTLTQKIIVYLSDTTLMDILPRISHEVLLPVLSFLTSLVTGFPSGAQARTILCVKTISLIALICLRIGQEMVQQHLSEPVATFFQVFSQLHELRQQDLKLDPAGRGEGQLPQVVFSDGQQRPVDPALLDELQKVFTLEMAYTIYVPFSCLLGDIIRKIIPNHELVGELAALYLESISPSSRNPASVEPTMPGTGPEWDPHGGGCPQDDGHSGTFGSVLVGNRIQIPNDSRPENPGPLGPISGVGGGGLGSGSDDNALKQELPRSVHGLSGNWLAYWQYEIGVSQQDAHFHFHQIRLQSFPGHSGAVKCVAPLSSEDFFLSGSKDRTVRLWPLYNYGDGTSETAPRLVYTQHRKSVFFVGQLEAPQHVVSCDGAVHVWDPFTGKTLRTVEPLDSRVPLTAVAVMPAPHTSITMASSDSTLRFVDCRKPGLQHEFRLGGGLNPGLVRALAISPSGRSVVAGFSSGFMVLLDTRTGLVLRGWPAHEGDILQIKAVEGSVLVSSSSDHSLTVWKELEQKPTHHYKSASDPIHTFDLYGSEVVTGTVSNKIGVCSLLEPPSQATTKLSSENFRGTLTSLALLPTKRHLLLGSDNGVIRLLA

SEQ ID NO: 8664 - protein, 1811 aa, Homo sapiens
MAQGSGGREGALRTPAGGWHSPPSPDMQELLRSVERDLSIDPRQLAPAPGGTHVVALVPARWLASLRDRRLPLGPCPRAEGLGEAEVRTLLQRSVQRLPAGWTRVEVHGLRKRRLSYPLGGGLPFEDGSCGPETLTRFMQEVAAQNYRNLWRHAYHTYGQPYSHSPAPSAVPALDSVRQALQRVYGCSFLPVGETTQCPSYAREGPCPPRGSPACPSLLRAEALLESPEMLYVVHPYVQFSLHDVVTFSPAKLTNSQAKVLFILFRVLRAMDACHRQGLACGALSLYHIAVDEKLCSELRLDLSAYERPEEDENEEAPVARDEAGIVSQEEQGGQPGQPTGQEELRSLVLDWVHGRISNFHYLMQLNRLAGRRQGDPNYHPVLPWVVDFTTPHGRFRDLRKSKFRLNKGDKQLDFTYEMTRQAFVAGGAGGGEPPHVPHHISDVLSDITYYVYKARRTPRSVLCGHVRAQWEPHEYPASMERMQNWTPDECIPEFYTDPSIFRSIHPDMPDLDVPAWCSSSQEFVAAHRALLESREVSRDLHHWIDLTFGYKLQGKEAVKEKNVCLHLVDAHTHLASYGVVQLFDQPHPQRLAGAPALAPEPPLIPKLLVQTIQETTGREDFTENPGQLPNGVGRPVLEATPCEASWTRDRPVAGEDDLEQATEALDSISLAGKAGDQLGSSSQASPGLLSFSVASASRPGRRNKAAGADPGEGEEGRILLPEGFNPMQALEELEKTGNFLAKGLGGLLEVPEQPRVQPAVPLQCLLHRDMQALGVLLAEMVFATRVRTLQPDAPLWVRFQAVRGLCTRHPKEVPVSLQPVLDTLLQMSGPEVPMGAERGKLDQLFEYRPVSQGLPPPCPSQLLSPFSSVVPFPPYFPALHRFILLYQARRVEDEAQGRELVFALWQQLGAVLKDITPEGLEILLPFVLSLMSEEHTAVYTAWYLFEPVAKALGPKNANKYLLKPLIGAYESPCQLHGRFYLYTDCFVAQLMVRLGLQAFLTHLLPHVLQVLAGAEASQEESKDLAGAAEEEESGLPGAGPGSCAFGEEIPMDGEPPASSGLGLPDYTSGVSFHDQADLPETEDFQAGLYVTESPQPQEAEAVSLGRLSDKSSTSETSLGEERAPDEGGAPVDKSSLRSGDSSQDLKQSEGSEEEEEEEDSCVVLEEEEGEQEEVTGASELTLSDTVLSMETVVAGGSGGDGEEEEEALPEQSEGKEQKILLDTACKMVRWLSAKLGPTVASRHVARNLLRLLTSCYVGPTRQQFTVSSGESPPLSAGNIYQKRPVLGDIVSGPVLSCLLHIARLYGEPVLTYQYLPYISYLVAPGSASGPSRLNSRKEAGLLAAVTLTQKIIVYLSDTTLMDILPRISHEVLLPVLSFLTSLVTGFPSGAQARTILCVKTISLIALICLRIGQEMVQQHLSEPVATFFQVFSQLHELRQQDLKLDPAGRGEGQLPQVVFSDGQQRPVDPALLDELQKVFTLEMAYTIYVPFSCLLGDIIRKIIPNHELVGELAALYLESISPSSRNPASVEPTMPGTGPEWDPHGGGCPQDDGHSGTFGSVLVGNRIQIPNDSRPENPGPLGPISGVGGGGLGSGSDDNALKQELPRSVHGLSGNWLAYWQYEIGVSQQDAHFHFHQIRLQSFPGHSGAVKCVAPLSSEDFFLSGSKDRTVRLWPLYNYGDGTSETAPRLVYTQHRKSVFFVGQLEAPQHVVSCDGAVHVWDPFTGKTLRTVEPLDSRVPLTAVAVMPAPHTSITMASSDSTLRFVDCRKPGLQVRGVQFPEHSPGSLGTWQGGETPQKQKARMLFWGPS

SEQ ID NO: 8665 - protein, 738 aa, Homo sapiens
MLVRVVLSLTPSFPEPSALYTACKMVRWLSAKLGPTVASRHVARNLLRLLTSCYVGPTRQQFTVSSGESPPLSAGNIYQKRPVLGDIVSGPVLSCLLHIARLYGEPVLTYQYLPYISYLVAPGSASGPSRLNSRKEAGLLAAVTLTQKIIVYLSDTTLMDILPRISHEVLLPVLSFLTSLVTGFPSGAQARTILCVKTISLIALICLRIGQEMVQQHLSEPVATFFQVFSQLHELRQQDLKLDPAGRGEGQLPQVVFSDGQQRPVDPALLDELQKVFTLEMAYTIYVPFSCLLGDIIRKIIPNHELVGELAALYLESISPSSRNPASVEPTMPGTGPEWDPHGGGCPQDDGHSGTFGSVLVGNRIQIPNDSRPENPGPLGPISGVGGGGLGSGSDDNALKQELPRSVHGLSGNWLAYWQYEIGVSQQDAHFHFHQIRLQSFPGHSGAVKCVAPLSSEDFFLSGSKDRTVRLWPLYNYGDGTSETAPRLVYTQHRKSVFFVGQLEAPQHVVSCDGAVHVWDPFTGKTLRTVEPLDSRVPLTAVAVMPAPHTSITMASSDSTLRFVDCRKPGLQHEFRLGGGLNPGLVRALAISPSGRSVVAGFSSGFMVLLDTRTGLVLRGWPAHEGDILQIKAVEGSVLVSSSSDHSLTVWKELEQKPTHHYKSASDPIHTFDLYGSEVVTGTVSNKIGVCSLLEPPSQATTKLSSENFRGTLTSLALLPTKRHLLLGSDNGVIRLLA

SEQ ID NO: 8666 - protein, 714 aa, Homo sapiens
MVRWLSAKLGPTVASRHVARNLLRLLTSCYVGPTRQQFTVSSGESPPLSAGNIYQKRPVLGDIVSGPVLSCLLHIARLYGEPVLTYQYLPYISYLVAPGSASGPSRLNSRKEAGLLAAVTLTQKIIVYLSDTTLMDILPRISHEVLLPVLSFLTSLVTGFPSGAQARTILCVKTISLIALICLRIGQEMVQQHLSEPVATFFQVFSQLHELRQQDLKLDPAGRGEGQLPQVVFSDGQQRPVDPALLDELQKVFTLEMAYTIYVPFSCLLGDIIRKIIPNHELVGELAALYLESISPSSRNPASVEPTMPGTGPEWDPHGGGCPQDDGHSGTFGSVLVGNRIQIPNDSRPENPGPLGPISGVGGGGLGSGSDDNALKQELPRSVHGLSGNWLAYWQYEIGVSQQDAHFHFHQIRLQSFPGHSGAVKCVAPLSSEDFFLSGSKDRTVRLWPLYNYGDGTSETAPRLVYTQHRKSVFFVGQLEAPQHVVSCDGAVHVWDPFTGKTLRTVEPLDSRVPLTAVAVMPAPHTSITMASSDSTLRFVDCRKPGLQHEFRLGGGLNPGLVRALAISPSGRSVVAGFSSGFMVLLDTRTGLVLRGWPAHEGDILQIKAVEGSVLVSSSSDHSLTVWKELEQKPTHHYKSASDPIHTFDLYGSEVVTGTVSNKIGVCSLLEPPSQATTKLSSENFRGTLTSLALLPTKRHLLLGSDNGVIRLLA

SEQ ID NO: 8667 - protein, 301 aa, Homo sapiens
MASRYVAVGMILSQTVVGVLGSFSVLLHYLSFYCTGCRLRSTDLIVKHLIVANFLALRCKGVPQTMAAFGVRYFLNALGCKLVFYLHRVGRGVSIGTTCLLSVFQVITVSSRKSRWAKLKEKAPKHVGFSVLLCWIVCMLVNIIFPMYVTGKWNYTNITVNEDLGYCSGGGNNKIAQTLRAMLLSFPDVLCLGLMLWVSSSMVCILHRHKQRVQHIDRSDLSPRASPENRATQSILILVSTFVSSYTLSCLFQVCMALLDNPNSLLVNTSALMSVCFPTLSPFVLMSCDPSVYRFCFAWKR

SEQ ID NO: 8668 - protein, 1748 aa, Homo sapiens
MARAWQHPFLNVFRHFRVDEWKRSAKQGDVAVVTDKTLKGAVYRIRGSVSAANYIQLPKSSTQSLGLTGRYLYVLFRPLPSKHFVIHLDVSSKDNQVIRVSFSNLFKEFKSTATWLQFPLVLEARTPQRDLVGLAPSGARWTCLQLDLQDVLLVYLNRCYGHLKSIRLCASLLVRNLYTSDLCFEPAISGAQWAKLPVTPMPREMAFPVPKGESWHDRYIHVRFPSESLKVPSKPIEKSCSPPEAVLLGPGPQPLPCPVASSKPVRFSVSPVVQTPSPTASGRAALAPRPFPEVSLSQERSDASNADGPGFHSLEPWAQLEASDIHTAAAGTHVLTHESAEVPVARTGSCEGFLPDPVLRLKGVIGFGGHGTRQALWTPDGAAVVYPCHAVIVVLLVDTGEQRFFLGHTDKVSALALDGSSSLLASAQARAPSVMRLWDFQTGRCLCLFRSPMHVVCSLSFSDSGALLCGVGKDHHGRTMVVAWGTGQVGLGGEVVVLAKAHTDFDVQAFRVTFFDETRMASCGQGSVRLWRLRGGVLRSCPVDLGEHHALQFTDLAFKQARDGCPEPSAAMLFVCSRSGHILEIDCQRMVVRHARRLLPTRTPGGPHPQKQTFSSGPGIAISSLSVSPAMCAVGSEDGFLRLWPLDFSSVLLEAEHEGPVSSVCVSPDGLRVLSATSSGHLGFLDTLSRVYHMLARSHTAPVLALAMEQRRGQLATVSQDRTVRIWDLATLQQLYDFTSSEDAPCAVTFHPTRPTFFCGFSSGAVRSFSLEAAEVLVEHTCHRGAVTGLTATPDGRLLFSSCSQGSLAQYSCADPQWHVLRVAADMVCPDAPASPSALAVSRDGRLLAFVGPSRCTVTVMGSASLDELLRVDIGTLDLASSRLDSAMAVCFGPAALGHLLVSTSSNRVVVLDAVSGRIIRELPGVHPEPCPSLTLSEDARFLLIAAGRTIKVWDYATQASPGPQVYIGHSEPVQAVAFSPDQQQVLSAGDAVFLWDVLAPTESDQSFPGAPPACKTGPGAGPLEDAASRASELPRQQVPKPCQASPPRLGVCARPPEGGDGARDTRNSGAPRTTYLASCKAFTPARVSCSPHSAKGTCPPPASGGWLRLKAVVGYSGNGRANMVWRPDTGFFAYTCGRLVVVEDLHSGAQQHWSGHSAEISTLALSHSAQVLASASGRSSTTAHCQIRVWDVSGGLCQHLIFPHSTTVLALAFSPDDRLLVTLGDHDGRTLALWGTATYDLVSSTRLPEPVHGVAFNPWDAGELTCVGQGTVTFWLLQQRGADISLQVRREPVPEAVGAGELTSLCYGAPPLLYCGTSSGQVCVWDTRAGRCFLSWEADDGGIGLLLFSGSRLVSGSSTGRLRLWAVGAVSELRCKGSGASSVFMEHELVLDGAVVSASFDDSVDMGVVGTTAGTLWFVSWAEGTSTRLISGHRSKVNEVVFSPGESHCATCSEDGSVRVWALASMELVIQFQVLNQSCLCLAWSPPCCGRPEQQRLAAGYGDGSLRIFSVSRTAMELKMHPHPVALTTVAFSTDGQTVLSGDKDGLVAVSHPCTGTTFRVLSDHQGAPISTICVTCKECEDLGVEGTDLWLAASGDQRVSVWASDWLRNHCELVDWLSFPMPATTETQGHLPPSLAAFCPWDGALLMYVGPGVYKEVIIYNLCQKQVVEKIPLPFFAMSLSLSPGTHLLAVGFAECMLRLVDCAMGTAQDFAGHDNAVHLCRFTPSARLLFTAARNEILVWEVPGL

SEQ ID NO: 8669 - protein, 271 aa, Homo sapiens
MLWFGQPGPGGWNRKCLRPFTLPRGQHPQPSYGFPQVNEVVFSPGESHCATCSEDGSVRVWALASMELVIQFQVLNQSCLCLAWSPPCCGRPEQQRLAAGYGDGSLRIFSVSRTAMELKMHPHPVALTTVAFSTDGQTVLSGDKDGLVAVSHPCTGTTFRVLSDHQGAPISTICVTCKECEDLGVEGTDLWLAASGDQRVSVWASDWLRNHCELVDWLSFPMPATTEVNHAPGTVGGAGTHPPHRSMLRLCRLRATWHPPSLPSALGMGRS

SEQ ID NO: 8670 - protein, 708 aa, Homo sapiens
MARAWQHPFLNVFRHFRVDEWKRSAKQGDVAVVTDKTLKGAVYRIRGSVSAANYIQLPKSSTQSLGLTGRYLYVLFRPLPSKHFVIHLDVSSKDNQVIRVSFSNLFKEFKSTATWLQFPLVLEARTPQRDLVGLAPSGARWTCLQLDLQDVLLVYLNRCYGHLKSIRLCASLLVRNLYTSDLCFEPAISGAQWAKLPVTPMPREMAFPVPKGESWHDRYIHVRFPSESLKVPSKPIEKSCSPPEAVLLGPGPQPLPCPVASSKPVRFSVSPVVQTPSPTASGRAALAPRPFPEVSLSQERSDASNADGPGFHSLEPWAQLEASDIHTAAAGTHVLTHESAEVPVARTGSCEGFLPDPVLRLKGVIGFGGHGTRQALWTPDGAAVVYPCHAVIVVLLVDTGEQRFFLGHTDKVSALALDGSSSLLASAQARAPSVMRLWDFQTGRCLCLFRSPMHVVCSLSFSDSGALLCGVGKDHHGRTMVVAWGTGQVGLGGEVVVLAKAHTDFDVQAFRVTFFDETRMASCGQGSVRLWRLRGGVLRSCPVDLGEHHALQFTDLAFKQARDGCPEPSAAMLFVCSRSGHILEIDCQRMVVRHARRLLPTRTPGGPHPQKQTFSSGPGIAISSLSVSPAMCAVGSEDGFLRLWPLDFSSVLLEAGDAVGTLSQLPESLAWMLGRGRPSPRGSAVSRPGSWLHRVPRGQVAYPEPWGG

SEQ ID NO: 8671 - protein, 299 aa, Homo sapiens
MLWFGQPGPGGWNRKCLRPFTLPRGQHPQPSYGFPQVNEVVFSPGESHCATCSEDGSVRVWALASMELVIQFQVLNQSCLCLAWSPPCCGRPEQQRLAAGYGDGSLRIFSVSRTAMELKMHPHPVALTTVAFSTDGQTVLSGDKDGLVAVSHPCTGTTFRVLSDHQGAPISTICVTCKETQGHLPPSLAAFCPWDGALLMYVGPGVYKEVIIYNLCQKQVVEKIPLPFFAMSLSLSPGTHLLAVGFAECMLRLVDCAMGTAQDFAGHDNAVHLCRFTPSARLLFTAARNEILVWEVPGL

SEQ ID NO: 8672 - protein, 709 aa, Homo sapiens
MARAWQHPFLNVFRHFRVDEWKRSAKQGDVAVVTDKTLKGAVYRIRGSVSAANYIQLPKSSTQSLGLTGRYLYVLFRPLPSKHFVIHLDVSSKDNQVIRVSFSNLFKEFKSTATWLQFPLVLEARTPQRDLVGLAPSGARWTCLQLDLQDVLLVYLNRCYGHLKSIRLCASLLVRNLYTSDLCFEPAISGAQWAKLPVTPMPREMAFPVPKGESWHDRYIHVRFPSESLKVPSKPIEKSCSPPEAVLLGPGPQPLPCPVASSKPVRFSVSPVVQTPSPTAQSGRAALAPRPFPEVSLSQERSDASNADGPGFHSLEPWAQLEASDIHTAAAGTHVLTHESAEVPVARTGSCEGFLPDPVLRLKGVIGFGGHGTRQALWTPDGAAVVYPCHAVIVVLLVDTGEQRFFLGHTDKVSALALDGSSSLLASAQARAPSVMRLWDFQTGRCLCLFRSPMHVVCSLSFSDSGALLCGVGKDHHGRTMVVAWGTGQVGLGGEVVVLAKAHTDFDVQAFRVTFFDETRMASCGQGSVRLWRLRGGVLRSCPVDLGEHHALQFTDLAFKQARDGCPEPSAAMLFVCSRSGHILEIDCQRMVVRHARRLLPTRTPGGPHPQKQTFSSGPGIAISSLSVSPAMCAVGSEDGFLRLWPLDFSSVLLEAGDAVGTLSQLPESLAWMLGRGRPSPRGSAVSRPGSWLHRVPRGQVAYPEPWGG

SEQ ID NO: 8673 - protein, 94 aa, Homo sapiens
MVLLAGTRPQGGEARCMIPPPPSPLLGAQVEEDRTEFKEFQDFSSLPDTRSVASDDSLYPFQDEEEHGVEGVESVPEEGILEAWGSCGRWCGVG

SEQ ID NO: 8674 - protein, 590 aa, Homo sapiens
MSDSPAGSNPRTPESSGSGSGGGGKRPAVPAAVSLLPPADPLRQANRLPIRVLKMLSAHTGHLLHPEYLQPLSSTPVSPIELDAKKSPLALLAQTCSQIGKPDPPPSSKLNSVAAAANGLGAEKDPGRSAPGAASAAAALKQLGDSPAEDKSSFKPYSKGSGGGDSRKDSGSSSVSSTSSSSSSSPGDKAGFRVPSAACPPFPPHGAPVSASSSSSSPGGSRGGSPHHSDCKNGGGVGGGELDKKDQEPKPSPEPAAVSRGGGGEPGAHGGAESGASGRKSEPPSALVGAGHVAPVSPYKPGHSVFPLPPSSIGYHGSIVGAYAGYPSQFVPGLDPSKSGLVGGQLSGGLGLPPGKPPSSSPLTGASPPSFLQGLCRDPYCLGGYHGASHLGGSSCSTCSAHDPAGPSLKAGGYPLVYPGHPLQPAALSSSAAQAALPGHPLYTYGFMLQNEPLPHSCNWVAASGPCDKRFATSEELLSHLRTHTALPGAEKLLAAYPGASGLGSAAAAAAAAASCHLHLPPPAAPGSPGSLSLRNPHTLGLSRYHPYGKSHLSTAGGLAVPSLPTAGPYYSPYALYGQRLASASALGYQ

SEQ ID NO: 8675 - protein, 407 aa, Homo sapiens
MQQKAFEESRYPWQESFENVAVCLPLRCPRCGDHTRFRSLSSLRAHLEFSHSYEERTLLTKCSLFPSLKDTDLVTSSELLKPGKLQSSGNVVKQKPSYVNLYSISHEHSKDRKPFEVVAERPVSYVQTYTAMDLHADSLDGTRSGPGLPTSDTKASFEAHVREKFNRMVEAVDRTIEKRIDKLTKELAQKTAELLEVRAAFVQLTQKKQEVQRRERALNRQVDVAVEMIAVLRQRLTESEEELLRKEEEVVTFNHFLEAAAEKEVQGKARLQDFIENLLQRVELAEKQLEYYQSQQASGFVRDLSGHVLTDISSNRKPKCLSRGHPHSVCNHPDLKAHFHPKGRNHLKKAKDDRASMQPAKAIHEQAESSRDLCRPPKKGELLGFGRKGNIRPKMAKKKPTAIVNII

SEQ ID NO: 8676 - protein, 333 aa, Homo sapiens
MQQKAFEESRYPWQESFENVAVCLPLRCPRCGDHTRFRSLSSLRAHLEFSHSYEERTLLTKCSLFPSLKDTDLVTSSELLKPGKLQSSGNVVKQKPSYVNLYSISHEHSKDRKPFEVVAERPVSYVQTYTAMDLHADSLDGTRSGPGLPTSDTKASFEAHVREKFNRMVEAVDRTIEKRIDKLTKELAQKTAELLEVRAAFVQLTQKKQEVQRRERALNRQVDVAVEMIAVLRQRLTESEEELLRKEEEVVTFNHFLEAAAEKEVQGKARLQDFIENLLQRVELAEKQLEYYQSQQASGFVRDLSGHVSWKGAGEARLVCQNDLELEESAIVE

SEQ ID NO: 8677 - protein, 462 aa, Homo sapiens
MQQKAFEESRYPWQESFENVAVCLPLRCPRCGDHTRFRSLSSLRAHLEFSHSYEERTLLTKCSLFPSLKDTDLVTSSELLKPGKLQSSGNVVKQKPSYVNLYSISHEHSKDRKPFEVVAERPVSYVQTYTAMDLHADSLDGTRSGPGLPTSDTKASFEAHVREKFNRMVEAVDRTIEKRIDKLTKELAQKTAELLEVRAAFVQLTQKKQEVQRRERALNRQVDVAVEMIAVLRQRLTESEEELLRKEEEVVTFNHFLEAAAEKEVQGKARLQDFIENLLQRVELAEKQLEYYQSQQASGFVRDLSGHVSWKGAGEARLVCQNDLELEIFGHINHHLSGLKDSHCLVFLQAPPVPWIILASFLWILGNPWTSSTATAGFSQIWVLFPFCGGTFHHNEKDVLGLQDFERESVSTSQSRNISLLTLGQLQNCVIGKLTIIDLLTEHLLGVRHGVICFPWGLPSSS

SEQ ID NO: 8678 - protein, 422 aa, Homo sapiens
MTMRPPQSCEPTFRVMQQKAFEESRYPWQESFENVAVCLPLRCPRCGDHTRFRSLSSLRAHLEFSHSYEERTLLTKCSLFPSLKDTDLVTSSELLKPGKLQSSGNVVKQKPSYVNLYSISHEHSKDRKPFEVVAERPVSYVQTYTAMDLHADSLDGTRSGPGLPTSDTKASFEAHVREKFNRMVEAVDRTIEKRIDKLTKELAQKTAELLEVRAAFVQLTQKKQEVQRRERALNRQVDVAVEMIAVLRQRLTESEEELLRKEEEVVTFNHFLEAAAEKEVQGKARLQDFIENLLQRVELAEKQLEYYQSQQASGFVRDLSGHVLTDISSNRKPKCLSRGHPHSVCNHPDLKAHFHPKGRNHLKKAKDDRASMQPAKAIHEQAESSRDLCRPPKKGELLGFGRKGNIRPKMAKKKPTAIVNII

SEQ ID NO: 8679 - protein, 51 aa, Homo sapiens
MQPAKAIHEQAESSRDLCRPPKKGELLGFGRKGNIRPKMAKKKPTAIVNII

SEQ ID NO: 8680 - protein, 576 aa, Homo sapiens
MDSVAFEDVSVSFSQEEWALLAPSQKKLYRDVMQETFKNLASIGEKWEDPNVEDQHKNQGRNLRSHTGERLCEGKEGSQCAENFSPNLSVTKKTAGVKPYECTICGKAFMRLSSLTRHMRSHTGYELFEKPYKCKECEKAFSYLKSFQRHERSHTGEKPYKCKQCGKTFIYHQPFQRHERTHIGEKPYECKQCGKALSCSSSLRVHERIHTGEKPYECKQCGKAFSCSSSIRVHERTHTGEKPYACKECGKAFISHTSVLTHMITHNGDRPYKCKECGKAFIFPSFLRVHERIHTGEKPYKCKQCGKAFRCSTSIQIHERIHTGEKPYKCKECGKSFSARPAFRVHVRVHTGEKPYKCKECGKAFSRISYFRIHERTHTGEKPYECKKCGKTFNYPLDLKIHKRNHTGEKPYECKECAKTFISLENFRRHMITHTGDGPYKCRDCGKVFIFPSALRTHERTHTGEKPYECKQCGKAFSCSSYIRIHKRTHTGEKPYECKECGKAFIYPTSFQGHMRMHTGEKPYKCKECGKAFSLHSSFQRHTRIHNYEKPLECKQCGKAFSVSTSLKKHMRMHNR

SEQ ID NO: 8681 - protein, 544 aa, Homo sapiens
MQETFKNLASIGEKWEDPNVEDQHKNQGRNLRSHTGERLCEGKEGSQCAENFSPNLSVTKKTAGVKPYECTICGKAFMRLSSLTRHMRSHTGYELFEKPYKCKECEKAFSYLKSFQRHERSHTGEKPYKCKQCGKTFIYHQPFQRHERTHIGEKPYECKQCGKALSCSSSLRVHERIHTGEKPYECKQCGKAFSCSSSIRVHERTHTGEKPYACKECGKAFISHTSVLTHMITHNGDRPYKCKECGKAFIFPSFLRVHERIHTGEKPYKCKQCGKAFRCSTSIQIHERIHTGEKPYKCKECGKSFSARPAFRVHVRVHTGEKPYKCKECGKAFSRISYFRIHERTHTGEKPYECKKCGKTFNYPLDLKIHKRNHTGEKPYECKECAKTFISLENFRRHMITHTGDGPYKCRDCGKVFIFPSALRTHERTHTGEKPYECKQCGKAFSCSSYIRIHKRTHTGEKPYECKECGKAFIYPTSFQGHMRMHTGEKPYKCKECGKAFSLHSSFQRHTRIHNYEKPLECKQCGKAFSVSTSLKKHMRMHNR

SEQ ID NO: 8682 - protein, 602 aa, Homo sapiens
MARLTKRRQADTKAIQHLWAAIEIIRNQKQIANIDRITKYMSRVHGMHPKETTRQLSLAVKDGLIVETLTVGCKGSKAGIEQEGYWLPGDEIDWETENHDWYCFECHLPGEVLICDLCFRVYHSKCLSDEFRLRDSSSPWQCPVCRSIKKKNTNKQEMGTYLRFIVSRMKERAIDLNKKGKDNKHPMYRRLVHSAVDVPTIQEKVNEGKYRSYEEFKADAQLLLHNTVIFYGADSEQADIARMLYKDTCHELDELQLCKNCFYLSNARPDNWFCYPCIPNHELVWAKMKGFGFWPAKVMQKEDNQVDVRFFGHHHQRAWIPSENIQDITVNIHRLHVKRSMGWKKACDELELHQRFLREGRFWKSKNEDRGEEEAESSISSTSNEQLKVTQEPRAKKGRRNQSVEPKKEEPEPETEAVSSSQEIPTMPQPIEKVSVSTQTKKLSASSPRMLHRSTQTTNDGVCQSMCHDKYTKIFNDFKDRMKSDHKRETERVVREALEKLRSEMEEEKRQAVNKAVANMQGEMDRKCKQVKEKCKEEFVEEIKKLATQHKQLISQTKKKQWCYNCEEEAMYHCCWNTSYCSIKCQQEHWHAEHKRTCRRKR

SEQ ID NO: 8683 - protein, 548 aa, Homo sapiens
MARLTKRRQADTKAIQHLWAAIEIIRNQKQIANIDRITKYMSRVHGMHPKETTRQLSLAVKDGLIVETLTVGCKGSKAGIEQEGYWLPGDEISIKKKNTNKQEMGTYLRFIVSRMKERAIDLNKKGKDNKHPMYRRLVHSAVDVPTIQEKVNEGKYRSYEEFKADAQLLLHNTVIFYGADSEQADIARMLYKDTCHELDELQLCKNCFYLSNARPDNWFCYPCIPNHELVWAKMKGFGFWPAKVMQKEDNQVDVRFFGHHHQRAWIPSENIQDITVNIHRLHVKRSMGWKKACDELELHQRFLREGRFWKSKNEDRGEEEAESSISSTSNEQLKVTQEPRAKKGRRNQSVEPKKEEPEPETEAVSSSQEIPTMPQPIEKVSVSTQTKKLSASSPRMLHRSTQTTNDGVCQSMCHDKYTKIFNDFKDRMKSDHKRETERVVREALEKLRSEMEEEKRQAVNKAVANMQGEMDRKCKQVKEKCKEEFVEEIKKLATQHKQLISQTKKKQWCYNCEEEAMYHCCWNTSYCSIKCQQEHWHAEHKRTCRRKR

SEQ ID NO: 8684 - protein, 568 aa, Homo sapiens
MARLTKRRQADTKAIQHLWAAIEIIRNQKQIANIDRITKYMSRVHGMHPKETTRQLSLAVKDGLIVETLTVGCKGSKAGIEQEGYWLPGDEIDWETENHDWYCFECHLPGEVLICDLCFRVYHSKCLSDEFRLRDSSSPWQCPVCRSIKKKNTNKQEMGTYLRFIVSRMKERAIDLNKKGKDNKHPMYRRLVHSAVDVPTIQEKVNEGKYRSYEEFKADAQLLLHNTVIFYGADSEQADIARMLYKDTCHELDELQLCKNCFYLSNARPDNWFCYPCIPNHELVWAKMKGFGFWPAKVMQKEDNQVDVRFFGHHHQRAWIPSENIQDITVNIHRLHVKRSMGWKKACDELELHQRFLREGRFWKSKNEDRGEEEAESSISSTSNEQLKVTQEPRAKKGRRNQSVEPKKEEPEPETEAVSSSQEIPTMPQPIEKVSVSTQTKKLSASSPRMLHRSTQTTNDGVCQSMCHDKYTKIFNDFKDRMKSDHKRETERVVREALEKLRSEMEEEKRQAVNKAVANMQGEMDRKCKQVKEKCKEEFVEEIKKLATQHKQLISQTKKKQWVNTSLF

SEQ ID NO: 8685 - protein, 514 aa, Homo sapiens
MARLTKRRQADTKAIQHLWAAIEIIRNQKQIANIDRITKYMSRVHGMHPKETTRQLSLAVKDGLIVETLTVGCKGSKAGIEQEGYWLPGDEISIKKKNTNKQEMGTYLRFIVSRMKERAIDLNKKGKDNKHPMYRRLVHSAVDVPTIQEKVNEGKYRSYEEFKADAQLLLHNTVIFYGADSEQADIARMLYKDTCHELDELQLCKNCFYLSNARPDNWFCYPCIPNHELVWAKMKGFGFWPAKVMQKEDNQVDVRFFGHHHQRAWIPSENIQDITVNIHRLHVKRSMGWKKACDELELHQRFLREGRFWKSKNEDRGEEEAESSISSTSNEQLKVTQEPRAKKGRRNQSVEPKKEEPEPETEAVSSSQEIPTMPQPIEKVSVSTQTKKLSASSPRMLHRSTQTTNDGVCQSMCHDKYTKIFNDFKDRMKSDHKRETERVVREALEKLRSEMEEEKRQAVNKAVANMQGEMDRKCKQVKEKCKEEFVEEIKKLATQHKQLISQTKKKQWVNTSLF

SEQ ID NO: 8686 - protein, 517 aa, Homo sapiens
MARLTKRRQADTKAIQHLWAAIEIIRNQKQIANIDRITKYMSRVHGMHPKETTRQLSLAVKDGLIVETLTVGCKGSKAGIEQEGYWLPGDEISIKKKNTNKQEMGTYLRFIVSRMKERKVNEGKYRSYEEFKADAQLLLHNTVIFYGADSEQADIARMLYKDTCHELDELQLCKNCFYLSNARPDNWFCYPCIPNHELVWAKMKGFGFWPAKVMQKEDNQVDVRFFGHHHQRAWIPSENIQDITVNIHRLHVKRSMGWKKACDELELHQRFLREGRFWKSKNEDRGEEEAESSISSTSNEQLKVTQEPRAKKGRRNQSVEPKKEEPEPETEAVSSSQEIPTMPQPIEKVSVSTQTKKLSASSPRMLHRSTQTTNDGVCQSMCHDKYTKIFNDFKDRMKSDHKRETERVVREALEKLRSEMEEEKRQAVNKAVANMQGEMDRKCKQVKEKCKEEFVEEIKKLATQHKQLISQTKKKQWCYNCEEEAMYHCCWNTSYCSIKCQQEHWHAEHKRTCRRKR

SEQ ID NO: 8687 - protein, 567 aa, Homo sapiens
MARLTKRRQADTKAIQHLWAAIEIIRNQKQIANIDRITKYMSRVHGMHPKETTRQLSLAVKDGLIVETLTVGCKGSKAGIEQEGYWLPGDEIDWETENHDWYCFECHLPGEVLICDLCFRVYHSKCLSDEFRLRDSSSPWQCPVCRSIKKKNTNKQEMGTYLRFIVSRMKERAIDLNKKGKDNKHPMYRRLVHSAVDVPTIQEKVNEGKYRSYEEFKADAQLLLHNTVIFYGDSEQADIARMLYKDTCHELDELQLCKNCFYLSNARPDNWFCYPCIPNHELVWAKMKGFGFWPAKVMQKEDNQVDVRFFGHHHQRAWIPSENIQDITVNIHRLHVKRSMGWKKACDELELHQRFLREGRFWKSKNEDRGEEEAESSISSTSNEQLKVTQEPRAKKGRRNQSVEPKKEEPEPETEAVSSSQEIPTMPQPIEKVSVSTQTKKLSASSPRMLHRSTQTTNDGVCQSMCHDKYTKIFNDFKDRMKSDHKRETERVVREALEKLRSEMEEEKRQAVNKAVANMQGEMDRKCKQVKEKCKEEFVEEIKKLATQHKQLISQTKKKQWVNTSLF

SEQ ID NO: 8688 - protein, 320 aa, Homo sapiens
MPKKKTGARKKAENRREREKQLRASRSTIDLAKHPCNASMECDKCQRRQKNRAFCYFCNSVQKLPICAQCGKTKCMMKSSDCVIKHAGVYSTGLAMVGAICDFCEAWVCHGRKCLSTHACACPLTDAECVECERGVWDHGGRIFSCSFCHNFLCEDDQFEHQASCQVLEAETFKCVSCNRLGQHSCLRCKACFCDDHTRSKVFKQEKGKQPPCPKCGHETQETKDLSMSTRSLKFGRQTGGEEGDGASGYDAYWKNLSSDKYGDTSYHDEEEDEYEAEDDEEEEDEGRKDSDTESSDLFTNLNLGRTYASGYAHYEEQEN

SEQ ID NO: 8689 - protein, 587 aa, Homo sapiens
MPTALCPRVLAPKESEEPRKMRSPPGENPSPQGELPSPESSRRLFRRFRYQEAAGPREALQRLWDLCGGWLRPERHTKEQILELLVLEQFLAILPREIQSWVRAQEPESGEQAVAAVEALEREPGRPWQWLKHCEDPVVIDDGDSPLDQEQEQLPVEPHSDLAKNQDAQPITLAQCLGLPSRPPSQLSGDPVLQDAFLLQEENVRDTQQVTTLQLPPSRVSPFKDMILCFSEEDWSLLDPAQTGFYGEFIIGEDYGVSMPPNDLAAQPDLSQGEENEPRVPELQDLQGKEVPQVSYLDSPSLQPFQVEERRKREELQVPEFQACPQTVVPQNTYPAGGNPRSLENSLDEEVTIEIVLSSSGDEDSQHGPYCTEELGSPTEKQRSLPASHRSSTEAGGEVQTSKKSYVCPNCGKIFRWRVNFIRHLRSRREQEKPHECSVCGELFSDSEDLDGHLESHEAQKPYRCGACGKSFRLNSHLLSHRRIHLQPDRLQPVEKREQAASEDADKGPKEPLENGKAKLSFQCCECGKAFQRHDHLARHRSHFHLKDKARPFQCRYCVKSFTQNYDLLRHERLHMKRRSKQALNSY

SEQ ID NO: 8690 - protein, 623 aa, Homo sapiens
MPTALCPRVLAPKESEEPRKMRSPPGENPSPQGELPSPESSRRLFRRFRYQEAAGPREALQRLWDLCGGWLRPERHTKEQILELLVLEQFLAILPREIQSWVRAQEPESGEQAVAAVEALEREPGRPWQWLKHCEDPVVIDDGDSPLDQEQEQLPVEPHSDLAKNQDAQPITLAQCLGLPSRPPSQLSGDPVLQDAFLLQEENVRDTQQVTTLQLPPRIFQFNNHRSNGYILEMLGSGGKKAQIISVLSQIYVSRVSPFKDMILCFSEEDWSLLDPAQTGFYGEFIIGEDYGVSMPPNDLAAQPDLSQGEENEPRVPELQDLQGKEVPQVSYLDSPSLQPFQVEERRKREELQVPEFQACPQTVVPQNTYPAGGNPRSLENSLDEEVTIEIVLSSSGDEDSQHGPYCTEELGSPTEKQRSLPASHRSSTEAGGEVQTSKKSYVCPNCGKIFRWRVNFIRHLRSRREQEKPHECSVCGELFSDSEDLDGHLESHEAQKPYRCGACGKSFRLNSHLLSHRRIHLQPDRLQPVEKREQAASEDADKGPKEPLENGKAKLSFQCCECGKAFQRHDHLARHRSHFHLKDKARPFQCRYCVKSFTQNYDLLRHERLHMKRRSKQALNSY

SEQ ID NO: 8691 - protein, 459 aa, Homo sapiens
MASGVEVLRFQLPGHEAATLRNMNQLRAEERFCDVTIVADSLKFRGHKVILAACSPFLRDQFLLNPSSELQVSLMHSARIVADLLLSCYTGALEFAVRDIVNYLTAASYLQMEHVVEKCRNALSQFIEPKIGLKEDGVSEASLVSSISATKSLLPPARTPKPAPKPPPPPPLPPPLLRPVKLEFPLDEDLELKAEEEDEDEDEDVSDICIVKVESALEVAHRLKPPGGLGGGLGIGGSVGGHLGELAQSSVPPSTVAPPQGVVKACYSLSEDAEGEGLLLIPGGRASVGATSGLVEAAAVAMAARGAGGSLGAGGSRGPLPGGFSGGNPLKNIKCTKCPEVFQGVEKLVFHMRAQHFIFMCPRCGKQFNHSSNLNRHMNVHRGVKSHSCGICGKCFTQKSTLHDHLNLHSGARPYRCSYCDVRFAHKPAIRRHLKEQHGKTTAENVLEASVAEINVLIR

SEQ ID NO: 8692 - protein, 389 aa, Homo sapiens
MDSVSFEDVAVAFTQEEWALLDPSQKNLYRDVMQEIFRNLASVGNKSEDQNIQDDFKNPGRNLSSHVVERLFEIKEGSQYGETFSQDSNLNLNKKVSTGVKPCECSVCGKVFICHSALHRHILSHIGNKLFECEECPEKLYHCKQCGKAFISLTSVDRHMVTHTSNGPYKGPVYEKPFDFPSVFQMPQSTYTGEKTYKCKHCDKAFNYSSYLREHERTHTGEKPYACKKCGKSFTFSSSLRQHERSHTGEKPYECKECGKAFSRSTYLGIHERTHTGEKPYECIKCGKAFRCSRVLRVHERTHSGEKPYECKQCGKAFKYSSNLCEHERTHTGVKPYGCKECGKSFTSSSALRSHERTHTGEKPYECKKCGKAFSCSSSLRKHERAYMW

SEQ ID NO: 8693 - protein, 331 aa, Homo sapiens
MRRKTRNFKHKTVKDNKVLTEGSDQESEKDNSQCCDPATNERVQAEKRQYVCTECGKAFSQSANLTVHERIHTGEKPYKCKECGKAFSHSSNLVVHRRIHTGLKPYTCSECGKSFSGKSHLIRHQGIHSGEKTYECKECGKAFSRSSGLISHHRVHTGEKPYSCIECGKAFSRSSNLTQHQRMHRGKKVYKCKECGKTCGSNTKIMDHQRIHTGEKPYECDECGKTFILRKTLNEHQRLHRREKPYKCNECGKAFTSNRNLVDHQRVHTGEKPYKCNECGKTFRQTSQVILHLRTHTKEKPYKCSECGKAYRYSSQLIQHQRKHNEEKETS

SEQ ID NO: 8694 - protein, 412 aa, Homo sapiens
MDTRSGSQCSVTPEAILNNEKLVLPPRISRVNGWSLPLHYFQVVTWAVFVGLSSATFGIFIPFLPHAWKYIAYVVTGGIFSFHLVVHLIASCIDPADSNVRLMKNYSQPMPLFDRSKHAHVIQNQFCHLCKVTVNKKTKHCISCNKCVSGFDHHCKWINNCVGSRNYWFFFSTVASATAGMLCLIAILLYVLVQYLVNPGVLRTDPRYEDVKNMNTWLLFLPLFPVQVQTLIVVIIGMLVLLLDFLGLVHLGQLLIFHIYLKAKKMTTFEYLINNRKEESSKHQAVRKDPYVQMDKGVLQQGAGALGSSAQGVKAKSSLLIHKHLCHFCTSVNQDGDSTAREGDEDPCPSALGAKARNSRLICRRLCQFSTRVHPDGGSMAQEADDAPSISTLGLQQETTEPMKTDSAESED

SEQ ID NO: 8695 - protein, 142 aa, Homo sapiens
MNTWLLFLPLFPVQVQTLIVVIIGMLVLLLDFLGLVHLGQLLIFHIYLSMSPTLSPRSPQGWVVRAAHLTPLLEYVPNPEPPTPGARVFVPRVRMCSGSASPRSEIMDKKGKSQEEIKSMRTQQAQQEAELTPRPAGVVPGA

SEQ ID NO: 8696 - protein, 243 aa, Homo sapiens
MAVQISKKRKFVADGIFKAELNEFLTRELAEDGYSGVEVRVTPTRTEIIILATRTQNVLGEKGRRIRELTAVVQKRFGFPEGSVELYAEKVATRGLCAIAQAESLRYKLLGGLAVRRACYGVLRFIMESGAKGCEVVVSGKLRGQRAKSMKFVDGLMIHSGDPVNYYVDTAVRHVLLRQGVLGIKVKIMLPWDPTGKIGPKKPLPDHVSIVEPKDEILPTTPISEQKGGKPEPPAMPQPVPTA

SEQ ID NO: 8697 - protein, 259 aa, Homo sapiens
MAVQISKKRKFVADGIFKAELNEFLTRELAEDGYSGVEVRVTPTRTEIIILATRTQNVLGEKGRRIRELTAVVQKRFGFPEGSVELKIMVMVTGYPLLPLKLYAEKVATRGLCAIAQAESLRYKLLGGLAVRRACYGVLRFIMESGAKGCEVVVSGKLRGQRAKSMKFVDGLMIHSGDPVNYYVDTAVRHVLLRQGVLGIKVKIMLPWDPTGKIGPKKPLPDHVSIVEPKDEILPTTPISEQKGGKPEPPAMPQPVPTA

SEQ ID NO: 8698 - protein, 171 aa, Homo sapiens
MEERGDSEPTPGCSGLGPGGVRGFGDGGGAPSWAPEDAWMGTHPKYLEMMELDIGDATQVYVAFLVYLDLMESKSWHEVNCVGLPELQLICLVGTEIEGEGLQTVVPTPITASLSHNRIREILKASRKLQGDPDLPMSFTLAIVESDSTIVYYKLTDGFMLPDPQNISLRR

SEQ ID NO: 8699 - protein, 129 aa, Homo sapiens
MEERGDSEPTPGCSGLGPGGVRGFGDGGGAPSWAPEDAWMGTHPKYLEMMELDIGDATQVYVAFLVYLDLMESKSWHEVNCVGLPELQLICLVGTEIEGEGLQTVVPTPITASLSHNRIFLLEDDIHVS

SEQ ID NO: 8700 - protein, 122 aa, Homo sapiens
  MOD_RES (44)..(44): Selenocysteine
MAPRGRKRKAEAAVVAVAEKREKLANGGEGMEEATVVIEHCTSXRVYGRNAAALSQALRLEAPELPVKVNPTKPRRGSFEVTLLRPDGSSAELWTGIKKGPPRKLKFPEPQEVVEELKKYLS

SEQ ID NO: 8701 - protein, 322 aa, Homo sapiens
MVSVINTVDTSHEDMIHDAQMDYYGTRLATCSSDRSVKIFDVRNGGQILIADLRGHEGPVWQVAWAHPMYGNILASCSYDRKVIIWREENGTWEKSHEHAGHDSSVNSVCWAPHDYGLILACGSSDGAISLLTYTGEGQWEVKKINNAHTIGCNAVSWAPAVVPGSLIDHPSGQKPNYIKRFASGGCDNLIKLWKEEEDGQWKEEQKLEAHSDWVRDVAWAPSIGLPTSTIASCSQDGRVFIWTCDDASSNTWSPKLLHKFNDVVWHVSWSITANILAVSGGDNKVTLWKESVDGQWVCISDVNKGQGSVSASVTEGQQNEQ

SEQ ID NO: 8702 - protein, 308 aa, Homo sapiens
MIHDAQMDYYGTRLATCSSDRSVKIFDVRNGGQILIADLRGHEGPVWQVAWAHPMYGNILASCSYDRKVIIWREENGTWEKSHEHAGHDSSVNSVCWAPHDYGLILACGSSDGAISLLTYTGEGQWEVKKINNAHTIGCNAVSWAPAVVPGSLIDHPSGQKPNYIKRFASGGCDNLIKLWKEEEDGQWKEEQKLEAHSDWVRDVAWAPSIGLPTSTIASCSQDGRVFIWTCDDASSNTWSPKLLHKFNDVVWHVSWSITANILAVSGGDNKVTLWKESVDGQWVCISDVNKGQGSVSASVTEGQQNEQ

SEQ ID NO: 8703 - protein, 368 aa, Homo sapiens
MREPVLTWCVPLELLCSHPLPLSAFLKSQVKLYTYRACAGKDEMGKMVSVINTVDTSHEDMIHDAQMDYYGTRLATCSSDRSVKIFDVRNGGQILIADLRGHEGPVWQVAWAHPMYGNILASCSYDRKVIIWREENGTWEKSHEHAGHDSSVNSVCWAPHDYGLILACGSSDGAISLLTYTGEGQWEVKKINNAHTIGCNAVSWAPAVVPGSLIDHPSGQKPNYIKRFASGGCDNLIKLWKEEEDGQWKEEQKLEAHSDWVRDVAWAPSIGLPTSTIASCSQDGRVFIWTCDDASSNTWSPKLLHKFNDVVWHVSWSITANILAVSGGDNKVTLWKESVDGQWVCISDVNKGQGSVSASVTEGQQNEQ

SEQ ID NO: 8704 - protein, 325 aa, Homo sapiens
MGKMVSVINTVDTSHEDMIHDAQMDYYGTRLATCSSDRSVKIFDVRNGGQILIADLRGHEGPVWQVAWAHPMYGNILASCSYDRKVIIWREENGTWEKSHEHAGHDSSVNSVCWAPHDYGLILACGSSDGAISLLTYTGEGQWEVKKINNAHTIGCNAVSWAPAVVPGSLIDHPSGQKPNYIKRFASGGCDNLIKLWKEEEDGQWKEEQKLEAHSDWVRDVAWAPSIGLPTSTIASCSQDGRVFIWTCDDASSNTWSPKLLHKFNDVVWHVSWSITANILAVSGGDNKVTLWKESVDGQWVCISDVNKGQGSVSASVTEGQQNEQ

SEQ ID NO: 8705 - protein, 156 aa, Homo sapiens
MWKRSDHQPKIKAEDGPLVGQFEVLGSVPEPAMPHPLELSEFESFPVFQDIRLHIREVGAQLVKKVNAVFQLDITKNGKTILRWTIDLKNGSGDMYPGPARLPADTVFTIPESVFMELVLGKMNPQKAFLAGKFKVSGKVLLSWKLERVFKDWAKF

SEQ ID NO: 8706 - protein, 1119 aa, Homo sapiens
MTAAAASNWGLITNIVNSIVGVSVLTMPFCFKQCGIVLGALLLVFCSWMTHQSCMFLVKSASLSKRRTYAGLAFHAYGKAGKMLVETSMIGLMLGTCIAFYVVIGDLGSNFFARLFGFQVGGTFRMFLLFAVSLCIVLPLSLQRNMMASIQSFSAMALLFYTVFMFVIVLSSLKHGLFSGQWLRRVSYVRWEGVFRCIPIFGMSFACQSQVLPTYDSLDEPSVKTMSSIFASSLNVVTTFYVMVGFFGYVSFTEATAGNVLMHFPSNLVTEMLRVGFMMSVAVGFPMMILPCRQALSTLLCEQQQKDGTFAAGGYMPPLRFKALTLSVVFGTMVGGILIPNVETILGLTGATMGSLICFICPALIYKKIHKNALSSQVVLWVGLGVLVVSTVTTLSVSEEVPEDLAEEAPGGRLGEAEGLMKVEAARLSAQDPVVAVAEDGREKPKLPKEREELEQAQIKGPVDVPGREDGKEAPEEAQLDRPGQGIAVPVGEAHRHEPPVPHDKVVVDEGQDREVPEENKPPSRHAGGKAPGVQGQMAPPLPDSEREKQEPEQGEVGKRPGQAQALEEAGDLPEDPQKVPEADGQPAVQPAKEDLGPGDRGLHPRPQAVLSEQQNGLAVGGGEKAKGGPPPGNAAGDTGQPAEDSDHGGKPPLPAEKPAPGPGLPPEPREQRDVERAGGNQAASQLEEAGRAEMLDHAVLLQVIKEQQVQQKRLLDQQEKLLAVIEEQHKEIHQQRQEDEEDKPRQVEVHQEPGAAVPRGQEAPEGKARETVENLPPLPLDPVLRAPGGRPAPSQDLNQRSLEHSEGPVGRDPAGPPDGGPDTEPRAAQAKLRDGQKDAAPRAAGTVKELPKGPEQVPVPDPAREAGGPEERLAEEFPGQSQDVTGGSQDRKKPGKEVAATGTSILKEANWLVAGPGAETGDPRMKPKQVSRDLGLAADLPGGAEGAAAQPQAVLRQPELRVISDGEQGGQQGHRLDHGGHLEMRKARGGDHVPVSHEQPRGGEDAAVQEPRQRPEPELGLKRAVPGGQRPDNAKPNRDLKLQAGSDLRRRRRDLGPHAEGQLAPRDGVIIGLNPLPDVQVNDLRGALDAQLRQAAGGALQVVHSRQLRQAPGPPEES

SEQ ID NO: 8707 - protein, 780 aa, Homo sapiens
MTAAAASNWGLITNIVNSIVGVSVLTMPFCFKQCGIVLGALLLVFCSWMTHQSCMFLVKSASLSKRRTYAGLAFHAYGKAGKMLVETSMIGLMLGTCIAFYVVIGDLGSNFFARLFGFQVGGTFRMFLLFAVSLCIVLPLSLQRNMMASIQSFSAMALLFYTVFMFVIVLSSLKHGLFSGQWLRRVSYVRWEGVFRCIPIFGMSFACQSQVLPTYDSLDEPSVKTMSSIFASSLNVVTTFYVMVGFFGYVSFTEATAGNVLMHFPSNLVTEMLRVGFMMSVAVGFPMMILPCRQALSTLLCEQQQKDGTFAAGGYMPPLRFKALTLSVVFGTMVGGILIPNVETILGLTGATMGSLICFICPALIYKKIHKNALSSQVVLWVGLGVLVVSTVTTLSVSEEVPEDLAEEAPGGRLGEAEGLMKVEAARLSAQDPVVAVAEDGREKPKLPKEREELEQAQIKGPVDVPGREDGKEAPEEAQLDRPGQGIAVPVGEAHRHEPPVPHDKVVVDEGQDREVPEENKPPSRHAGGKAPGVQGQMAPPLPDSEREKQEPEQGEVGKRPGQAQALEEAGDLPEDPQKVPEADGQPAVQPAKEDLGPGDRGLHPRPQAVLSEQQNGLAVGGGEKAKGGPPPGNAAGDTGQPAEDSDHGGKPPLPAEKPAPGPGLPPEPREQRDVERAGGNQAASQLEGKASALQPPASGPGSGSPLPQPWGDAQVILGSPARPPFSFQPPAEQTPRRAFCSLPISSLLSGNLLSALLPFKHLRHRHMACDYRFISLAPL

SEQ ID NO: 8708 - protein, 686 aa, Homo sapiens
MLVETSMIGLMLGTCIAFYVVIGDLGSNFFARLFGFQVGGTFRMFLLFAVSLCIVLPLSLQRNMMASIQSFSAMALLFYTVFMFVIVLSSLKHGLFSGQWLRRVSYVRWEGVFRCIPIFGMSFACQSQVLPTYDSLDEPSVKTMSSIFASSLNVVTTFYVMVGFFGYVSFTEATAGNVLMHFPSNLVTEMLRVGFMMSVAVGFPMMILPCRQALSTLLCEQQQKDGTFAAGGYMPPLRFKALTLSVVFGTMVGGILIPNVETILGLTGATMGSLICFICPALIYKKIHKNALSSQVVLWVGLGVLVVSTVTTLSVSEEVPEDLAEEAPGGRLGEAEGLMKVEAARLSAQDPVVAVAEDGREKPKLPKEREELEQAQIKGPVDVPGREDGKEAPEEAQLDRPGQGIAVPVGEAHRHEPPVPHDKVVVDEGQDREVPEENKPPSRHAGGKAPGVQGQMAPPLPDSEREKQEPEQGEVGKRPGQAQALEEAGDLPEDPQKVPEADGQPAVQPAKEDLGPGDRGLHPRPQAVLSEQQNGLAVGGGEKAKGGPPPGNAAGDTGQPAEDSDHGGKPPLPAEKPAPGPGLPPEPREQRDVERAGGNQAASQLEEAGRAEMLDHAVLLQVIKEQQVQQKRLLDQQEKLLAVIEEQHKEIHQQRQEDEEDKPRQVEVHQEPGAAVPRGQEAPEGS

SEQ ID NO: 8709 - protein, 780 aa, Homo sapiens
MAAPGGRSEPPQLPEYSCSYMVSRPVYSELAFQQQHERRLQERKTLRESLAKCCSCSRKRAFGVLKTLVPILEWLPKYRVKEWLLSDVISGVSTGLVATLQGMAYALLAAVPVGYGLYSAFFPILTYFIFGTSRHISVGPFPVVSLMVGSVVLSMAPDEHFLVSSSNGTVLNTTMIDTAARDTARVLIASALTLLVGIIQLIFGGLQIGFIVRYLADPLVGGFTTAAAFQVLVSQLKIVLNVSTKNYNGVLSIIYTLVEIFQNIGDTNLADFTAGLLTIVVCMAVKELNDRFRHKIPVPIPIEVIVTIIATAISYGANLEKNYNAGIVKSIPRGFLPPELPPVSLFSEMLAASFSIAVVAYAIAVSVGKVYATKYDYTIDGNQEFIAFGISNIFSGFFSCFVATTALSRTAVQESTGGKTQVAGIISAAIVMIAILALGKLLEPLQKSVLAAVVIANLKGMFMQLCDIPRLWRQNKIDAVIWVFTCIVSIILGLDLGLLAGLIFGLLTVVLRVQFPSWNGLGSIPSTDIYKSTKNYKNIEEPQGVKILRFSSPIFYGNVDGFKKCIKSTVGFDAIRVYNKRLKALRKIQKLIKSGQLRATKNGIISDAVSTNNAFEPDEDIEDLEELDIPTKEIEIQVDWNSELPVKVNVPKVPIHSLVLDCGAISFLDVVGVRSLRVIVKEFQRIDVNVYFASLQDYVIEKLEQCGFFDDNIRKDTFFLTVHDAILYLQNQVKSQEGQGSILETITLIQDCKDTLELIETELTEEELDVQDEAMRTLAS

SEQ ID NO: 8710 - protein, 349 aa, Homo sapiens
MIAILALGKLLEPLQKSVLAAVVIANLKGMFMQLCDIPRLWRQNKIDAVIWVFTCIVSIILGLDLGLLAGLIFGLLTVVLRVQFPSWNGLGSIPSTDIYKSTKNYKNIEEPQGVKILRFSSPIFYGNVDGFKKCIKSTVGFDAIRVYNKRLKALRKIQKLIKSGQLRATKNGIISDAVSTNNAFEPDEDIEDLEELDIPTKEIEIQVDWNSELPVKVNVPKVPIHSLVLDCGAISFLDVVGVRSLRVIVKEFQRIDVNVYFASLQDYVIEKLEQCGFFDDNIRKDTFFLTVHDAILYLQNQVKSQEGQGSILETITLIQDCKDTLELIETELTEEELDVQDEAMRTLAS

SEQ ID NO: 8711 - protein, 970 aa, Homo sapiens
MAQLERSAISGFSSKSRRNSFAYDVKREVYNEETFQQEHKRKASSSGNMNINITTFRHHVQCRCSWHRFLRCVLTIFPFLEWMCMYRLKDWLLGDLLAGISVGLVQVPQGLTLSLLARQLIPPLNIAYAAFCSSVIYVIFGSCHQMSIGSFFLVSALLINVLKVSPFNNGQLVMGSFVKNEFSAPSYLMGYNKSLSVVATTTFLTGIIQLIMGVLGLGFIATYLPESAMSAYLAAVALHIMLSQLTFIFGIMISFHAGPISFFYDIINYCVALPKANSTSILVFLTVVVALRINKCIRISFNQYPIEFPMELFLIIGFTVIANKISMATETSQTLIDMIPYSFLLPVTPDFSLLPKIILQAFSLSLVSSFLLIFLGKKIASLHNYSVNSNQDLIAIGLCNVVSSFFRSCVFTGAIARTIIQDKSGGRQQFASLVGAGVMLLLMVKMGHFFYTLPNAVLAGIILSNVIPYLETISNLPSLWRQDQYDCALWMMTFSSSIFLGLDIGLIISVVSAFFITTVRSHRAKILLLGQIPNTNIYRSINDYREIITIPGVKIFQCCSSITFVNVYYLKHKLLKEVDMVKVPLKEEEIFSLFNSSDTNLQGGKICRCFCNCDDLEPLPRILYTERFENKLDPEASSINLIHCSHFESMNTSQTASEDQVPYTVSSVSQKNQGQQYEEVEEVWLPNNSSRNSSPGLPDVAESQGRRSLIPYSDASLLPSVHTIILDFSMVHYVDSRGLVVLRQICNAFQNANILILIAGCHSSIVRAFERNDFFDAGITKTQLFLSVHDAVLFALSRKVIGSSELSIDESETVIRETYSETDKNDNSRYKMSSSFLGSQKNVSPGFIKIQQPVEEESELDLELESEQEAGLGLDLDLDRELEPEMEPKAETETKTQTEMEPQPETEPEMEPNPKSRPRAHTFPQQRYWPMYHPSMASTQSQTQTRTWSVERRRHPMDSYSPEGNSNEDV

SEQ ID NO: 8712 - protein, 865 aa, Homo sapiens
MAQLERSAISGFSSKSRRNSFAYDVKREVYNEETFQQEHKRKASSSGNMNINITTFRHHVQCRCSWHRFLRCVLTIFPFLEWMCMYRLKDWLLGDLLAGISVGLVQVPQGLTLSLLARQLIPPLNIAYAAFCSSVIYVIFGSCHQMSIGSFFLVSALLINVLKVSPFNNGQLVMGSFVKNEFSAPSYLMGYNKSLSVVATTTFLTGIIQIIGFTVIANKISMATETSQTLIDMIPYSFLLPVTPDFSLLPKIILQAFSLSLVSSFLLIFLGKKIASLHNYSVNSNQDLIAIGLCNVVSSFFRSCVFTGAIARTIIQDKSGGRQQFASLVGAGVMLLLMVKMGHFFYTLPNAVLAGIILSNVIPYLETISNLPSLWRQDQYDCALWMMTFSSSIFLGLDIGLIISVVSAFFITTVRSHRAKILLLGQIPNTNIYRSINDYREIITIPGVKIFQCCSSITFVNVYYLKHKLLKEVDMVKVPLKEEEIFSLFNSSDTNLQGGKICRCFCNCDDLEPLPRILYTERFENKLDPEASSINLIHCSHFESMNTSQTASEDQVPYTVSSVSQKNQGQQYEEVEEVWLPNNSSRNSSPGLPDVAESQGRRSLIPYSDASLLPSVHTIILDFSMVHYVDSRGLVVLRQICNAFQNANILILIAGCHSSIVRAFERNDFFDAGITKTQLFLSVHDAVLFALSRKVIGSSELSIDESETVIRETYSETDKNDNSRYKMSSSFLGSQKNVSPGFIKIQQPVEEESELDLELESEQEAGLGLDLDLDRELEPEMEPKAETETKTQTEMEPQPETEPEMEPNPKSRPRAHTFPQQRYWPMYHPSMASTQSQTQTRTWSVERRRHPMDSYSPEGNSNEDV

SEQ ID NO: 8713 - protein, 552 aa, Homo sapiens
MVSLQLALSPQFASLVGAGVMLLLMVKMGHFFYTLPNAVLAGIILSNVIPYLETISNLPSLWRQDQYDCALWMMTFSSSIFLGLDIGLIISVVSAFFITTVRSHRAKILLLGQIPNTNIYRSINDYREIITIPGVKIFQCCSSITFVNVYYLKHKLLKEVDMVKVPLKEEEIFSLFNSSDTNLQGGKICRCFCNCDDLEPLPRILYTERFENKLDPEASSINLIHCSHFESMNTSQTASEDQVPYTVSSVSQKNQGQQYEEVEEVWLPNNSSRNSSPGLPDVAESQGRRSLIPYSDASLLPSVHTIILDFSMVHYVDSRGLVVLRQICNAFQNANILILIAGCHSSIVRAFERNDFFDAGITKTQLFLSVHDAVLFALSRKVIGSSELSIDESETVIRETYSETDKNDNSRYKMSSSFLGSQKNVSPGFIKIQQPVEEESELDLELESEQEAGLGLDLDLDRELEPEMEPKAETETKTQTEMEPQPETEPEMEPNPKSRPRAHTFPQQRYWPMYHPSMASTQSQTQTRTWSVERRRHPMDSYSPEGNSNEDV

SEQ ID NO: 8714 - protein, 768 aa, Homo sapiens
MAQLERSAISGFSSKSRRNSFAYDVKREVYNEETFQQEHKRKASSSGNMNINITTFRHHVQCRCSWHRFLRCVLTIFPFLEWMCMYRLKDWLLGDLLAGISVGLVQVPQGLTLSLLARQLIPPLNIAYAAFCSSVIYVIFGSCHQMSIGSFFLVSALLINVLKVSPFNNGQLVMGSFVKNEFSAPSYLMGYNKSLSVVATTTFLTGIIQLIMGVLGLGFIATYLPESAMSAYLAAVALHIMLSQLTFIFGIMISFHAGPISFFYDIINYCVALPKANSTSILVFLTVVVALRINKCIRISFNQYPIEFPMELFLIIGFTVIANKISMATETSQTLIDMIPYSFLLPVTPDFSLLPKIILQAFSLSLVSSFLLIFLGKKIASLHNYSVNSNQDLIAIGLCNVVSSFFRSCVFTGAIARTIIQDKSGGRQQFASLVGAGVMLLLMVKMGHFFYTLPNAVLAGIILSNVIPYLETISNLPSLWRQDQYDCALWMMTFSSSIFLGLDIGLIISVVSAFFITTVRSHRAKILLLGQIPNTNIYRSINDYREIITIPGVKIFQCCSSITFVNVYYLKHKLLKEVDMVKVPLKEEEIFSLFNSSDTNLQGGKICRCFCNCDDLEPLPRILYTERFENKLDPEASSINLIHCSHFESMNTSQTASEDQVPYTVSSVSQKNQGQQYEEVEEVWLPNNSSRNSSPGLPDVAESQGRRSLIPYSDASLLPSVHTIILDFSMVHYVDSRGLVVLRQVSTEEALAGALIPLLPSQPHPDPD

SEQ ID NO: 8715 - protein, 360 aa, Homo sapiens
MFVARSIAADHKDLIHDVSFDFHGRRMATCSSDQSVKVWDKSESGDWHCTASWKTHSGSVWRVTWAHPEFGQVLASCSFDRTAAVWEEIVGESNDKLRGQSHWVKRTTLVDSRTSVTDVKFAPKHMGLMLATCSADGIVRIYEAPDVMNLSQWSLQHEISCKLSCSCISWNPSSSRAHSPMIAVGSDDSSPNAMAKVQIFEYNENTRKYAKAETLMTVTDPVHDIAFAPNLGRSFHILAIATKDVRIFTLKPVRKELTSSGGPTKFEIHIVAQFDNHNSQVWRVSWNITGTVLASSGDDGCVRLWKANYMDNWKCTGILKGNGSPVNGSSQQGTSNPSLGSTIPSLQNSLNGSSAGRKHS

SEQ ID NO: 8716 - protein, 421 aa, Homo sapiens
MFVARSIAADHKDLIHDVSFDFHGRRMATCSSDQSVKVWDKSESGDWHCTASWKTHSGSVWRVTWAHPEFGQVLASCSFDRTAAVWEEIVGESNDKLRGQSHWVKRTTLVDSRTSVTDVKFAPKHMGLMLATCSADGIVRIYEAPDVMNLSQWSLQHEISCKLSCSCISWNPSSSRAHSPMIAVGSDDSSPNAMAKVQIFEYNENTRKYAKAETLMTVTDPVHDIAFAPNLGRSFHILAIATKDVRIFTLKPVRKELTSSGGPTKFEIHIVAQFDNHNSQVWRVSWNITGTVLASSGDDGCVRLWKANYMDNWKCTGILKGNGSPVNGSSQQGTSNPSLGSTIPSLQNSLNGSSAGRYFFTPLDSPRAGSRWSSYAQLLPPPPPPLVEHSCDADTANLQYPHPRRRYLSRPLNPLPENEGI

SEQ ID NO: 8717 - protein, 254 aa, Homo sapiens
MPIKPVGWICGQVLKNFSGRIEGIQKAIMDLVDEFKDEFPTILRLSQSNQKREPAQKTSKIRMAIALAKINRATLIRGLNSISRSSKSVAKLLHPQLACRLLELRDISGRLLREVNAPRQPLYNIQVRKGSLFEIISFPAKTALTSIIYASYAALIYLAVCVNAVLKKVKNIFQEEESIRQNREESENCRKAFSEPVLSEPMFAEGEIKAKPYRSLPEKPDISDYPKLLANKQSNNIQVLHSVFDQSAEMNEQI

SEQ ID NO: 8718 - protein, 178 aa, Homo sapiens
MPIKPVGWICGQVLKNFSGRIEGIQKAIMDLVDEFKDEFPTILRLSQSNQVRKGSLFEIISFPAKTALTSIIYASYAALIYLAVCVNAVLKKVKNIFQEEESIRQNREESENCRKAFSEPVLSEPMFAEGEIKAKPYRSLPEKPDISDYPKLLANKQSNNIQVLHSVFDQSAEMNEQI

SEQ ID NO: 8719 - protein, 135 aa, Homo sapiens
MPIKPVGWICGQVLKNFSGRIEGIQKAIMDLVDEFKDEFPTILRLSQSNQKREPAQKTSKIRMAIALAKINRATLIRGLNSISRSSKSVAKLLHPQLACRLLELRDISGRLLREVNAPRQPLYNIQEKKMGLQLS

SEQ ID NO: 8720 - protein, 517 aa, Homo sapiens
MAALRLLASVLGRGVPAGGSGLALSQGCARCFATSPRLRAKFYADPVEMVKDISDGATVMIGGFGLCGIPENLIAALLRTRVKDLQVVSSNVGVEDFGLGLLLAARQVRRIVCSYVGENTLCESQYLAGELELELTPQGTLAERIRAGGAGVPAFYTPTGYGTLVQEGGAPIRYTPDGHLALMSQPREVREFNGDHFLLERAIRADFALVKGWKADRAGNVVFRRSARNFNVPMCKAADVTAVEVEEIVEVGAFPPEDIHVPNIYVDRVIKGQKYEKRIERLTILKEEDGDAGKEEDARTRIIRRAALEFEDGMYANLGIGIPLLASNFISPSMTVHLHSENGILGLGPFPTEDEVDADLINAGKQTVTVLPGGCFFASDDSFAMIRGGHIQLTMLGAMQVSKYGDLANWMIPGKKVKGMGGAMDLVSSQKTRVVVTMQHCTKDNTPKIMEKCTMPLTGKRCVDRIITEKAVFDVHRKKELTLRELWEGLTVDDIKKSTGCAFAVSPNLRPMQQVAP

SEQ ID NO: 8721 - protein, 241 aa, Homo sapiens
MRHQQTERQDPSQPLSRQHGTYRQIFHPEQLITGKEDAANNYAWGHYTIGKEFIDLLLDRIRKLADQCTGLQGFLVFHSLGRGTGSDVTSFLMEWLSVNYGKKSKLGFSIYPAPQVSTAMVQPYNSILTTHTTLEHSDCAFMVDNKAIYDICHCNLDIERPTYTNLNRLISQIVSSITASLRFDGALNVDLTEFQTNLVSYLTSTSPWPPMHQSSLQKRYTTSSCWWQRLPMPALSLPTRW

SEQ ID NO: 8722 - protein, 392 aa, Homo sapiens [sequence omitted]

SEQ ID NO: 8723 - protein, 305 aa, Homo sapiens
MGSLSTANVEFCLDVFKELNSNNIGDNIFFSSLSLLYALSMVLLGARGETAEQLEKVLHFSHTVDSLKPGFKDSPKCSQAGRIHSEFGVEFSQINQPDSNCTLSIANRLYGTKTMAFHQGKNVTVEMMYQIGTFKLAFVKEPQMQVLELPYVNNKLSMIILLPVGIANLKQIEKQLNSGTFHEWTSSSNMMEREVEVHLPRFKLEIKYELNSLLKPLGVTDLFNQVKADLSGMSPTKGLYLSKAIHKSYLDVSEEGTEAAAATGDSIAVKSLPMRAQFKANHPFLFFIRHTHTNTILFCGKLASP

SEQ ID NO: 8724 - protein, 190 aa, Homo sapiens
MGSLSTANVEFCLDVFKELNSNNIGDNIFFSSLSLLYALSMVLLGARGETAEQLEKIEKQLNSGTFHEWTSSSNMMEREVEVHLPRFKLEIKYELNSLLKPLGVTDLFNQVKADLSGMSPTKGLYLSKAIHKSYLDVSEEGTEAAAATGDSIAVKSLPMRAQFKANHPFLFFIRHTHTNTILFCGKLASP

SEQ ID NO: 8725 - protein, 406 aa, Homo sapiens
MMEGLDDGPDFLSEEDRGLKAINVDLQSDAALQVDISDALSERDKVKFTVHTKSSLPNFKQNEFSVVRQHEEFIWLHDSFVENEDYAGYIIPPAPPRPDFDASREKLQKLGEGEGSMTKEEFTKMKQELEAEYLAIFKKTVAMHEVFLCRVAAHPILRRDLNFHVFLEYNQDLSVRGKNKKEKLEDFFKNMVKSADGVIVSGVKDVDDFFEHERTFLLEYHNRVKDASAKSDRMTRSHKSAADDYNRIGSSLYALGTQDSTDICKFFLKVSELFDKTRKIEARVSADEDLKLSDLLKYYLRESQAAKDLLYRRSRSLVDYENANKALDKARAKNKDVLQAETSQQLCCQKFEKISESAKQELIDFKTRRVAAFRKNLVELAELELKHAKGNLQLLQNCLAVLNGDT

SEQ ID NO: 8726 - protein, 290 aa, Homo sapiens
MTKEEFTKMKQELEAEYLAIFKKTVAMHEVFLCRVAAHPILRRDLNFHVFLEYNQDLSVRGKNKKEKLEDFFKNMVKSADGVIVSGVKDVDDFFEHERTFLLEYHNRVKDASAKSDRMTRSHKSAADDYNRIGSSLYALGTQDSTDICKFFLKVSELFDKTRKIEARVSADEDLKLSDLLKYYLRESQAAKDLLYRRSRSLVDYENANKALDKARAKNKDVLQAETSQQLCCQKFEKISESAKQELIDFKTRRVAAFRKNLVELAELELKHAKGNLQLLQNCLAVLNGDT

SEQ ID NO: 8727 - protein, 368 aa, Homo sapiens
MGTPPGLQTDCEALLSRFQETDSVRFEDFTELWRNMKFGTIFCGRMRNLEKNMFTKEALALAWRYFLPPYTFQIRVGALYLLYGLYNTQLCQPKQKIRVALKDWDEVLKFQQDLVNAQHFDAAYIFRKLRLDRAFHFTAMPKLLSYRMKKKIHRAEVTEEFKDPSDRVMKLITSDVLEEMLNVHDHYQNMKHVISVDKSKPDKALSLIKDDFFDNIKNIVLEHQQWHKDRKNPSLKSKTNDGEEKMEGNSQETERCERAESLAKIKSKAFSVVIQASKSRRHRQVKLDSSDSDSASGQGQVKATRKKEKKERLKPAGRKMSLRNKGNVQNIHKEDKPLSLSMPVITEEEENESLSGTEFTASKKRRKH

SEQ ID NO: 8728 - protein, 376 aa, Homo sapiens
METLSNASGTFAIRLLKILCQDNPSHNVFCSPVSISSALAMVLLGAKGNTATQMAQALSLNTEEDIHRAFQSLLTEVNKAGTQYLLRTANRLFGEKTCQFLSTFKESCLQFYHAELKELSFIRAAEESRKHINTWVSKKTEGKIEELLPGSSIDAETRLVLVNAIYFKGKWNEPFDETYTREMPFKINQEEQRPVQMMYQEATFKLAHVGEVRAQLLELPYARKELSLLVLLPDDGVELSTVEKSLTFEKLTAWTKPDCMKSTEVEVLLPKFKLQEDYDMESVLRHLGIVDAFQQGKADLSAMSAERDLCLSKFVHKSFVEVNEEGTEAAAASSCFVVAECCMESGPRFCADHPFLFFIRHNRANSILFCGRFSSP

SEQ ID NO: 8729 - protein, 549 aa, Homo sapiens
MDVVEVAGSWWAQEREDIIMKYEKGHRAGLPEDKGPKPFRSYNNNVDHLGIVHETELPPLTAREAKQIRREISRKSKWVDMLGDWEKYKSSRKLIDRAYKGMPMNIRGPMWSVLLNIEEMKLKNPGRYQIMKEKGKRSSEHIQRIDRDISGTLRKHMFFRDRYGTKQRELLHILLAYEEYNPEVGYCRDLSHIAALFLLYLPEEDAFWALVQLLASERHSLQGFHSPNGGTVQGLQDQQEHVVATSQSKTMGHQDKKDLCGQCSPLGCLIRILIDGISLGLTLRLWDVYLVEGEQALMPITRIAFKVQQKRLTKTSRCGPWARFCNRFVDTWARDEDTVLKHLRASMKKLTRKQGDLPPPAKPEQGSSASRPVPASRGRKTLCKGDRQAPPGPPARFPRPIWSASPPRAPRSSTPCPGGAVREDTYPVGTQGVPSPALAQGGPQGSWRFLQWNSMPRLPTDLDVEGPWFRHYDFRQSCWVRAISQEDQLAPCWQAEHPAERVRSAFAAPSTDSDQGTPFRARDEQQCAPTSGPCLCGLHLESSQFPPGF

SEQ ID NO: 8730 - protein, 550 aa, Homo sapiens
MVGEEKMSLRNRLSKSRENPEEDEDQRNPAKESLETPSNGRIDIKQLIAKKIKLTAEAEELKPFFMKEVGSHFDDFVTNLIEKSASLDNGGCALTTFSVLEGEKNNHRAKDLRAPPEQGKIFIARRSLLDELLEVDHIRTIYHMFIALLILFILSTLVVDYIDEGRLVLEFSLLSYAFGKFPTVVWTWWIMFLSTFSVPYFLFQHWATGYSKSSHPLIRSLFHGFLFMIFQIGVLGFGPTYVVLAYTLPPASRFIIIFEQIRFVMKAHSFVRENVPRVLNSAKEKSSTVPIPTVNQYLYFLFAPTLIYRDSYPRNPTVRWGYVAMKFAQVFGCFFYVYYIFERLCAPLFRNIKQEPFSARVLVLCVFNSILPGVLILFLTFFAFLHCWLNAFAEMLRFGDRMFYKDWWNSTSYSNYYRTWNVVVHDWLYYYAYKDFLWFFSKRFKSAAMLAVFAVSAVVHEYALAVCLSFFYPVLFVLFMFFGMAFNFIVNDSRKKPIWNVLMWTSLFLGNGVLLCFYSQEWYARQHCPLKNPTFLDYVRPRSWTCRYVF

SEQ ID NO: 8731 - protein, 492 aa, Homo sapiens
MELKPFFMKEVGSHFDDFVTNLIEKSASLDNGGCALTTFSVLEGEKNNHRAKDLRAPPEQGKIFIARRSLLDELLEVDHIRTIYHMFIALLILFILSTLVVDYIDEGRLVLEFSLLSYAFGKFPTVVWTWWIMFLSTFSVPYFLFQHWATGYSKSSHPLIRSLFHGFLFMIFQIGVLGFGPTYVVLAYTLPPASRFIIIFEQIRFVMKAHSFVRENVPRVLNSAKEKSSTVPIPTVNQYLYFLFAPTLIYRDSYPRNPTVRWGYVAMKFAQVFGCFFYVYYIFERLCAPLFRNIKQEPFSARVLVLCVFNSILPGVLILFLTFFAFLHCWLNAFAEMLRFGDRMFYKDWWNSTSYSNYYRTWNVVVHDWLYYYAYKDFLWFFSKRFKSAAMLAVFAVSAVVHEYALAVCLSFFYPVLFVLFMFFGMAFNFIVNDSRKKPIWNVLMWTSLFLGNGVLLCFYSQEWYARQHCPLKNPTFLDYVRPRSWTCRYVF

SEQ ID NO: 8732 - protein, 485 aa, Homo sapiens
MKEVGSHFDDFVTNLIEKSASLDNGGCALTTFSVLEGEKNNHRAKDLRAPPEQGKIFIARRSLLDELLEVDHIRTIYHMFIALLILFILSTLVVDYIDEGRLVLEFSLLSYAFGKFPTVVWTWWIMFLSTFSVPYFLFQHWATGYSKSSHPLIRSLFHGFLFMIFQIGVLGFGPTYVVLAYTLPPASRFIIIFEQIRFVMKAHSFVRENVPRVLNSAKEKSSTVPIPTVNQYLYFLFAPTLIYRDSYPRNPTVRWGYVAMKFAQVFGCFFYVYYIFERLCAPLFRNIKQEPFSARVLVLCVFNSILPGVLILFLTFFAFLHCWLNAFAEMLRFGDRMFYKDWWNSTSYSNYYRTWNVVVHDWLYYYAYKDFLWFFSKRFKSAAMLAVFAVSAVVHEYALAVCLSFFYPVLFVLFMFFGMAFNFIVNDSRKKPIWNVLMWTSLFLGNGVLLCFYSQEWYARQHCPLKNPTFLDYVRPRSWTCRYVF

SEQ ID NO: 8733 - protein, 549 aa, Homo sapiens
MDVVEVAGSWWAQEREDIIMKYEKGHRAGLPEDKGPKPFRSYNNNVDHLGIVHETELPPLTAREAKQIRREISRKSKWVDMLGDWEKYKSSRKLIDRAYKGMPMNIRGPMWSVLLNTEEMKLKNPGRYQIMKEKGKRSSEHIQRIDRDVSGTLRKHIFFRDRYGTKQRELLHILLAYEEYNPEVGYCRDLSHIAALFLLYLPEEDAFWALVQLLASERHSLQGFHSPNGGTVQGLQDQQEHVVATSQPKTMGHQDKKDLCGQCSPLGCLIRILIDGISLGLTLRLWDVYLVEGEQALMPITRIAFKVQQKRLTKTSRCGPWARFCNRFVDTWARDEDTVLKHLRASMKKLTRKQGDLPPPAKPEQGSSASRPVPASRGGKTLCKGDRQAPPGPPARFPRPIWSASPPRAPRSSTPCPGGAVREDTYPVGTQGVPSPALAQGGPQGSWRFLQWNSMPRLPTDLDVEGPWFRHYDFRQSCWVRAISQEDQLAPCWQAEHPAERVRSAFAAPSTDSDQGTPFRARDEQQCAPTSGPCLCGLHLESSQFPPGF

SEQ ID NO: 8734 - protein, 522 aa, Homo sapiens
MSITSDEVNFLVYRYLQESGFSHSAFTFGIESHISQSNINGTLVPPSALISILQKGLQYVEAEISINKDGTVFDSRPIESLSLIVAVIPDVVQMRQQAFGEKLTQQQASAAATEASAMAKAATMTPAAISQQNPPKNREATVNGEENGAHEINNHSKPMEIDGDVEIPPNKATVLRGHESEVFICAWNPVSDLLASGSGDSTARIWNLNENSNGGSTQLVLRHCIREGGHDVPSNKDVTSLDWNSDGTLLAMGSYDGFARIWTENGNLASTLGQHKGPIFALKWNKKGNYVLSAGVDKTTIIWDAHTGEAKQQFPFHSAPALDVDWQNNMTFASCSTDMCIHVCRLGCDHPVKTFQGHTNEVNAIKWDPSGMLLASCSDDMTLKIWSMKQDACVHDLQAHSKEIYTIKWSPTGPATSNPNSSIMLASASFDSTVRLWDVEQGVCTHTLMKHQEPVYSVAFSPDGKYLASGSFDKYVHIWNTQSGSLVHSYQGTGGIFEVCWNARGDKVGASASDGSVCVLDL

SEQ ID NO: 8735 - protein, 376 aa, Homo sapiens
MDVLAEANGTFALNLLKTLGKDNSKNVFFSPMSMSCALAMVYMGAKGNTAAQMAQILSFNKSGGGGDIHQGFQSLLTEVNKTGTQYLLRMANRLFGEKSCDFLSSFRDSCQKFYQAEMEELDFISAVEKSRKHINTWVAEKTEGKIAELLSPGSVDPLTRLVLVNAVYFRGNWDEQFDKENTEERLFKVSKNEEKPVQMMFKQSTFKKTYIGEIFTQILVLPYVGKELNMIIMLPDETTDLRTVEKELTYEKFVEWTRLDMMDEEEVEVSLPRFKLEESYDMESVLRNLGMTDAFELGKADFSGMSQTDLSLSKVVHKSFVEVNEEGTEAAAATAAIMMMRCARFVPRFCADHPFLFFIQHSKTNGILFCGRFSSP

SEQ ID NO: 8736 - protein, 276 aa, Homo sapiens
MSKPVDHVKRPMNAFMVWSRAQRRKMAQENPKMHNSEISKRLGAEWKLLTESEKRPFIDEAKRLRAMHMKEHPDYKYRPRRKPKTLLKKDKFAFPVPYGLGGVADAEHPALKAGAGLHAGAGGGLVPESLLANPEKAAAAAAAAAARVFFPQSAAAAAAAAAAAAAGSPYSLLDLGSKMAEISSSSSGLPYASSLGYPTAGAGAFHGAAAAAAAAAAAAGGHTHSHPSPGNPGYMIPCNCSAWPSPGLQPPLAYILLPGMGKPQLDPYPAAYAAAL

SEQ ID NO: 8737 - protein, 399 aa, Homo sapiens
MAFWGWRAAAALRLWGRVVERVEAGGGVGPFQACGCRLVLGGRDDVSAGLRGSHGARGEPLDPARPLQRPPRPEVPRAFRRQPRAAAPSFFFSSIKGGRRSISFSVGASSVVGSGGSSDKGKLSLQDVAELIRARACQRVVVMVGAGISTPSGIPDFRSPGSGLYSNLQQYDLPYPEAIFELPFFFHNPKPFFTLAKELYPGNYKPNVTHYFLRLLHDKGLLLRLYTQNIDGLERVSGIPASKLVEAHGTFASATCTVCQRPFPGEDIRADVMADRVPRCPVCTGVVKPDIVFFGEPLPQRFLLHVVDFPMADLLLILGTSLEVEPFASLTEAVRSSVPRLLINRDLVGPLAWHPRSRDVAQLGDVVHGVESLVELLGWTEEMRDLVQRETGKLDGPDK

SEQ ID NO: 8738 - protein, 257 aa, Homo sapiens
MVGAGISTPSGIPDFRSPGSGLYSNLQQYDLPYPEAIFELPFFFHNPKPFFTLAKELYPGNYKPNVTHYFLRLLHDKGLLLRLYTQNIDGLERVSGIPASKLVEAHGTFASATCTVCQRPFPGEDIRADVMADRVPRCPVCTGVVKPDIVFFGEPLPQRFLLHVVDFPMADLLLILGTSLEVEPFASLTEAVRSSVPRLLINRDLVGPLAWHPRSRDVAQLGDVVHGVESLVELLGWTEEMRDLVQRETGKLDGPDK

SEQ ID NO: 8739 - protein, 342 aa, Homo sapiens
MCSTMSAPTCLAHLPPCFLLLALVLVPSDASGQSSRNDWQVLQPEGPMLVAEGETLLLRCMVVGSCTDGMIKWVKVSTQDQQEIYNFKRGSFPGVMPMIQRTSEPLNCDYSIYIHNVTREHTGTYHCVRFDGLSEHSEMKSDEGTSVLVKGAGDPEPDLWIIQPQELVLGTTGDTVFLNCTVLGDGPPGPIRWFQGAGLSREAIYNFGGISHPKETAVQASNNDFSILLQNVSSEDAGTYYCVKFQRKPNRQYLSGQGTSLKVKAKSTSSKEAEFTSEPATEMSPTGLLVVFAPVVLGLKAITLAALLLALATSRRSPGQEDVKTTGPAGAMNTLAWSKGQE

SEQ ID NO: 8740 - protein, 191 aa, Homo sapiens
MCSTMSAPTCLAHLPPCFLLLALVLVPSDASGQSSRNDWQVLQPEGPMLVAEGAGDPEPDLWIIQPQELVLGTTGDTVFLNCTVLGDGPPGPIRWFQGAGLSREAIYNFGGISHPKETAVQASNNDFSILLQNVSSEDAGTYYCVKFQRKPNRQYLSGQGTSLKVKAKSTSSKEAEFTSEPATEMSPTGLL

SEQ ID NO: 8741 - protein, 244 aa, Homo sapiens
MCSTMSAPTCLAHLPPCFLLLALVLVPSDASGQSSRNDWQVLQPEGPMLVAEGAGDPEPDLWIIQPQELVLGTTGDTVFLNCTVLGDGPPGPIRWFQGAGLSREAIYNFGGISHPKETAVQASNNDFSILLQNVSSEDAGTYYCVKFQRKPNRQYLSGQGTSLKVKAKSTSSKEAEFTSEPATEMSPTGLLVVFAPVVLGLKAITLAALLLALATSRRSPGQEDVKTTGPAGAMNTLAWSKGQE

SEQ ID NO: 8742 - protein, 368 aa, Homo sapiens
MSVAGLKKQFYKASQLVSEKVGGAEGTKLDDDFKEMEKKVDVTSKAVTEVLARTIEYLQPNPASRAKLTMLNTVSKIRGQVKNPGYPQSEGLLGECMIRHGKELGGESNFGDALLDAGESMKRLAEVKDSLDIEVKQNFIDPLQNLCEKDLKEIQHHLKKLEGRRLDFDYKKKRQGKIPDEELRQALEKFEESKEVAETSMHNLLETDIEQVSQLSALVDAQLDYHRQAVQILDELAEKLKRRMREASSRPKREYKPKPREPFDLGEPEQSNGGFPCTTAPKIAASSSFRSSDKPIRTPSRSMPPLDQPSCKALYDFEPENDGELGFHEGDVITLTNQIDENWYEGMLDGQSGFFPLSYVEVLVPLPQ

SEQ ID NO: 8743 - protein, 320 aa, Homo sapiens
MSVAGLKKQFYKASQLVSEKVGGAEGTKLDDDFKEMEKKVDVTSKAVTEVLARTIEYLQPNPGDALLDAGESMKRLAEVKDSLDIEVKQNFIDPLQNLCEKDLKEIQHHLKKLEGRRLDFDYKKKRQGKIPDEELRQALEKFEESKEVAETSMHNLLETDIEQVSQLSALVDAQLDYHRQAVQILDELAEKLKRRMREASSRPKREYKPKPREPFDLGEPEQSNGGFPCTTAPKIAASSSFRSSDKPIRTPSRSMPPLDQPSCKALYDFEPENDGELGFHEGDVITLTNQIDENWYEGMLDGQSGFFPLSYVEVLVPLPQ

SEQ ID NO: 8744 - protein, 304 aa, Homo sapiens
MSVAGLKKQFYKASQLVSEKVGGAEGTKLDDDFKEMEKKVDVTSKAVTEVLARTIEYLQPNPASRAKLTMLNTVSKIRGQNLCEKDLKEIQHHLKKLEGRRLDFDYKKKRQGKIPDEELRQALEKFEESKEVAETSMHNLLETDIEQVSQLSALVDAQLDYHRQAVQILDELAEKLKRRMREASSRPKREYKPKPREPFDLGEPEQSNGGFPCTTAPKIAASSSFRSSDKPIRTPSRSMPPLDQPSCKALYDFEPENDGELGFHEGDVITLTNQIDENWYEGMLDGQSGFFPLSYVEVLVPLPQ

SEQ ID NO: 8745 - protein, 565 aa, Homo sapiens
MSGRSKRESRGSTRGKRESESRGSSGRVKRERDREREPEAASSRGSPVRVKREFEPASAREAPASVVPFVRVKREREVDEDSEPEREVRAKNGRVDSEDRRSRHCPYLDTINRSVLDFDFEKLCSISLSHINAYACLVCGKYFQGRGLKSHAYIHSVQFSHHVFLNLHTLKFYCLPDNYEIIDSSLEDITYVLKPTFTKQQIANLDKQAKLSRAYDGTTYLPGIVGLNNIKANDYANAVLQALSNVPPLRNYFLEEDNYKNIKRPPGDIMFLLVQRFGELMRKLWNPRNFKAHVSPHEMLQAVVLCSKKTFQITKQGDGVDFLSWFLNALHSALGGTKKKKKTIVTDVFQGSMRIFTKKLPHPDLPAEEKEQLLHNDEYQETMVESTFMYLTLDLPTAPLYKDEKEQLIIPQVPLFNILAKFNGITEKEYKTYKENFLKRFQLTKLPPYLIFCIKRFTKNNFFVEKNPTIVNFPITNVDLREYLSEEVQAVHKNTTYDLIANIVHDGKPSEGSYRIHVLHHGTGKWYELQDLQVTDILPQMITLSEAYIQIWKRRDNDETNQQGA

SEQ ID NO: 8746 - protein, 462 aa, Homo sapiens
MLTAVPSHLFSAKNGRVDSEDRRSRHCPYLDTINSFSPFPTGRGLKSHAYIHSVQFSHHVFLNLHTLKFYCLPDNYEIIDSSLEDITYVLKPTFTKQQIANLDKQAKLSRAYDGTTYLPGIVGLNNIKANDYANAVLQALSNVPPLRNYFLEEDNYKNIKRPPGDIMFLLVQRFGELMRKLWNPRNFKAHVSPHEMLQAVVLCSKKTFQITKQGDGVDFLSWFLNALHSALGGTKKKKKTIVTDVFQGSMRIFTKKLPHPDLPAEEKEQLLHNDEYQETMVESTFMYLTLDLPTAPLYKDEKEQLIIPQVPLFNILAKFNGITEKEYKTYKENFLKRFQLTKLPPYLIFCIKRFTKNNFFVEKNPTIVNFPITNVDLREYLSEEVQAVHKNTTYDLIANIVHDGKPSEGSYRIHVLHHGTGKWYELQDLQVTDILPQMITLSEAYIQIWKRRDNDETNQQGA

SEQ ID NO: 8747 - protein, 488 aa, Homo sapiens
MSGRSKRESRGSTRGKRESESRGSSGRVKRERDREREPEAASSRGSPVRVKREFEPASAREAPASVVPFVRVKREREVDEDSEPEREVRAKNGRVDSEDRRSRHCPYLDTINRSVLDFDFEKLCSISLSHINAYACLVCGKYFQGRGLKSHAYIHSVQFSHHVFLNLHTLKFYCLPDNYEIIDSSLEDITYVLKPTFTKQQIANLDKQAKLSRAYDGTTYLPGIVGLNNIKANDYANAVLQALSNVPPLRNYFLEEDNYKNIKRPPGDIMFLLVQRFGELMRKLWNPRNFKAHVSPHEMLQAVVLCSKKTFQITKQGDGVDFLSWFLNALHSALGGTKKKKKTIVTDVFQGSMRIFTKKLPHPDLPAEEKEQLLHNDEYQETMVESTFMYLTLDLPTAPLYKDEKEQLIIPQVPLFNILAKFNGITEKEYKTYKENFLKRFQLTKLPPYLIFCIKRFTKNNFFVEKNPTIVNFPITGQANGMNYKTSR

SEQ ID NO: 8748 - protein, 535 aa, Homo sapiens; identical to SEQ ID NO: 269

SEQ ID NO: 8749 - protein, 446 aa, Homo sapiens
MLLPQLCWLPLLAGLLPPVPAQKFSALTFLRVDQDKDKDCSLDCAGSPQKPLCASDGRTFLSRCEFQRAKCKDPQLEIAYRGNCKDVSRCVAERKYTQEQARKEFQQVFIPECNDDGTYSQVQCHSYTGYCWCVTPNGRPISGTAVAHKTPRCPGSVNEKLPQREGTGKTDDAAAPALETQPQGDEEDIASRYPTLWTEQVKSRQNKTNKNSVSSCDQEHQSALEEAKQPKNDNVVIPECAHGGLYKPVQCHPSTGYCWCVLVDTGRPIPGTSTRYEQPKCDNTARAHPAKARDLYKGRQLQGCPGAKKHEFLTSVLDALSTDMVHAASDPSSSSGRLSEPDPSHTLEERVVHWYFKLLDKNSSGDIGKKEIKPFKRFLRKKSKPKKCVKKFVEYCDVNNDKSISVQELMGCLGVAKEDGKADTKKRHTPRGHAESTSNRQPRKQG

SEQ ID NO: 8750 - protein, 457 aa, Homo sapiens
MLLPQLCWLPLLAGLLPPVPAQKFSALTFLRVDQDKDKDCSLDCAGSPQKPLCASDGRTFLSRCEFQRAKCKDPQLEIAYRGNCKDVSRCVAERKYTQEQARKEFQQVFIPECNDDGTYSQVQCHSYTGYCWCVTPNGRPISGTAVAHKTPRCPGSVNEKLPQREGTGKTVSLQIFSVLNSDDAAAPALETQPQGDEEDIASRYPTLWTEQVKSRQNKTNKNSVSSCDQEHQSALEEAKQPKNDNVVIPECAHGGLYKPVQCHPSTGYCWCVLVDTGRPIPGTSTRYEQPKCDNTARAHPAKARDLYKGRQLQGCPGAKKHEFLTSVLDALSTDMVHAASDPSSSSGRLSEPDPSHTLEERVVHWYFKLLDKNSSGDIGKKEIKPFKRFLRKKSKPKKCVKKFVEYCDVNNDKSISVQELMGCLGVAKEDGKADTKKRHTPRGHAESTSNRQPRKQG

SEQ ID NO: 8751 - protein, 175 aa, Homo sapiens
MPKRSCPFADVAPLQLKVRVSQRELSRGVCAERYSQEVFEKTKRLLFLGAQAYLDHVWDEGCAVVHLPESPKPGPTGAPRAARGQMLIGPDGRLIRSLGQASEADPSGVASIACSSCVRAVDGKAVCGQCERALCGQCVRTCWGCGSVACTLCGLVDCSDMYEKVLCTSCAMFET

SEQ ID NO: 8752 - protein, 110 aa, Homo sapiens
MPKRSCPFADVAPLQLKVRVSQRELSRGVCAERYSQEVFDPSGVASIACSSCVRAVDGKAVCGQCERALCGQCVRTCWGCGSVACTLCGLVDCSDMYEKVLCTSCAMFET

SEQ ID NO: 8753 - protein, 461 aa, Homo sapiens
MEPAPDAQEARTVREALGRYEAALEGAVRALHEDMRGLQRGVERRVAEAMRLAGPLARTVADLQRDNQRLQAQLERLTRQVEALGLASGMSPVPGTPGTPSPPPAPGVPDRAPRLGSARFASHATFSLSGRGQSLDHDEASESEMRKTSNSCIMENGHQPGAGPGDGPPEIAQNFSAPDPPRPRPVSLSLRLPHQPVTAITRVSDRFSGETSAAALSPMSAATLGGLNPSPSEVITPWTPSPSEKNSSFTWSVPSSGYGAVTASKHSNSPPLVTPPQSPVSPQPPAITQVHRQGERRRELVRSQTLPRTSEAQARKALFEKWEQETAAGKGKGEARARLKRSQSFGVASASSIKQILLEWCRSKTLGYQHVDLQNFSSSWSDGMAFCALVHSFFPDAFDYNSLSPTQRQKNFELAFTMAENLANCERLIEVEDMMVMGRKPDPMCVFTYVQSLYNHLRRFE

SEQ ID NO: 8754 - protein, 317 aa, Homo sapiens
MRKTSNSCIMENGHQPGAGPGDGPPEIAQNFSAPDPPRPRPVSLSLRLPHQPVTAITRVSDRFSGETSAAALSPMSAATLGGLNPSPSEVITPWTPSPSEKNSSFTWSVPSSGYGAVTASKHSNSPPLVTPPQSPVSPQPPAITQVHRQGERRRELVRSQTLPRTSEAQARKALFEKWEQETAAGKGKGEARARLKRSQSFGVASASSIKQILLEWCRSKTLGYQHVDLQNFSSSWSDGMAFCALVHSFFPDAFDYNSLSPTQRQKNFELAFTMAENLANCERLIEVEDMMVMGRKPDPMCVFTYVQSLYNHLRRFE

SEQ ID NO: 8755 - protein, 136 aa, Homo sapiens
MAGAGSAAVSGAGTPVAGPTGRDLFAEGLLEFLRPAVQQLDSHVHAVRESQVELREQIDNLATELCRINEDQKVALDLDPYVKKLLNARRRVVLVNNILQNAQERLRRLNHSVAKETARRRAMLDSGIYPPGSPGK

SEQ ID NO: 8756 - protein, 180 aa, Homo sapiens
MNTVLSRANSLFAFSLSVMAALTFGCFITTAFKDRSVPVRLHVSRIMLKNVEDFTGPRERSDLGFITFDITADLENIFDWNVKQLFLYLSAEYSTKNNALNQVVLWDKIVLRGDNPKLLLKDMKTKYFFFDDGNGLKGNRNVTLTLSWNVVPNAGILPLVTGSGHVSVPFPDTYEITKSY

SEQ ID NO: 8757 - protein, 496 aa, Homo sapiens
MQRDHTMDYKESCPSVSIPSSDEHREKKKRFTVYKVLVSVGRSEWFVFRRYAEFDKLYNTLKKQFPAMALKIPAKRIFGDNFDPDFIKQRRAGLNEFIQNLVRYPELYNHPDVRAFLQMDSPKHQSDPSEDEDERSSQKLHSTSQNINLGPSGNPHAKPTDFDFLKVIGKGSFGKVLLAKRKLDGKFYAVKVLQKKIVLNRKEQKHIMAERNVLLKNVKHPFLVGLHYSFQTTEKLYFVLDFVNGGELFFHLQRERSFPEHRARFYAAEIASALGYLHSIKIVYRDLKPENILLDSVGHVVLTDFGLCKEGIAISDTTTTFCGTPEYLAPEVIRKQPYDNTVDWWCLGAVLYEMLYGLPPFYCRDVAEMYDNILHKPLSLRPGVSLTAWSILEELLEKDRQNRLGAKEDFLEIQNHPFFESLSWADLVQKKIPPPFNPNVAGPDDIRNFDTAFTEETVPYSVCVSSDYSIVNASVLEADDAFVGFSYAPPSEDLFL

SEQ ID NO: 8758 - protein, 464 aa, Homo sapiens
MQRDHTMDYKESCPSVSIPSSDEHREKKKRFTVYKVLVSVGRSEWFVFRRYAEFDKLYNTLKKQFPAMALKIPAKRIFGDNFDPDFIKQRRAGLNEFIQNLVRYPELYNHPDVRAFLQMDSPKHQSDPSEDEDERSSQKLHSTSQNINLGPSGNPHAKPTDFDFLKVIGKGSFGKVLLAKRKLDGKFYAVKVLQKKIVLNRKEQKHIMAERNVLLKNVKHPFLVGLHYSFQTTEKLYFVLDFVNGGELFFHLQRERSFPEHRARFYAAEIASALGYLHSIKIVYRDLKPENILLDSVGHVVLTDFGLCKEGIAISDTTTTFCGTPEPPFYCRDVAEMYDNILHKPLSLRPGVSLTAWSILEELLEKDRQNRLGAKEDFLEIQNHPFFESLSWADLVQKKIPPPFNPNVAGPDDIRNFDTAFTEETVPYSVCVSSDYSIVNASVLEADDAFVGFSYAPPSEDLFL

SEQ ID NO: 8759 - protein, 208 aa, Homo sapiens
MEWWDKSEESLEEEPRKVLAPEPEEIWVAEMLCGLKMKLKRRRVSLVLPEHHEAFNRLLEDPVIKRFLAWDKGLRVSDKYLLAMVIVYFSRAGLPSWQYQCIHFFLALYLANDMEEDDEDPKQNIFYFLYGKTRSRIPLLRKRRFQLCRCMNPRARKNRSQIVLFQKLRFQFFCSMSCRAWVSPEELEEIQAYDPEHWVWARDRARLS

SEQ ID NO: 8760 - protein, 139 aa, Homo sapiens
MEWAKWTPHEASNQTQASTLLGLLLGDHTEGRNDTNSTRALKVPDGTSAAWYILTIIGIYAVIFVFRLASNILRKNDKSLEDVYYSNLTSELKMTGLQGKVAKCSTLSISNRAVLQPCQAHLGAKGGSSGPQTATPETP

SEQ ID NO: 8761 - protein, 1235 aa, Homo sapiens
MSFFNFRKIFKLGSEKKKKQYEHVKRDLNPEDFWEIIGELGDGAFGKVYKAQNKETSVLAAAKVIDTKSEEELEDYMVEIDILASCDHPNIVKLLDAFYYENNLWILIEFCAGGAVDAVMLELERPLTESQIQVVCKQTLDALNYLHDNKIIHRDLKAGNILFTLDGDIKLADFGVSAKNTRTIQRRDSFIGTPYWMAPEVVMCETSKDRPYDYKADVWSLGITLIEMAEIEPPHHELNPMRVLLKIAKSEPPTLAQPSRWSSNFKDFLKKCLEKNVDARWTTSQLLQHPFVTVDSNKPIRELIAEAKAEVTEEVEDGKEEDEEEETENSLPIPASKRASSDLSIASSEEDKLSQNACILESVSEKTERSNSEDKLNSKILNEKPTTDEPEKAVEDINEHITDAQLEAMTELHDRTAVIKENEREKRPKLENLPDTEDQETVDINSVSEGKENNIMITLETNIEHNLKSEEEKDQEKQQMFENKLIKSEEIKDTILQTVDLVSQETGEKEANIQAVDSEVGLTKEDTQEKLGEDDKTQKDVISNTSDVIGTCEAADVAQKVDEDSAEDTQSNDGKEVVEVGQKLINKPMVGPEAGGTKEVPIKEIVEMNEIEEGKNKEQAINSSENIMDINEEPGTTEGEEITESSSTEEMEVRSVVADTDQKALGSEVQDASKVTTQIDKEKKEIPVSIKKEPEVTVVSQPTEPQPVLIPSININSDSGENKEEIGSLSKTETILPPESENPKENDNDSGTGSTADTSSIDLNLSISSFLSKTKDSGSISLQETRRQKKTLKKTRKFIVDGVEVSVTTSKIVTDSDSKTEELRFLRRQELRELRFLQKEEQRAQQQLNSKLQQQREQIFRRFEQEMMSKKRQYDQEIENLEKQQKQTIERLEQEHTNRLRDEAKRIKGEQEKELSKFQNMLKNRKKEVINEVEKAPKELRKELMKRRKEELAQSQHAQEQEFVQKQQQELDGSLKKIIQQQKAELANIERECLNNKQQLMRAREAAIWELEERHLQEKHQLLKQQLKDQYFMQRHQLLKRHEKETEQMQRYNQRLIEELKNRQTQERARLPKIQRSEAKTRMAMFKKSLRINSTATPDQDRDKIKQFAAQEEKRQKNERMAQHQKHENQMRDLQLQCEANVRELHQLQNEKCHLLVEHETQKLKELDEEHSQELKEWREKLRPRKKTLEEEFARKLQEQEVFFKMTGESECLNPSTQSRISKFYPIPSLHSTGS

SEQ ID NO: 8762 - protein, 1204 aa, Homo sapiens
MSFFNFRKIFKLGSEKKKKQYEHVKRDLNPEDFWEIIGELGDGAFGKVYKAQNKETSVLAAAKVIDTKSEEELEDYMVEIDILASCDHPNIVKLLDAFYYENNLWILIEFCAGGAVDAVMLELERPLTESQIQVVCKQTLDALNYLHDNKIIHRDLKAGNILFTLDGDIKLADFGVSAKNTRTIQRRDSFIGTPYWMAPEVVMCETSKDRPYDYKADVWSLGITLIEMAEIEPPHHELNPMRVLLKIAKSEPPTLAQPSRWSSNFKDFLKKCLEKNVDARWTTSQLLQHPFVTVDSNKPIRELIAEAKAEVTEEVEDGKEEDEEEETENSLPIPASKRASSDLSIASSEEDKLSQNACILESVSEKTERSNSEDKLNSKILNEKPTTDEPEKAVEDINEHITDAQLEAMTELHDRTAVIKENEREKRPKLENLPDTEDQETVDINSVSEGKENNIMITLETNIEHNLKSEEEKDQEKQQMFENKLIKSEEIKDTILQTVDLVSQETGEKEANIQAVDSEVGLTKEDTQEKLGEDDKTQKDVISNTSDVIGTCEAADVAQKVDEDSAEDTQSNDGKEVVEVGQKLINKPMVGPEAGGTKEVPIKEIVEMNEIEEGKNKEQAINSSENIMDINEEPGTTEGEEITESSSTEEMEVRSVVADTDQKALGSEVQDASKVTTQIDKEKKEIPVSIKKEPEVTVVSQPTEPQPVLIPSININSDSGENKEEIGSLSKTETILPPESENPKENDNDSGTGSTADTSSIDLNLSISSFLSKTKDSGSISLQETRRQKKTLKKTRKFIVDGVEVSVTTSKIVTDSDSKTEELRFLRRQELRELRFLQKEEQRAQQQLNSKLQQQREQIFRRFEQEMMSKKRQYDQEIENLEKQQKQTIERLEQEHTNRLRDEAKRIKGEQEKELSKFQNMLKNRKKEEQEFVQKQQQELDGSLKKIIQQQKAELANIERECLNNKQQLMRAREAAIWELEERHLQEKHQLLKQQLKDQYFMQRHQLLKRHEKETEQMQRYNQRLIEELKNRQTQERARLPKIQRSEAKTRMAMFKKSLRINSTATPDQDRDKIKQFAAQEEKRQKNERMAQHQKHENQMRDLQLQCEANVRELHQLQNEKCHLLVEHETQKLKELDEEHSQELKEWREKLRPRKKTLEEEFARKLQEQEVFFKMTGESECLNPSTQSRISKFYPIPSLHSTGS

SEQ ID NO: 8763 - protein, 176 aa, Homo sapiens
MAARGRRAEPQGREAPGPAGGGGGGSRWAESGSGTSPESGDEEVSGAGSSPVSGGVNLFANDGSFLELFKRKMEEEQRQRQEEPPPGPQRPDQSAAAAGPGDPKRKGGPGSTLSFVGKRRGGNKLALKTGIVAKKQKTEDEVLTSKGDAWAKYMAEVKKYKAHQCGDDDKTRPLVK

SEQ ID NO: 8764 - protein, 653 aa, Homo sapiens
MEPSGSEQLFEDPDPGGKSQDAEARKQTESEQKLSKMTHNALENINVIGQGLKHLFQHQRRRSSVSPHDVQQIQADPEPEMDLESQNACAEIDGVPTHPTALNRVLQQIRVPPKMKRGTSLHSRRGKPEAPKGSPQINRKSGQEMTAVMQSGRPRSSSTTDAPTSSAMMEIACAAAAAAAACLPGEEGTAERIERLEVSSLAQTSSAVASSTDGSIHTDSVDGTPDPQRTKAAIAHLQQKILKLTEQIKIAQTARDDNVAEYLKLANSADKQQAARIKQVFEKKNQKSAQTILQLQKKLEHYHRKLREVEQNGIPRQPKDVFRDMHQGLKDVGAKVTGFSEGVVDSVKGGFSSFSQATHSAAGAVVSKPREIASLIRNKFGSADNIPNLKDSLEEGQVDDAGKALGVISNFQSSPKYGSEEDCSSATSGSVGANSTTGGIAVGASSSKTNTLDMQSSGFDALLHEIQEIRETQARLEESFETLKEHYQRDYSLIMQTLQEERYRCERLEEQLNDLTELHQNEILNLKQELASMEEKIAYQSYERARDIQEALEACQTRISKMELQQQQQQVVQLEGLENATARNLLGKLINILLAVMAVLLVFVSTVANCVVPLMKTRNRTFSTLFLVVFIAFLWKHWDALFSYVERFFSSPR

SEQ ID NO: 8765 - protein, 474 aa, Homo sapiens
MVQRFSLRRQLSKIERLEVSSLAQTSSAVASSTDGSIHTDSVDGTPDPQRTKAAIAHLQQKILKLTEQIKIAQTARDDNVAEYLKLANSADKQQAARIKQVFEKKNQKSAQTILQLQKKLEHYHRKLREVEQNGIPRQPKDVFRDMHQGLKDVGAKVTGFSEGVVDSVKGGFSSFSQATHSAAGAVVSKPREIASLIRNKFGSADNIPNLKDSLEEGQVDDAGKALGVISNFQSSPKYGSEEDCSSATSGSVGANSTTGGIAVGASSSKTNTLDMQSSGFDALLHEIQEIRETQARLEESFETLKEHYQRDYSLIMQTLQEERYRCERLEEQLNDLTELHQNEILNLKQELASMEEKIAYQSYERARDIQEALEACQTRISKMELQQQQQQVVQLEGLENATARNLLGKLINILLAVMAVLLVFVSTVANCVVPLMKTRNRTFSTLFLVVFIAFLWKHWDALFSYVERFFSSPR

SEQ ID NO: 8766 - protein, 582 aa, Homo sapiens
MSSSLGKEKDSKEKDPKVPSAKEREKEAKASGGFGKESKEKEPKTKGKDAKDGKKDSSAAQPGVAFSVDNTIKRPNPAPGTRKKSSNAEVIKELNKCREENSMRLDLSKRSIHILPSSIKELTQLTELYLYSNKLQSLPAEVGCLVNLMTLALSENSLTSLPDSLDNLKKLRMLDLRHNKLREIPSVVYRLDSLTTLYLRFNRITTVEKDIKNLSKLSMLSIRENKIKQLPAEIGELCNLITLDVAHNQLEHLPKEIGNCTQITNLDLQHNELLDLPDTIGNLSSLSRLGLRYNRLSAIPRSLAKCSALEELNLENNNISTLPESLLSSLVKLNSLTLARNCFQLYPVGGPSQFSTIYSLNMEHNRINKIPFGIFSRAKVLSKLNMKDNQLTSLPLDFGTWTSMVELNLATNQLTKIPEDVSGLVSLEVLILSNNLLKKLPHGLGNLRKLRELDLEENKLESLPNEIAYLKDLQKLVLTNNQLTTLPRGIGHLTNLTHLGLGENLLTHLPEEIGTLENLEELYLNDNPNLHSLPFELALCSKLSIMSIENCPLSHLPPQIVAGGPSFIIQFLKMQGPYRAMV

SEQ ID NO: 8767 - protein, 536 aa, Homo sapiens
MSSSLGKEKDSKEKDPKVPSAKEREKEAKASGGFGKESKEKEPKTKGKDAKDGKKDSSAAQPGVAFSVDNTIKRPNPAPGTRKKSSNAEVIKELNKCREENSMRLDLSKRSIHILPSSIKELTQLTELYLYSNKLQSLPAEVGCLVNLMTLALSENSLTSLPDSLDNLKKLRMLDLRHNKLREIPSVVYRLDSLTTLYLRFNRITTVEKDIKNLSKLSMLSIRENKIKQLPAEIGNLSSLSRLGLRYNRLSAIPRSLAKCSALEELNLENNNISTLPESLLSSLVKLNSLTLARNCFQLYPVGGPSQFSTIYSLNMEHNRINKIPFGIFSRAKVLSKLNMKDNQLTSLPLDFGTWTSMVELNLATNQLTKIPEDVSGLVSLEVLILSNNLLKKLPHGLGNLRKLRELDLEENKLESLPNEIAYLKDLQKLVLTNNQLTTLPRGIGHLTNLTHLGLGENLLTHLPEEIGTLENLEELYLNDNPNLHSLPFELALCSKLSIMSIENCPLSHLPPQIVAGGPSFIIQFLKMQGPYRAMV

SEQ ID NO: 8768 - protein, 332 aa, Homo sapiens
MLWLFQSLLFVFCFGPGNVVSQSSLTPLMVNGILGESVTLPLEFPAGEKVNFITWLFNETSLAFIVPHETKSPEIHVTNPKQGKRLNFTQSYSLQLSNLKMEDTGSYRAQISTKTSAKLSSYTLRILRQLRNIQVTNHSQLFQNMTCELHLTCSVEDADDNVSFRWEALGNTLSSQPNLTVSWDPRISSEQDYTCIAENAVSNLSFSVSAQKLCEDVKIQYTDTKMILFMVSGICIVFGFIILLLLVLRKRRDSLSLSTQRTQGPAESARNLEYVSVSPTNNTVYASVTHSNRETEIWTPRENDTITIYSTINHSKESKPTFSRATALDNVV

SEQ ID NO: 8769 - protein, 331 aa, Homo sapiens
MLWLFQSLLFVFCFGPGNVVSQSSLTPLMVNGILGESVTLPLEFPAGEKVNFITWLFNETSLAFIVPHETKSPEIHVTNPKQGKRLNFTQSYSLQLSNLKMEDTGSYRAQISTKTSAKLSSYTLRILRQLRNIQVTNHSQLFQNMTCELHLTCSVEDADDNVSFRWEALGNTLSSQPNLTVSWDPRISSEQDYTCIAENAVSNLSFSVSAQKLCEDVKIQYTDTKMILFMVSGICIVFGFIILLLLVLRKRRDSLSLSTQRTQGPESARNLEYVSVSPTNNTVYASVTHSNRETEIWTPRENDTITIYSTINHSKESKPTFSRATALDNVV

SEQ ID NO: 8770 - protein, 221 aa, Homo sapiens
MLWLFQSLLFVFCFGPGQLRNIQVTNHSQLFQNMTCELHLTCSVEDADDNVSFRWEALGNTLSSQPNLTVSWDPRISSEQDYTCIAENAVSNLSFSVSAQKLCEDVKIQYTDTKMILFMVSGICIVFGFIILLLLVLRKRRDSLSLSTQRTQGPAESARNLEYVSVSPTNNTVYASVTHSNRETEIWTPRENDTITIYSTINHSKESKPTFSRATALDNVV

SEQ ID NO: 8771 - protein, 765 aa, Homo sapiens
MSGDHLHNDSQIEADFRLNDSHKHKDKHKDREHRHKEHKKEKDREKSKHSNSEHKDSEKKHKEKEKTKHKDGSSEKHKDKHKDRDKEKRKEEKVRASGDAKIKKEKENGFSSPPQIKDEPEDDGYFVPPKEDIKPLKRPRDEDDADYKPKKIKTEDTKKEKKRKLEEEEDGKLKKPKNKDKDKKVPEPDNKKKKPKKEEEQKWKWWEEERYPEGIKWKFLEHKGPVFAPPYEPLPENVKFYYDGKVMKLSPKAEEVATFFAKMLDHEYTTKEIFRKNFFKDWRKEMTNEEKNIITNLSKCDFTQMSQYFKAQTEARKQMSKEEKLKIKEENEKLLKEYGFCIMDNHKERIANFKIEPPGLFRGRGNHPKMGMLKRRIMPEDIIINCSKDAKVPSPPPGHKWKEVRHDNKVTWLVSWTENIQGSIKYIMLNPSSRIKGEKDWQKYETARRLKKCVDKIRNQYREDWKSKEMKVRQRAVALYFIDKLALRAGNEKEEGETADTVGCCSLRVEHINLHPELDGQEYVVEFDFLGKDSIRYYNKVPVEKRVFKNLQLFMENKQPEDDLFDRLNTGILNKHLQDLMEGLTAKVFRTYNASITLQQQLKELTAPDENIPAKILSYNRANRAVAILCNHQRAPPKTFEKSMMNLQTKIDAKKEQLADARRDLKSAKADAKVMKDAKTKKVVESKKKAVQRLEEQLMKLEVQATDREENKQIALGTSKLNYLDPRITVAWCKKWGVPIEKIYNKTQREKFAWAIDMADEDYEF

SEQ ID NO: 8772 - protein, 336 aa, Homo sapiens
MLRAGWLRGAAALALLLAARVVAAFEPITVGLAIGAASAITGYLSYNDIYCRFAECCREERPLNASALKLDLEEKLFGQHLATEVIFKALTGFRNNKNPKKPLTLSLHGWAGTGKNFVSQIVAENLHPKGLKSNFVHLFVSTLHFPHEQKIKLYQDQLQKWIRGNVSACANSVFIFDEMDKLHPGIIDAIKPFLDYYEQVDGVSYRKAIFIFLSNAGGDLITKTALDFWRAGRKREDIQLKDLEPVLSVGVFNNKHSGLWHSGLIDKNLIDYFIPFLPLEYRHVKMCVRAEMRARGSAIDEDIVTRVAEEMTFFPRDEKIYSDKGCKTVQSRLDFH

SEQ ID NO: 8773 - protein, 214 aa, Homo sapiens
MVLGGCPVSYLLLCGQAALLLGNLLLLHCVSRSHSQNATAEPELTSAGAAQPEGPGGAASWEYGDPHSPVILCSYLPDEFIECEDPVDHVGNATASQELGYGCLKFGGQAYSDVEHTSVQCHALDGIECASPRTFLRENKPCIKYTGHYFITTLLYSFFLGCFGVDRFCLGHTGTAVGKLLTLGGLGIWWFVDLILLITGGLMPSDGSNWCTVY

SEQ ID NO: 8774 - protein, 171 aa, Homo sapiens
MKKCLLPVLITCMQTAICKDRMMMIMILLVNYRPDEFIECEDPVDHVGNATASQELGYGCLKFGGQAYSDVEHTSVQCHALDGIECASPRTFLRENKPCIKYTGHYFITTLLYSFFLGCFGVDRFCLGHTGTAVGKLLTLGGLGIWWFVDLILLITGGLMPSDGSNWCTVY

SEQ ID NO: 8775 - protein, 188 aa, Homo sapiens
MNGDDAFVRRPRVGSQIPEKMQKAFDDIAKYFSEKEWEKMKASEKIIYVYMKRKYEAMTKLGFKATLPPFMRNKRVADFQGNDFDNDPNRGNQVEHPQMTFGRLQGIFPKITPEKPAEEGNDSKGVPEASGPQNNGKQLRPSGKLNTSEKVNKTSGPKRGKHAWTHRVRERKQLVIYEEISDPQEDDE

SEQ ID NO: 8776 - protein, 229 aa, Homo sapiens
MNGDDAFVRRPRVGSQIPEKMQKHPWRQVCDRGIHLVNLSPFWKVGREPASSIKALLCGRGEARAFDDIAKYFSEKEWEKMKASEKIIYVYMKRKYEAMTKLGFKATLPPFMRNKRVADFQGNDFDNDPNRGNQVEHPQMTFGRLQGIFPKITPEKPAEEGNDSKGVPEASGPQNNGKQLRPSGKLNTSEKVNKTSGPKRGKHAWTHRVRERKQLVIYEEISDPQEDDE

SEQ ID NO: 8777 - protein, 287 aa, Homo sapiens
MKDRLAELLDLSKQYDQQFPDGDDEFDSPHEDIVFETDHILESLYRDIRDIQDENQLLVADVKRLGKQNARFLTSMRRLSSIKRDTNSIAKAIKARGEVIHCKLRAMKELSEAAEAQHGPHSAVARISRAQYNALTLTFQRAMHDYNQAEMKQRDNCKIRIQRQLEIMGKEVSGDQIEDMFEQGKWDVFSENLLADVKGARAALNEIESRHRELLRLESRIRDVHELFLQMAVLVEKQADTLNVIELNVQKTVDYTGQAKAQVRKAVQYEEKNPCRTLCCFCCPCLK

SEQ ID NO: 8778 - protein, 295 aa, Homo sapiens
MELIQDTSRPPLEYVKGVPLIKYFAEALGPLQSFQARPDDLLINTYPKSGTTWVSQILDMIYQGGDLEKCNRAPIYVRVPFLEVNDPGEPSGLETLKDTPPPRLIKSHLPLALLPQTLLDQKVKVVYVARNPKDVAVSYYHFHRMEKAHPEPGTWDSFLEKFMAGEVSYGSWYQHVQEWWELSRTHPVLYLFYEDMKENPKREIQKILEFVGRSLPEETMDFMVQHTSFKEMKKNPMTNYTTVPQELMDHSISPFMRKGMAGDWKTTFTVAQNERFDADYAEKMAGCSLSFRSEL

SEQ ID NO: 8779 - protein, 197 aa, Homo sapiens
MELIQDTSRPPLEYVKGVPLIKYFAEALGPLQSFQARPDDLLINTYPKSGTTWVSQILDMIYQGGDLEKCNRAPIYVRVPFLEVNDPGEPSGLETLKDTPPPRLIKSHLPLALLPQTLLDQKVKVVYVARNPKDVAVSYYHFHRMEKAHPEPGTWDSFLEKFMAGEGGLDWRKEGVKPRGGGYNVQQPCVGAPCPLL

SEQ ID NO: 8780 - protein, 301 aa, Homo sapiens
MELIQDTSRPPLEYVKGVPLIKYFAEALGPLQSFQARPDDLLINTYPKSGTTWVSQILDMIYQGGDLEKCNRAPIYVRVPFLEVNDPGEPSGLETLKDTPPPRLIKSHLPLALLPQTLLDQKVKVVYVARNPKDVAVSYYHFHRMEKAHPEPGTWDSFLEKFMAGEVSYGSWYQHVQEWWELSRTHPVLYLFYEDMKEEPSAAQNPKREIQKILEFVGRSLPEETMDFMVQHTSFKEMKKNPMTNYTTVPQELMDHSISPFMRKGMAGDWKTTFTVAQNERFDADYAEKMAGCSLSFRSEL

SEQ ID NO: 8781 - protein, 90 aa, Homo sapiens
MMEAHFKYHGNLTGRAHFPTLATEVDTSSDKYSNLYMYVGLFLSLLAILLILLFTMLLRLKHVISPINSDSTESVPQFTDVEMQSRIPTP

SEQ ID NO: 8782 - protein, 240 aa, Homo sapiens
MSPLLFGAGLVVLNLVTSARSQKTEPLSGSGDQPLFRGADRYDFAIMIPPGGTECFWQFAHQTGYFYFSYEVQRTVGMSHDRHVAATAHNPQGFLIDTSQGVRGQINFSTQETGFYQLCLSNQHNHFGSVQVYLNFGVFYEGPETDHKQKERKQLNDTLDAIEDGTQKVQNNIFHMWRYYNFARMRKMADFFLIQSNYNYVNWWSTAQSLVIILSGILQLYFLKRLFNVPTTTDTKKPRC

SEQ ID NO: 8783 - protein, 260 aa, Homo sapiens
MAAAALRRFWSRRRAEAGDAVVAKPGVWARLGSWARALLRDYAEACRDASAEARARPGRAAVYVGLLGGAAACFTLAPSEGAFEEALLEASGTLLLLAPATRNRESEAFVQRLLWLRGRGRLRYVNLGLCSLVYEAPFDAQASLYQARCRYLQPRWTDFPGRVLDVGFVGRWWVLGAWMRDCDINDDEFLHLPAHLRVVGPQQLHSETNERLFDEKYKPVVLTDDQVDQALWEEQVLQKEKKDRLALSQAHSLVQAEAPR

SEQ ID NO: 8784 - protein, 291 aa, Homo sapiens
MDSRVSSPEKQDKENFVGVNNKRLGVCGWILFSLSFLLVIITFPISIWMCLKIIKEYERAVVFRLGRIQADKAKGPGLILVLPCIDVFVKVDLRTVTCNIPPQEILTRDSVTTQVDGVVYYRIYSAVSAVANVNDVHQATFLLAQTTLRNVLGTQTLSQILAGREEIAHSIQTLLDDATELWGIRVARVEIKDVRIPVQLQRSMAAEAEATREARAKVLAAEGEMNASKSLKSASMVLAESPIALQLRYLQTLSTVATEKNSTIVFPLPMNILEGIGGVSYDNHKKLPNKA

SEQ ID NO: 8785 - protein, 282 aa, Homo sapiens
MNSRGELVGVNNKRLGVCGWILFSLSFLLVIITFPISIWMCLKIIKEYERAVVFRLGRIQADKAKGPGLILVLPCIDVFVKVDLRTVTCNIPPQEILTRDSVTTQVDGVVYYRIYSAVSAVANVNDVHQATFLLAQTTLRNVLGTQTLSQILAGREEIAHSIQTLLDDATELWGIRVARVEIKDVRIPVQLQRSMAAEAEATREARAKVLAAEGEMNASKSLKSASMVLAESPIALQLRYLQTLSTVATEKNSTIVFPLPMNILEGIGGVSYDNHKKLPNKA

SEQ ID NO: 8786 - protein, 871 aa, Homo sapiens
MKYSCCALVLAVLGTELLGSLCSTVRSPRFRGRIQQERKNIRPNIILVLTDDQDVELGSLQVMNKTRKIMEHGGATFINAFVTTPMCCPSRSSMLTGKYVHNHNVYTNNENCSSPSWQAMHEPRTFAVYLNNTGYRTAFFGKYLNEYNGSYIPPGWREWLGLIKNSRFYNYTVCRNGIKEKHGFDYAKDYFTDLITNESINYFKMSKRMYPHRPVMMVISHAAPHGPEDSAPQFSKLYPNASQHITPSYNYAPNMDKHWIMQYTGPMLPIHMEFTNILQRKRLQTLMSVDDSVERLYNMLVETGELENTYIIYTADHGYHIGQFGLVKGKSMPYDFDIRVPFFIRGPSVEPGSIVPQIVLNIDLAPTILDIAGLDTPPDVDGKSVLKLLDPEKPGNRFRTNKKAKIWRDTFLVERGKFLRKKEESSKNIQQSNHLPKYERVKELCQQARYQTACEQPGQKWQCIEDTSGKLRIHKCKGPSDLLTVRQSTRNLYARGFHDKDKECSCRESGYRASRSQRKSQRQFLRNQGTPKYKPRFVHTRQTRSLSVEFEGEIYDINLEEEEELQVLQPRNIAKRHDEGHKGPRDLQASSGGNRGRMLADSSNAVGPPTTVRVTHKCFILPNDSIHCERELYQSARAWKDHKAYIDKEIEALQDKIKNLREVRGHLKRRKPEECSCSKQSYYNKEKGVKKQEKLKSHLHPFKEAAQEVDSKLQLFKENNRRRKKERKEKRRQRKGEECSLPGLTCFTHDNNHWQTAPFWNLGSFCACTSSNNNTYWCLRTVNETHNFLFCEFATGFLEYFDMNTDPYQLTNTVHTVERGILNQLHVQLMELRSCQGYKQCNPRPKNLDVGNKDGGSYDLHRGQLWDGWEG

SEQ ID NO: 8787 - protein, 368 aa, Homo sapiens
MQPGSSRCEEETPSLLWGLDPVFLAFAKLYIRDILDMKESRQVPGVFLYNGHPIKQVDVLGTVIGVRERDAFYSYGVDDSTGVINCICWKKLNTESVSAAPSAARELSLTSQLKKLQETIEQKTKIEIGDTIRVRGSIRTYREEREIHATTYYKVDDPVWNIQIARMLELPTIYRKVYDQPFHSSALEKEEALSNPGALDLPSLTSLLSEKAKEFLMENRVQSFYQQELEMVESLLSLANQPVIHSASSDQVNFKKDTTSKAIHSIFKNAIQLLQEKGLVFQKDDGFDNLYYVTREDKDLHRKIHRIIQQDCQKPNHMEKGCHFLHILACARLSIRPGLSEAVLQQVLELLEDQSDIVSTMEHYYTAF

SEQ ID NO: 8788 - protein, 452 aa, Homo sapiens
MAAAALRSGWCRCPRRCLGSGIQFLSSHNLPHGSTYQMRRPGGELPLSKSYSSGNRKGFLSGLLDNVKQELAKNKEMKESIKKFRDEARRLEESDVLQEARRKYKTIESETVRTSEVLRKKLGELTGTVKESLHEVSKSDLGRKIKEGVEEAAKTAKQSAESVSKGGEKLGRTAAFRALSQGVESVKKEIDDSVLGQTGPYRRPQRLRKRTEFAGDKFKEEKVFEPNEEALGVVLHKDSKWYQQWKDFKENNVVFNRFFEMKMKYDESDNAFIRASRALTDKVTDLLGGLFSKTEMSEVLTEILRVDPAFDKDRFLKQCENDIIPNVLEAMISGELDILKDWCYEATYSQLAHPIQQAKALGLQFHSRILDIDNVDLAMGKMMEQGPVLIITFQAQLVMVVRNPKGEVVEGDPDKVLRMLYVWALCRDQDELNPYAAWRLLDISASSTEQIL

SEQ ID NO: 8789 - protein, 334 aa, Homo sapiens
MLGIMAWNATCKNWLAAEAALEKYYLSIFYGIEFVVGVLGNTIVVYGYIFSLKNWNSSNIYLFNLSVSDLAFLCTLPMLIRSYANGNWIYGDVLCISNRYVLHANLYTSILFLTFISIDRYLIIKYPFREHLLQKKEFAILISLAIWVLVTLELLPILPLINPVITDNGTTCNDFASSGDPNYNLIYSMCLTLLGFLIPLFVMCFFYYKIALFLKQRNRQVATALPLEKPLNLVIMAVVIFSVLFTPYHVMRNVRIASRLGSWKQYQCTQVVINSFYIVTRPLAFLNSVINPVFYFLLGDHFRDMLMNQLRHNFKSLTSFSRWAHELLLSFREK

SEQ ID NO: 8790 - protein, 905 aa, Homo sapiens
MTTLDHVIATHQSEWVSFNEEPPFPAHSQGGTEEHLPGLSSSPDQSESSSGENHVVDGGSQDHSHSEQDDSSEKMGLISEAASPPGSPEQPPPDLASAISNWVQFEDDTPWASTSPPHQETAETALPLTMPCWTCPSFDSLGRCPLTSESSWTTHSEDTSSPSFGCSYTDLQLINAEEQTSGQASGADSTDNSSSLQEDEEVEMEAISWQASSPAMNGHPAPPVTSARFPSWVTFDDNEVSCPLPPVTSPLKPNTPPSASVIPDVPYNSMGSFKKRDRPKSTLMNFSKVQKLDISSLNRTPSVTEASPWRATNPFLNETLQDVQPSPINPFSAFFEEQERRSQNSSISSTTGKSQRDSLIVIYQDAISFDDSSKTQSHSDAVEKLKQLQIDDPDHFGSATLPDDDPVAWIELDAHPPGSARSQPRDGWPMMLRIPEKKNIMSSRHWGPIFVKLTDTGYLQLYYEQGLEKPFREFKLEICHEISEPRLQNYDENGRIHSLRIDRVTYKEKKKYQPKPAVAHTAEREQVIKLGTTNYDDFLSFIHAVQDRLMDLPVLSMDLSTVGLNYLEEEITVDVRDEFSGIVSKGDNQILQHHVLTRIHILSFLSGLAECRLGLNDILVKGNEIVLRQDIMPTTTTKWIKLHECRFHGCVDEDVFHNSRVILFNPLDACRFELMRFRTVFAEKTLPFTLRTATSVNGAEVEVQSWLRMSTGFSANRDPLTQVPCENVMIRYPVPSEWVKNFRRESVLGEKSLKAKVNRGASFGSTSVSGSEPVMRVTLGTAKYEHAFNSIVWRINRLPDKNSASGHPHCFFCHLELGSDREVPSRFANHVNVEFSMPTTSASKASVRSISVEDKTDVRKWVNYSAHYSYQVALGSIWLMLPTPFVHPTTLPLLFLLAMLTMFAW

SEQ ID NO: 8791 - protein, 920 aa, Homo sapiens
MTTLDHVIATHQSEWVSFNEEPPFPAHSQGGTEEHLPGLSSSPDQSESSSGENHVVDGGSQDHSHSEQDDSSEKMGLISEAASPPGSPEQPPPDLASAISNWVQFEDDTPWASTSPPHQETAETALPLTMPCWTCPSFDSLGRCPLTSESSWTTHSEDTSSPSFGCSYTDLQLINAEEQTSGQASGADSTDNSSSLQEDEEVEMEAISWQASSPAMNGHPAPPVTSARFPSWVTFDDNEVSCPLPPVTSPLKPNTPPSASVIPDVPYNSMGSFKKRDRPKSTLMNFSKVQKLDISSLNRTPSVTEASPWRATNPFLNETLQDVQPSPINPFSAFFEEQERRSQNSSISSTTGKSQRDSLIVIYQDAISFDDSSKTQSHSDAVEKLKQLQIDDPDHFGSATLPDDDPVAWIELDAHPPGSARSQPRDGWPMMLRIPEKKNIMSSRHWGPIFVKLTDTGYLQLYYEQGLEKPFREFKLEICHEISEPRLQNYDENGRIHSLRIDRVTYKEKKKYQPKPAVAHTAEREQVIKLGTTNYDDFLSFIHAVQDRLMDLPVLSMDLSTVGLNYLEEEITVDVRDEFSGIVSKGDNQILQHHVLTRIHILSFLSGLAECRLGLNDILVKGNEIVLRQDIMPTTTTKWIKLHECRFHGCVDEDVFHNSRVILFNPLDACRFELMRFRTVFAEKTLPFTLRTATSVNGAEVEVQSWLRMSTGFSANRDPLTQVPCENVMIRYPVPSEWVKNFRRESVLGEKSLKAKVNRGASFGSTSVSGSEPVMRVTLGTAKYEHAFNSIVWRINRLPDKNSASGHPHCFFCHLELGSDREVPSRFANHVNVEFSMPTTSASKASVRSISVEDKTDVRKWVNYSAHYSYQTTETDNLPNPLYCSCLPHTDLKRGSKRVVKIRWNASLEVPLASSIRTMV

SEQ ID NO: 8792 - protein, 134 aa, Homo sapiens
MIFSMLRKLPKVTCRDVLPEIRAICIEEIGCWMQSYSTSFLTDSYLKYIGWTLHDKHREVRVKCVKALKGLYGNRDLTARLELFTGRFKDWMVSMIVDREYSVAVEAVRLLILILKNMEGVLMDVDCESVYPIV

SEQ ID NO: 8793 - protein, 80 aa, Homo sapiens
MQHREVRVKCVKALKGLYGNRDLTARLELFTGRFKDWMVSMIVDREYSVAVEAVRLLILILKNMEGVLMDVDCESVYPIV

SEQ ID NO: 8794 - protein, 968 aa, Homo sapiens
MAFANFRRILRLSTFEKRKSREYEHVRRDLDPNEVWEIVGELGDGAFGKVYKAKNKETGALAAAKVIETKSEEELEDYIVEIEILATCDHPYIVKLLGAYYHDGKLWIMIEFCPGGAVDAIMLELDRGLTEPQIQVVCRQMLEALNFLHSKRIIHRDLKAGNVLMTLEGDIRLADFGVSAKNLKTLQKRDSFIGTPYWMAPEVVMCETMKDTPYDYKADIWSLGITLIEMAQIEPPHHELNPMRVLLKIAKSDPPTLLTPSKWSVEFRDFLKIALDKNPETRPSAAQLLEHPFVSSITSNKALRELVAEAKAEVMEEIEDGRDEGEEEDAVDAASTLENHTQNSSEVSPPSLNADKPLEESPSTPLAPSQSQDSVNEPCSQPSGDRSLQTTSPPVVAPGNENGLAVPVPLRKSRPVSMDARIQVAQEKQVAEQGGDLSPAANRSQKASQSRPNSSALETLGGEKLANGSLEPPAQAAPGPSKRDSDCSSLCTSESMDYGTNLSTDLSLNKEMGSLSIKDPKLYKKTLKRTRKFVVDGVEVSITTSKIISEDEKKDEEMRFLRRQELRELRLLQKEEHRNQTQLSNKHELQLEQMHKRFEQEINAKKKFFDTELENLERQQKQQVEKMEQDHAVRRREEARRIRLEQDRDYTRFQEQLKLMKKEVKNEVEKLPRQQRKESMKQKMEEHTQKKQLLDRDFVAKQKEDLELAMKRLTTDNRREICDKERECLMKKQELLRDREAALWEMEEHQLQERHQLVKQQLKDQYFLQRHELLRKHEKEREQMQRYNQRMIEQLKVRQQQEKARLPKIQRSEGKTRMAMYKKSLHINGGGSAAEQREKIKQFSQQEEKRQKSERLQQQQKHENQMRDMLAQCESNMSELQQLQNEKCHLLVEHETQKLKALDESHNQNLKEWRDKLRPRKKALEEDLNQKKREQEMFFKLSEEAECPNPSTPSKAAKFFPYSSADAS

SEQ ID NO: 8795 - protein, 1113 aa, Homo sapiens
MFSQVPRTPASGCYYLNSMTPEGQEMYLRFDQTTRRSPYRMSRILARHQLVTKIQQEIEAKEACDWLRAAGFPQYAQLYEDSQFPINIVAVKNDHDFLEKDLVEPLCRRLNTLNKCASMKLDVNFQRKKGDDSDEEDLCISNKWTFQRTSRRWSRVDDLYTLLPRGDRNGSPGGTGMRNTTSSESVLTDLSEPEVCSIHSESSGGSDSRSQPGQCCTDNPVMLDAPLVSSSLPQPPRDVLNHPFHPKNEKPTRARAKSFLKRMETLRGKGAHGRHKGSGRTGGLVISGPMLQQEPESFKAMQCIQIPNGDLQNSPPPACRKGLPCSGKSSGESSPSEHSSSGVSTPCLKERKCHEANKRGGMYLEDLDVLAGTALPDAGDQSRMHEFHSQENLVVHIPKDHKPGTFPKALSIESLSPTDSSNGVNWRTGSISLGREQVPGAREPRLMASCHRASRVSIYDNVPGSHLYASTGDLLDLEKDDLFPHLDDILQHVNGLQEVVDDWSKDVLPELQTHDTLVGEPGLSTFPSPNQITLDFEGNSVSEGRTTPSDVERDVTSLNESEPPGVRDRRDSGVGASLTRPNRRLRWNSFQLSHQPRPAPASPHISSQTASQLSLLQRFSLLRLTAIMEKHSMSNKHGWTWSVPKFMKRMKVPDYKDKAVFGVPLIVHVQRTGQPLPQSIQQALRYLRSNCLDQVGLFRKSGVKSRIHALRQMNENFPENVNYEDQSAYDVADMVKQFFRDLPEPLFTNKLSETFLHIYQYVSKEQRLQAVQAAILLLADENREVLQTLLCFLNDVVNLVEENQMTPMNLAVCLAPSLFHLNLLKKESSPRVIQKKYATGKPDQKDLNENLAAAQGLAHMIMECDRLFEVPHELVAQSRNSYVEAEIHVPTLEELGTQLEESGATFHTYLNHLIQGLQKEAKEKFKGWVTCSSTDNTDLAFKKVGDGNPLKLWKASVEVEAPPSVVLNRVLRERHLWDEDFVQWKVVETLDRQTEIYQYVLNSMAPHPSRDFVVLRTWKTDLPKGMCTLVSLSVEHEEAQLLGGVRAVVMDSQYLIEPCGSGKSRLTHICRIDLKGHSPEWYSKGFGHLCAAEVARIRNSFQPLIAEGPETKI

SEQ ID NO: 8796 - protein, 1105 aa, Homo sapiens
MLEPSSVLHANVNQAPLWCLVLRWCRECKDTVCGGKQKSRVNHTFQRREIEAKEACDWLRAAGFPQYAQLYEDSQFPINIVAVKNDHDFLEKDLVEPLCRRLNTLNKCASMKLDVNFQRKKGDDSDEEDLCISNKWTFQRTSRRWSRVDDLYTLLPRGDRNGSPGGTGMRNTTSSESVLTDLSEPEVCSIHSESSGGSDSRSQPGQCCTDNPVMLDAPLVSSSLPQPPRDVLNHPFHPKNEKPTRARAKSFLKRMETLRGKGAHGRHKGSGRTGGLVISGPMLQQEPESFKAMQCIQIPNGDLQNSPPPACRKGLPCSGKSSGESSPSEHSSSGVSTPCLKERKCHEANKRGGMYLEDLDVLAGTALPDAGDQSRMHEFHSQENLVVHIPKDHKPGTFPKALSIESLSPTDSSNGVNWRTGSISLGREQVPGAREPRLMASCHRASRVSIYDNVPGSHLYASTGDLLDLEKDDLFPHLDDILQHVNGLQEVVDDWSKDVLPELQTHDTLVGEPGLSTFPSPNQITLDFEGNSVSEGRTTPSDVERDVTSLNESEPPGVRDRRDSGVGASLTRPNRRLRWNSFQLSHQPRPAPASPHISSQTASQLSLLQRFSLLRLTAIMEKHSMSNKHGWTWSVPKFMKRMKVPDYKDKAVFGVPLIVHVQRTGQPLPQSIQQALRYLRSNCLDQVGLFRKSGVKSRIHALRQMNENFPENVNYEDQSAYDVADMVKQFFRDLPEPLFTNKLSETFLHIYQYVSKEQRLQAVQAAILLLADENREVLQTLLCFLNDVVNLVEENQMTPMNLAVCLAPSLFHLNLLKKESSPRVIQKKYATGKPDQKDLNENLAAAQGLAHMIMECDRLFEVPHELVAQSRNSYVEAEIHVPTLEELGTQLEESGATFHTYLNHLIQGLQKEAKEKFKGWVTCSSTDNTDLAFKKVGDGNPLKLWKASVEVEAPPSVVLNRVLRERHLWDEDFVQWKVVETLDRQTEIYQYVLNSMAPHPSRDFVVLRTWKTDLPKGMCTLVSLSVEHEEAQLLGGVRAVVMDSQYLIEPCGSGKSRLTHICRIDLKGHSPEWYSKGFGHLCAAEVARIRNSFQPLIAEGPETKI

SEQ ID NO: 8797 - protein, 995 aa, Homo sapiens
MKLDVNFQRKKGDDSDEEDLCISNKWTFQRTSRRWSRVDDLYTLLPRGDRNGSPGGTGMRNTTSSESVLTDLSEPEVCSIHSESSGGSDSRSQPGQCCTDNPVMLDAPLVSSSLPQPPRDVLNHPFHPKNEKPTRARAKSFLKRMETLRGKGAHGRHKGSGRTGGLVISGPMLQQEPESFKAMQCIQIPNGDLQNSPPPACRKGLPCSGKSSGESSPSEHSSSGVSTPCLKERKCHEANKRGGMYLEDLDVLAGTALPDAGDQSRMHEFHSQENLVVHIPKDHKPGTFPKALSIESLSPTDSSNGVNWRTGSISLGREQVPGAREPRLMASCHRASRVSIYDNVPGSHLYASTGDLLDLEKDDLFPHLDDILQHVNGLQEVVDDWSKDVLPELQTHDTLVGEPGLSTFPSPNQITLDFEGNSVSEGRTTPSDVERDVTSLNESEPPGVRDRRDSGVGASLTRPNRRLRWNSFQLSHQPRPAPASPHISSQTASQLSLLQRFSLLRLTAIMEKHSMSNKHGWTWSVPKFMKRMKVPDYKDKAVFGVPLIVHVQRTGQPLPQSIQQALRYLRSNCLDQVGLFRKSGVKSRIHALRQMNENFPENVNYEDQSAYDVADMVKQFFRDLPEPLFTNKLSETFLHIYQYVSKEQRLQAVQAAILLLADENREVLQTLLCFLNDVVNLVEENQMTPMNLAVCLAPSLFHLNLLKKESSPRVIQKKYATGKPDQKDLNENLAAAQGLAHMIMECDRLFEVPHELVAQSRNSYVEAEIHVPTLEELGTQLEESGATFHTYLNHLIQGLQKEAKEKFKGWVTCSSTDNTDLAFKKVGDGNPLKLWKASVEVEAPPSVVLNRVLRERHLWDEDFVQWKVVETLDRQTEIYQYVLNSMAPHPSRDFVVLRTWKTDLPKGMCTLVSLSVEHEEAQLLGGVRAVVMDSQYLIEPCGSGKSRLTHICRIDLKGHSPEWYSKGFGHLCAAEVARIRNSFQPLIAEGPETKI

SEQ ID NO: 8798 - protein, 1078 aa, Homo sapiens
MSTGTQPKTKVLSDKRPKERVEIEAKEACDWLRAAGFPQYAQLYEDSQFPINIVAVKNDHDFLEKDLVEPLCRRLNTLNKCASMKLDVNFQRKKGDDSDEEDLCISNKWTFQRTSRRWSRVDDLYTLLPRGDRNGSPGGTGMRNTTSSESVLTDLSEPEVCSIHSESSGGSDSRSQPGQCCTDNPVMLDAPLVSSSLPQPPRDVLNHPFHPKNEKPTRARAKSFLKRMETLRGKGAHGRHKGSGRTGGLVISGPMLQQEPESFKAMQCIQIPNGDLQNSPPPACRKGLPCSGKSSGESSPSEHSSSGVSTPCLKERKCHEANKRGGMYLEDLDVLAGTALPDAGDQSRMHEFHSQENLVVHIPKDHKPGTFPKALSIESLSPTDSSNGVNWRTGSISLGREQVPGAREPRLMASCHRASRVSIYDNVPGSHLYASTGDLLDLEKDDLFPHLDDILQHVNGLQEVVDDWSKDVLPELQTHDTLVGEPGLSTFPSPNQITLDFEGNSVSEGRTTPSDVERDVTSLNESEPPGVRDRRDSGVGASLTRPNRRLRWNSFQLSHQPRPAPASPHISSQTASQLSLLQRFSLLRLTAIMEKHSMSNKHGWTWSVPKFMKRMKVPDYKDKAVFGVPLIVHVQRTGQPLPQSIQQALRYLRSNCLDQVGLFRKSGVKSRIHALRQMNENFPENVNYEDQSAYDVADMVKQFFRDLPEPLFTNKLSETFLHIYQYVSKEQRLQAVQAAILLLADENREVLQTLLCFLNDVVNLVEENQMTPMNLAVCLAPSLFHLNLLKKESSPRVIQKKYATGKPDQKDLNENLAAAQGLAHMIMECDRLFEVPHELVAQSRNSYVEAEIHVPTLEELGTQLEESGATFHTYLNHLIQGLQKEAKEKFKGWVTCSSTDNTDLAFKKVGDGNPLKLWKASVEVEAPPSVVLNRVLRERHLWDEDFVQWKVVETLDRQTEIYQYVLNSMAPHPSRDFVVLRTWKTDLPKGMCTLVSLSVEHEEAQLLGGVRAVVMDSQYLIEPCGSGKSRLTHICRIDLKGHSPEWYSKGFGHLCAAEVARIRNSFQPLIAEGPETKI

SEQ ID NO: 8799 - protein, 687 aa, Homo sapiens
MLEPSSVLHANVNQAPLWCLVLRWCRECKDTVCGGKQKSRVNHTFQRREIEAKEACDWLRAAGFPQYAQLYEDSQFPINIVAVKNDHDFLEKDLVEPLCRRLNTLNKCASMKLDVNFQRKKGDDSDEEDLCISNKWTFQRTSRRWSRVDDLYTLLPRGDRNGSPGGTGMRNTTSSESVLTDLSEPEVCSIHSESSGGSDSRSQPGQCCTDNPVMLDAPLVSSSLPQPPRDVLNHPFHPKNEKPTRARAKSFLKRMETLRGKGAHGRHKGSGRTGGLVISGPMLQQEPESFKAMQCIQIPNGDLQNSPPPACRKGLPCSGKSSGESSPSEHSSSGVSTPCLKERKCHEANKRGGMYLEDLDVLAGTALPDAGDQSRMHEFHSQENLVVHIPKDHKPGTFPKALSIESLSPTDSSNGVNWRTGSISLGREQVPGAREPRLMASCHRASRVSIYDNVPGSHLYASTGDLLDLEKDDLFPHLDDILQHVNGLQEVVDDWSKDVLPELQTHDTLVGEPGLSTFPSPNQITLDFEGNSVSEGRTTPSDVERDVTSLNESEPPGVRDRRDSGVGASLTRPNRRLRWNSFQLSHQPRPAPASPHISSQTASQLSLLQRFSLLRLTAIMEKHSMSNKHGWTWSVPKFMKRMKVPDYKDKAVFGVPLIVHVQRTGQPLPQSIQQALRYLRSNCLDQE

SEQ ID NO: 8800 - protein, 1158 aa, Homo sapiens
MATRKDTEEEQVVPSEEDEANVRAVQAHYLRSPSPSQYSMVSDAETESIFMEPIHLSSAIAAKQIINEELKPPGVRADAECPGMLESAEQLLVEDLYNRVREKMDDTSLYNTPCVLDLQRALVQDRQEAPWNEVDEVWPNVFIAEKSVAVNKGRLKRLGITHILNAAHGTGVYTGPEFYTGLEIQYLGVEVDDFPEVDISQHFRKASEFLDEALLTYRGKVLVSSEMGISRSAVLVVAYLMIFHNMAILEALMTVRKKRAIYPNEGFLKQLRELNEKLMEEREEDYGREGGSAEAEEGEGTGSMLGARVHALTVEEEDDSASHLSGSSLGKATQASKPLTLIDEEEEEKLYEQWKKGQGLLSDKVPQDGGGWRSASSGQGGEELEDEDVERIIQEWQSRNERYQAEGYRRWGREEEKEEESDAGSSVGRRRRTLSESSAWESVSSHDIWVLKQQLELNRPDHGRRRRADSMSSESTWDAWNERLLEIEKEASRRYHAKSKREEAADRSSEAGSRVREDDEDSVGSEASSFYNFCSRNKDKLTALERWKIKRIQFGFHKKDLGAGDSSGEPGAEEAVGEKNPSDVSLTAYQAWKLKHQKKVGSENKEEVVELSKGEDSALAKKRQRRLELLERSRQTLEESQSMASWEADSSTASGSIPLSAFWSADPSVSADGDTTSVLSTQSHRSHLSQAASNIAGCSTSNPTTPLPNLPVGPGDTISIASIQNWIANVVSETLAQKQNEMLLLSRSPSVASMKAVPAASCLGDDQVSMLSGHSSSSLGGCLLPQSQARPSSDMQSVLSCNTTLSSPAESCRSKVRGTSKPIFSLFADNVDLKELGRKEKEMQMELREKMSEYKMEKLASDNKRSSLFKKKKVKEDEDDGVGDGDEDTDSAIGSFRYSSRSNSQKPETDTCSSLAVCDHYASGSRVGKEMDSSINKWLSGLRTEEKPPFQSDWSGSSRGKYTRSSLLRETESKSSSYKFSKSQSEEQDTSSYHEANGNSVRSTSRFSSSSTREGREMHKFSRSTYNETSSSREESPEPYFFRRTPESSEREESPEPQRPNWARSRDWEDVEESSKSDFSEFGAKRKFTQSFMRSEEEGEKERTENREEGRFASGRRSQYRRSTDREEEEEMDDEAIIAAWRRRQEETRTKLQKRRED

SEQ ID NO: 8801 - protein, 361 aa, Homo sapiens
MATLARLQARSSTVGNQYYFRNSVVDPFRKKENDAAVKIQSWFRGCQVRAYIRHLNRIVTIIQKWWRSFLGRKQYQLTVQVAYYTMMMNLYNAMAVRIQRRWRGYRVRKYLFNYYYLKEYLKVVSETNDAIRKALEEFAEMKEREEKKANLEREEKKRDYQARKMHYLLSTKQIPGIYNSPFRKEPDPWELQLQKAKPLTHRRPKVKQKDSTSLTDWLACTSARSFPRSEILPPINRKQCQGPFRDITEVLEQRYRPLEPTLRVAEPIDELKLAREELRREEWLQNVNDNMFLPFSSYHKNEKYIPSMHLSSKYGPISYKEQFRSENPKKWICDKDFQTVLPSFELFSKYGKLYSKAGQIV

SEQ ID NO: 8802 - protein, 569 aa, Homo sapiens
MDAGSSRSLENAVNRIYHDQLVPKINTSKKMSTLAHPPNILEMSQEIKKNCGGKQVEITLERTKMTKGIKEKQSNDLEKAAFKRKAEGEEKPTRKKQAKITELDNQLITMPLPHIPLKNIMDVEMKLVYIDEMGVRYEFVESFMSTGSQPTCQAAEIVDPLSVHNFSFLPQIDKWLQVALKDASSCYRQKKYALAAGQFRTALELCSKGAVLGEPFDAPAEDIASVASFIETKLVTCYLRMRKPDLALNHAHRSIVLNPAYFRNHLRQATVFRCLERYSEAARSAMIADYMFWLGGGREESISKLIKLYWQAMIEEAITRAESFSVMYTPFATKIRADKIEKVKDAFTKTHPAYAEYMYTDLQALHMLPQTVDWSSFPPQQYLLTLGFKNKDDGKFLEKISSRKLPIFTEHKTPFGLTREDTVRQMETMGKRILPILDFIRSTQLNGSFPASSGVMEKLQYASLLSQLQRVKEQSQVINQAMAELATIPYLQDISQQEAELLQSLMADAMDTLEGRRNNNERVWNMIQKVGQIEDFLYQLEDSFLKTKKLRTARRQKTKMKRLQTVQQR

SEQ ID NO: 8803 - protein, 342 aa, Homo sapiens
MAAVALMPPPLLLLLLLASPPAASAPSARDPFAPQLGDTQNCQLRCRDRDLGPQPSQAGLEGASESPYDRAVLISACERGCRLFSICRFVARSSKPNATQTECEAACVEAYVKEAEQQACSHGCWSQPAEPEPEQKRKVLEAPSGALSLLDLFSTLCNDLVNSAQGFVSSTWTYYLQTDNGKVVVFQTQPIVESLGFQGGRLQRVEVTWRGSHPEALEVHVDPVGPLDKVRKAKIRVKTSSKAKVESEEPQDNDFLSCMSRRSGLPRWILACCLFLSVLVMLWLSCSTLVTAPGQHLKFQPLTLEQHKGFMMEPDWPLYPPPSHACEDSLPPYKLKLDLTKL

SEQ ID NO: 8804 - protein, 438 aa, Homo sapiens
MDVEIQDTPGKISISKRSILSGTVENIDYPHYCDLLRKMNMPFVKGLENRHNYGRFEKKCNPAFLKFHPYPPSVLPDYHLHDPYPPPYGPHYPLFPLRDDVTLGDSCSGFMSPGGDADLNPGIGRTIPTLVDFSDVKPQHRVPRPDTGFQTTIKRQKILSEELQQNRRWNSREVPDISIRARLGGWTSPLKVTPLQPHHEGRSLSHIFTFDEEATCTDEGEPLVQTNKKCNAKDSFYKSSTQKAYEDVPWDKMLPPKLVPEETTLEKTADPISQCFTLKRYKGVPAITQMVGELWDRFQTRSFLAPVKPINFVSSSSRSKYIPLYTGHVQSTNADDVDNPLGDIASLAKQRYSKPLYTNTSRAANIPGYTGKVHFTATHPANSNIPSTTPSPDSELHRVFQKEMAVDLFRHQAPLSRLVTTVRPYNPFNKKDKETIDY

SEQ ID NO: 8805 - protein, 98 aa, Homo sapiens
MASINRTIEIMKKHGVSKQHLLEEINKKRESNCLVERSNQVSLLRVQKRHFPDAYQSFTDTTTKEPVPNSGRSSWIKLSLLAHMERKHFPPKNNAIFG

SEQ ID NO: 8806 - protein, 4700 aa, Homo sapiens
MANVQVAVRVRPLSKRETKEGGRIIVEVDGKVAKIRNLKVDNRPDGFGDSREKVMAFGFDYCYWSVNPEDPQYASQDVVFQDLGMEVLSGVAKGYNICLFAYGQTGSGKTYTMLGTPASVGLTPRICEGLFVREKDCASLPSSCRIKVSFLEIYNERVRDLLKQSGQKKSYTLRVREHPEMGPYVQGLSQHVVTNYKQVIQLLEEGIANRITAATHVHEASSRSHAIFTIHYTQAILENNLPSEMASKINLVDLAGSERADPSYCKDRIAEGANINKSLVTLGIVISTLAQNSQVFSSCQSLNSSVSNGGDSGILSSPSGTSSGGAPSRRQSYIPYRDSVLTWLLKDSLGGNSKTIMVATVSPAHTSYSETMSTLRYASSAKNIINKPRVNEDANLKLIRELREEIERLKALLLSFELRNFSSLSDENLKELVLQNELKIDQLTKDWTQKWNDWQALMEHYSVDINRRRAGVVIDSSLPHLMALEDDVLSTGVVLYHLKEGTTKIGRIDSDQEQDIVLQGQWIERDHCTITSACGVVVLRPARGARCTVNGREVTASCRLTQGAVITLGKAQKFRFNHPAEAAVLRQRRQVGEAAAGRGSLEWLDLDGDLAASRLGLSPLLWKERRALEEQCDEDHQTPRDGETSHRAQIQQQQSYVEDLRHQILAEEIRAAKELEFDQAWISQQIKENQQCLLREETWLASLQQQQQEDQVAEKELEASVALDAWLQTDPEIQPSPFVQSQKRVVHLQLLRRHTLRAAERNVRRKKVSFQLERIIKKQRLLEAQKRLEKLTTLCWLQDDSTQEPPYQVLSPDATVPRPPCRSKLTSCSSLSPQRLCSKHMPQLHSIFLSWDPSTTLPPRPDPTHQTSEKTSSEEHLPQAASYPARTGCLRKNGLHSSGHGQPCTARAALARKGASAPDACLTMSPNSVGIQEMEMGVKQPHQMVSQGLASLRKSANKLKPRHEPKIFTSTTQTRGAKGLADPSHTQAGWRKEGNLGTHKAAKGASCNSLYPHGPRQTAGHGKAVKTFWTEYKPPSPSRASKRHQRVLATRVRNITKKSSHLPLGSPLKRQQNTRDPDTMVPLTDFSPVMDHSREKDNDLSDTDSNYSLDSLSCVYAKALIEPLKPEERKWDFPEPENSESDDSQLSEDSLAEKRYQSPKNRLGGNRPTNNRGQPRTRTRASVRGFTAASDSDLLAQTHRSFSLDSLIDAEEELGEDQQEEPFPGSADEIPTETFWHLEDSSLPVMDQEAICRLGPINYRTAARLDAVLPMSSSFYLDPQFQPHCELQPHCELQPHCELQPHCEQAESQVEPSYSEQADSLQGMQLSRESPLMSMDSWFSCDSKINPSSPPGIVGSLCPSPDMQEFHSCKGERPGYWPNTEELKPSDAETVLPYSSKLHQGSTELLCSARDEHTASAADTSRLSLWGIQRLIQPGADGTFQGRCIPDMTQQGSSEASHNSSVSNVLAASATTLTHVGSTHERDWSALQQKYLLELSCPVLEAIGAPKPAYPYLEEDSGSLAQASSKGGDTLLPVGPRVSSNLNLNNFPVHLSRIRRLRAEKEQDSLNAKLEGVSDFFSTSEKEASYDETYSADLESLSASRSTNAQVFATENAIPDSMTEACEVKQNNLEECLQSCRKPGLMTSSDEDFFQKNACHSNVTTATKADHWSQGWAPLRKNSAVQPGQLSPDSHYPLEEEKTDCQESSKEAVRRHINVSFALPSGPELYLHSAPWNPLSSSLQPPLLETFYVTKSRDALTETALEIPACREVRVPSPPPREAWGFGHNHQALQGAYLKNNLPVLLQNQNSKIASSQQVTAEIPVDLNTREVIRESGKCPGNITEESHDSVYSSVTQNRHFLPSTSTKVCEFENQVVILNKKHSFPALEGGEVTAQSCCGASSDSTESGKSLLFRESEAREEEELDQNTVLRQTINVSLEKDMPGESAVSLKSRSVDRRVSSPVMVAQGGGPTPKWEGKNETGLLEKGLRPKDSSEEFKLPGTKPAYERFQLVACPQERNPSECKSQEMLNPNREPSGKKQNKRVNNTDEMARLIRSVMQLENGILEIESKQNKQVHASHTPGTDKELVFQDQKEQEKTDHAFRPDSSGNPLPSKDQPSSPRQTDDTVFRDSEAGAMEVNSIGNHPQVQKITPNPFRSREGVRESEPVREHTHPAGSDRPARDICDSLGKHTTCREFTNTSLHPQRMKALARALPLQPRLERSSKNNGQFVKASASLKGQPWGLGSLEELETVKGFQESQVAEHVSSSNQEEPKAQGKVEEMPMQRGGSLQEENKVTQKFPSLSQLCRDTFFRQETVSPLLSRTEFCTAPLHQDLSNTLPLNSPRWPRRCLHVPVALGISSLDCVLDLTMLKIHNSPLVTGVEHQDQSTETRSHSPEGNVRGRSSEAHTAWCGSVRSMAMGSHSQSGVPESIPLGTEDRISASTSPQDHGKDLRITLLGFSTSEDFASEAEVAVQKEIRVSSLNKVSSQPEKRVSFSLEEDSDQASKPRQKAEKETEDVGLTSGVSLAPVSLPRVPSPEPRLLEPSDHASMCLAILEEIRQAKAQRKQLHDFVARGTVLSYCETLLEPECSSRVAGRPQCKQIDQSSSDQTRNEGEAPGFHVASLSAEAGQIDLLPDERKVQATSLSADSFESLPNTETDREPWDPVQAFSHAAPAQDRKRRTGELRQFAGASEPFICHSSSSEIIEKKKDATRTPSSADPLAPDSPRSSAPVEEVRRVVSKKVVAALPSQAPYDDPRVTLHELSQSVPQETAEGIPPGSQDSSPEHQEPRTLDTTYGEVSDNLLVTAQGEKTAHFESQSVTCDVQNSTSASGPKQDHVQCPEASTGFEEGRASPKQDTILPGALTRVALEAPTQQCVQCKESVGSGLTEVCRAGSKHSRPIPLPDQRPSANPGGIGEEAPCRHPREALDGPVFSRNPEGSRTLSPSRGKESRTLPCRQPCSSQPVATHAYSSHSSTLLCFRDGDLGKEPFKAAPHTIHPPCVVPSRAYEMDETGEISRGPDVHLTHGLEPKDVNREFRLTESSTCEPSTVAAVLSRAQGCRSPSAPDVRTGSFSHSATDGSVGLIGVPEKKVAEKQASTELEAASFPAGMYSEPLRQFRDSSVGDQNAQVCQTNPEPPATTQGPHTLDLSEGSAESKLVVEPQHECLENTTRCFLEKPQFSTELRDHNRLDSQAKFVARLKHTCSPQEDSPWQEEEQHRDQASGGGEGFAQGVNPLPDEDGLDGCQILDAGREEVAVAKPPVSKILSQGFKDPATVSLRQNETPQPAAQRSGHLYTGREQPAPNHRGSLPVTTIFSGPKHSRSSPTPQFSVVGSSRSLQELNLSVEPPSPTDEDTQGPNRLWNPHLRGYSSGKSVARTSLQAEDSNQKASSRLDDGTTDHRHLKPATPPYPMPSTLSHMPTPDFTTSWMSGTLEQAQQGKREKLGVQVRPENWCSQMDKGMLHFGSSDISPYALPWRPEEPARISWKQYMSGSAVDVSCSQKPQGLTLSNVARCSSMDNGLEDQNSPFHSHLSTYANICDLSTTHSSTENAQGSNEAWEVFRGSSSIALGDPHIPTSPEGVAPTSGHDRRPQFRGPSGEADCLRSKPPLAKGSAAGPVDEIMLLYPSEAGCPVGQTRTNTFEQGTQTLGSRRHWSSTDISFAQPEASAVSAFDLASWTSMHNLSLHLSQLLHSTSELLGSLSQPDVARREQNTKRDIPDKAPQALMMDGSTQTTVDEGSQTDLTLPTLCLQTSEAEPQGANVILEGLGSDTSTVSQEEGDVPGVPQKREAEETAQKMAQLLYLQEESTPYKPQSPSIPSSHLRFQKAPVGQHLPSVSPSVSDAFLPPSSQPEESYCLVVSSPSPSSPHSPGLFPSTSEYPGDSRVQKKLGPTSALFVDRASSPILTLSASTQEPGLSPGSLTLSAPSTHPVEGHQKLDSSPDPVDAPRTPMDNYSQTTDELGGSQRGRSSLQRSNGRSFLELHSPHSPQQSPKLQFSFLGQHPQQLQPRTTIGVQSRLLPPPLRHRSQRLGNSFVPEKVASPEHCPLSGREPSQWQSRTENGGESSASPGEPQRTLDRPSSWGGLQHLSPCPVSELTDTAGLRGSALGLPQACQPEELLCFSCQMCMAPEHQHHSLRDLPVHNKFSNWCGVQKGSPGGLDMTEEELGASGDLSSEKQEQSPPQPPNDHSQDSEWSKREQIPLQVGAQNLSLSVELTEAKLHHGFGEADALLQVLQSGTGEALAADEPVTSTWKELYARQKKAIETLRRERAERLGNFCRTRSLSPQKQLSLLPNKDLFIWDLDLPSRRREYLQQLRKDVVETTRSPESVSRSAHTPSDIELMLQDYQQAHEEAKVEIARARDQLRERTEQEKLRIHQKIISQLLKEEDKLHTLANSSSLCTSSNGSLSSGMTSGYNSSPALSGQLQFPENMGHTNLPDSRDVWIGDERGGHSAVRKNSAYSHRASLGSCCCSPSSLSSLGTCFSSSYQDLAKHVVDTSMADVMAACSDNLHNLFSCQATAGWNYQGEEQAVQLYYKVFSPTRHGFLGAGVVSQPLSRVWAAVSDPTVWPLYYKPIQTARLHQRVTNSISLVYLVCNTTLCALKQPRDFCCVCVEAKEGHLSVMAAQSVYDTSMPRPSRKMVRGEILPSAWILQPITVEGKEVTRVIYLAQVELGAPGFPPQLLSSFIKRQPLVIARLASFLGR

SEQ ID NO: 8807 - protein, 292 aa, Homo sapiens
MANVQVAVRVRPLSKRETKEGGRIIVEVDGKVAKIRNLKVDNRPDGFGDSREKVMAFGFDYCYWSVNPEDPQYASQDVVFQDLGMEVLSGVAKGYNICLFAYGQTGSGKTYTMLGTPASVGLTPRICEGLFVREKDCASLPSSCRIKVSFLEIYNERVRDLLKQSGQKKSYTLRVREHPEMGPYVQGLSQHVVTNYKQVIQLLEEGIANRITAATHVHEASSRSHAIFTIHYTQAILENNLPSEMASKINLVDLAGSERADPSYCKDRIAEGANINKSLVTLGIVISTLGIF

SEQ ID NO: 8808 - protein, 323 aa, Homo sapiens
MEVLSGVAKGYNICLFAYGQTGSGKTYTMLGTPASVGLTPRICEGLFVREKDCASLPSSCRIKVSFLEIYNERVRDLLKQSGQKKSYTLRVREHPEMGPYVQGLSQHVVTNYKQVIQLLEEGIANRITAATHVHEASSRSHAIFTIHYTQAILENNLPSEMASKINLVDLAGSERADPSYCKDRIAEGANINKSLVTLGIVISTLAQNSQVFSSCQSLNSSVSNGGDSGILSSPSGTSSGGAPSRRQSYIPYRDSVLTWLLKDSLGGNSKTIMVASEWDARAGPVLGLVLYLRERAMAPVSGMPELDLCWDWYSISEKGPWPQ

SEQ ID NO: 8809 - protein, 1023 aa, Homo sapiens
MTLNNCASMKLEVHFQSKQNEDSEEEEQCTISSHWAFQQESKCWSPMGSSDLLAPPSPGLPATSSCESVLTELSATSLPVITVSLPPEPADLPLPGRAPSSSDRPLLSPTQGQEGPQDKAKKRHRNRSFLKHLESLRRKEKSGSQQAEPKHSPATSEKVSKASSFRSCRGFLSAGFYRAKNWAATSAGGSGANTRKAWEAWPVASFRHPQWTHRGDCLVHVPGDHKPGTFPRSLSIESLCPEDGHRLADWQPGRRWGCEGRRGSCGSTGSHASTYDNLPELYPAEPVMVGAEAEDEDDEESGGSYAHLDDILQHVWGLQQRVELWSRAMYPDLGPGDEEEEEATSSVEIATVEVKCQAEALSQMEVPAHGESPAWAQAEVQPAVLAPAQAPAEAEPVAQEEAEAPAPAPAPAPAQDSEQEAHSGGEPTFASSLSVEEGHSISDTVASSSELDSSGNSMNEAEAAGPLAGLQASMPRERRDSGVGASLTRPCRKLRWHSFQNSHRPSLNSESLEINRQFAGQINLLHKGSLLRLTAFMEKYTVPHKQGWVWSMPKFMRRNKTPDYRGQHVFGVPPLIHVQRTGQPLPQSIQQAMRYLRSQCLDQVGIFRKSGVKSRIQNLRQMNETSPDNVCYEGQSAYDVADLLKQYFRDLPEPIFTSKLTTTFLQIYQLLPKDQWLAAAQAATLLLPDENREVLQTLLYFLSDIASAEENQMTAGNLAVCLAPSIFHLNVSKKDSPSPRIKSKRSLIGRPGPRDLSDNMAATQGLSHMISDCKKLFQVPQDMVLQLCSSYSAAELSPPGPALAELRQAQAAGVSLSLYMEENIQDLLRDAAERFKGWMSVPGPQHTELACRKAPDGHPLRLWKASTEVAAPPAVVLHRVLRERALWDEDLLRAQVLEALMPGVELYHYVTDSMAPHPCRDFVVLRMWRSDLPRGGCLLVSQSLDPEQPVPESGVRALMLTSQYLMEPCGLGRSRLTHICRADLRGRSPDWYNKVFGHLCAMEVAKIRDSFPTLQAAGPETKL

SEQ ID NO: 8810 - protein, 1103 aa, Homo sapiens
MPLLDVFWSCFRKVKCFPLLQVKKNAEAEAKRACEWLQATGFPQYVQLFEEGSFPLDIGSVKKNHGFLDEDSLGALCRRLMTLNNCASMKLEVHFQSKQNEDSEEEEQCTISSHWAFQQESKCWSPMGSSDLLAPPSPGLPATSSCESVLTELSATSLPVITVSLPPEPADLPLPGRAPSSSDRPLLSPTQGQEGPQDKAKKRHRNRSFLKHLESLRRKEKSGSQQAEPKHSPATSEKVSKASSFRSCRGFLSAGFYRAKNWAATSAGGSGANTRKAWEAWPVASFRHPQWTHRGDCLVHVPGDHKPGTFPRSLSIESLCPEDGHRLADWQPGRRWGCEGRRGSCGSTGSHASTYDNLPELYPAEPVMVGAEAEDEDDEESGGSYAHLDDILQHVWGLQQRVELWSRAMYPDLGPGDEEEEEATSSVEIATVEVKCQAEALSQMEVPAHGESPAWAQAEVQPAVLAPAQAPAEAEPVAQEEAEAPAPAPAPAPAQDSEQEAHSGGEPTFASSLSVEEGHSISDTVASSSELDSSGNSMNEAEAAGPLAGLQASMPRERRDSGVGASLTRPCRKLRWHSFQNSHRPSLNSESLEINRQFAGQINLLHKGSLLRLTAFMEKYTVPHKQGWVWSMPKFMRRNKTPDYRGQHVFGVPPLIHVQRTGQPLPQSIQQAMRYLRSQCLDQVGIFRKSGVKSRIQNLRQMNETSPDNVCYEGQSAYDVADLLKQYFRDLPEPIFTSKLTTTFLQIYQLLPKDQWLAAAQAATLLLPDENREVLQTLLYFLSDIASAEENQMTAGNLAVCLAPSIFHLNVSKKDSPSPRIKSKRSLIGRPGPRDLSDNMAATQGLSHMISDCKKLFQVPQDMVLQLCSSYSAAELSPPGPALAELRQAQAAGVSLSLYMEENIQDLLRDAAERFKGWMSVPGPQHTELACRKAPDGHPLRLWKASTEVAAPPAVVLHRVLRERALWDEDLLRAQVLEALMPGVELYHYVTDSMAPHPCRDFVVLRMWRSDLPRGGCLLVSQSLDPEQPVPESGVRALMLTSQYLMEPCGLGRSRLTHICRADLRGRSPDWYNKVFGHLCAMEVAKIRDSFPTLQAAGPETKL

SEQ ID NO: 8811 - protein, 249 aa, Homo sapiens
MSPPTVPPMGVDGVSAYLMKKRHTHRKQRRKPTFLTRRNIVGCRIQHGWKEGNEPVEQWKGTVLEQVSVKPTLYIIKYDGKDSVYGLELHRDKRVLALEILPERVPTPRIDSRLADSLIGKAVEHVFEGEHGTKDEWKGMVLARAPVMDTWFYITYEKDPVLYMYTLLDDYKDGDLRIIPDSNYYFPTAEQEPGEVVDSLVGKQVEHAKDDGSKRTGIFIHQVVAKPSVYFIKFDDDIHIYVYGLVKTP

SEQ ID NO: 8812 - protein, 591 aa, Homo sapiens
MSLLTNYEGLRHQIERLVRENEELKKLVRLIRENHELKSAIKTQAGGLGISGFTSGLGEATAGLSSRQNNGVFLPPSPAVANERVLEEVGIMALAPLAEMLTSLQPSATPGSLMSPLTGTLSTLLSGPAPTSQSSPLTSFLTSPIAGPLTGTLASSLGLPSTGTLTPSSLVAGPVAMSQSSPLIAPVMGTVAVSLSSPLLSSTATPPGVSQNLLANPMSNLVLPEAPRLRLAEPLRGGPTGPQSPACVVPTATTKVPLSTEPPQSTQDPEPLSMAFAGAPLQTSTPIGAMGTPAPKTAFSFNTSDTQAQPSAAQEQVVPASVPTSPTTSPTVTVLASAPALAPQVATSYTPSSTTHIAQGAPHPPSRMHNSPTQNLPVPHCPPHNAHSPPRTSSSPASVNDSRGPRTTEPSTKSMMEVERKLAHRKTSKFPENPRESKQLAWERLVGEIAFQLDRRILSSIFPERVRLYGFTVSNIPEKIIQASLNPSDHKLDEKLCQRLTQRYVSVMNRLQSLGYNGRVHPALTEQLVNAYGILRERPELAASEGGPYTVDFLQRVVVETVHPGMLADALLLLSCLSQLAHDDGKPMFIW

SEQ ID NO: 8813 - protein, 441 aa, Homo sapiens
MSLLTNYEGLRHQIERLVRENEELKKLVRLIRENHELKSAIKTQAGGLGISGFTSGLGEATAGLSSRQNNGVFLPPSPAVANERVLEEVGIMALAPLAEMLTSLQPSATPGSLMSPLTGTLSTLLSGPAPTSQSSPLTSFLTSPIAGPLTGTLASSLGLPSTGTLTPSSLVAGPVAMSQSSPLIAPVMGTVAVSLSSPLLSSTATPPGVSQNLLANPMSNLVLPEAPRLRLAEPLRGGPTGPQSPACVVPTATTKVPLSTEPPQSTQDPEPLSMAFAGAPLQTSTPIGAMGTPAPKTAFSFNTSDTQAQPSAAQEQVVPASVPTSPTTSPTVTVLASAPALAPQVATSYTPSSTTHIAQGAPHPPSRMHNSPTQNLPVPHCPPHNAHSPPRTSSSPASVNDSRGPRTTEPSTKSMMEVERKLAHRKTSKFPENPRGFPEPQ

SEQ ID NO: 8814 - protein, 331 aa, Homo sapiens
MENPSPAAALGKALCALLLATLGAAGQPLGGESICSARALAKYSITFTGKWSQTAFPKQYPLFRPPAQWSSLLGAAHSSDYSMWRKNQYVSNGLRDFAERGEAWALMKEIEAAGEALQSVHEVFSAPAVPSGTGQTSAELEVQRRHSLVSFVVRIVPSPDWFVGVDSLDLCDGDRWREQAALDLYPYDAGTDSGFTFSSPNFATIPQDTVTEITSSSPSHPANSFYYPRLKALPPIARVTLVRLRQSPRAFIPPAPVLPSRDNEIVDSASVPETPLDCEVSLWSSWGLCGGHCGRLGTKSRTRYVRVQPANNGSPCPELEEEAECVPDNCV

SEQ ID NO: 8815 - protein, 494 aa, Homo sapiens
MAWPNVFQRGSLLSQFSHHHVVVFLLTFFSYSLLHASRKTFSNVKVSISEQWTPSAFNTSVELPVEIWSSNHLFPSAEKATLFLGTLDTIFLFSYAVGLFISGIVGDRLNLRWVLSFGMCSSALVVFVFGALTEWLRFYNKWLYCCLWIVNGLLQSTGWPCVVAVMGNWFGKAGRGVVFGLWSACASVGNILGACLASSVLQYGYEYAFLVTASVQFAGGIVIFFGLLVSPEEIGLSGIEAEENFEEDSHRPLINGGENEDEYEPNYSIQDDSSVAQVKAISFYQACCLPGVIPYSLAYACLKLVNYSFFFWLPFYLSNNFGWKEAEADKLSIWYDVGGIIGGTLQGFISDVLQKRAPVLALSLLLAVGSLIGYSRSPNDKSINALLMTVTGFFIGGPSNMISSAISADLGRQELIQRSSEALATVTGIVDGSGSIGAAVGQYLVSLIRDKLGWMWVFYFFILMTSCTIVFISPLIVREIFSLVLRRQAHILRE

SEQ ID NO: 8816 - protein, 478 aa, Homo sapiens
MAWPNVFQRGSLLSQFSHHHVVVFLLTFFSYSLLHASRKTFSNVKVSISEQWTPSAFNTSVELPVEIWSSNHLFPSAEKATLFLGTLDTIFLFSYAVGLFISGIVGDRLNLRWVLSFGMCSSALVVFVFGALTEWLRFYNKWLYCCLWIVNGLLQSTGWPCVVAVMGNWFGKAGRGVVFGLWSACASVGNILGACLASSVLQYGYEYAFLVTASVQFAGGIVIFFGLLVSPEEIGLSGIEAEENFEEDSHRPLINGGENEDEYEPNYSIQDDSSVAQVKAISFYQACCLPGVIPYSLAYACLKLVNYSFFFWLPFYLSNNFGWKEAEADKLSIWYDVGGIIGGTLQGFISDVLQKRAPVLALSLLLAVGSLIGYSRFFIGGPSNMISSAISADLGRQELIQRSSEALATVTGIVDGSGSIGAAVGQYLVSLIRDKLGWMWVFYFFILMTSCTIVFISPLIVREIFSLVLRRQAHILRE

SEQ ID NO: 8817 - protein, 443 aa, Homo sapiens
MAWPNVFQRGSLLSQFSHHHVVVFLLTFFSYSLLHASRKTFSNVKVSISEQWTPSAFNTSVELPVEIWSSNHLFPSAEKATLFLGTLDTIFLFSYAVGLFISGIVGDRLNLRWVLSFGMCSSALVVFVFGALTEWLRFYNKWLYCCLWIVNGLLQSTGWPCVVAVMGNWFGKAGRGVVFGLWSACASVGNILGACLASSVLQYGYEYAFLVTASVQFAGGIVIFFGLLVSPEEIGLSGIEAEENFEEDSHRPLINGGENEDEYEPNYSIQDDSSVAQVKAISFYQACCLPGVIPYSLAYACLKLVNYSFFFWLPFYLSNNFGWKEAEADKLSIWYDVGGIIVFSVSDPGQARMDVGFLLFHSHDKLYNCVYLAINSEGNILSRAKETGSHIEGVTGARETERTMSATSGPLGLRVCPNLGLSRSSSLILDCQASLNTASHLRC

SEQ ID NO: 8818 - protein, 631 aa, Homo sapiens
MAAQRGMPSSAVRVLEEALGMGLTAAGDARDTADAVAAEGAYYLEQVTITEASEDDYEYEEIPDDNFSIPEGEEDLAKAIQMAQEQATDTEILERKTVLPSKHAVPEVIEDFLCNFLIKMGMTRTLDCFQSEWYELIQKGVTELRTVGNVPDVYTQIMLLENENKNLKKDLKHYKQAADKAREDLLKIQKERDFHRMHHKRIVQEKNKLINDLKGLKLHYASYEPTIRVLHEKHHTLLKEKMLTSLERDKVVGQISGLQETLKKLQRGHSYHGPQIKVDHSREKENAPEGPTQKGLREAREQNKCKTKMKGNTKDSEFPIDMQPNPNLNVSKESLSPAKFDYKLKNIFRLHELPVSCVSMQPHKDILVSCGEDRLWKVLGLPKCNVLLTGFGHTDWLSDCCFHPSGDKLATSSGDTTVKLWDLCKGDCILTFEGHSRAVWSCTWHSCGNFVASSSLDKTSKIWDVNSERCRCTLYGHTDSVNSIEFFPFSNTLLTSSADKTLSIWDARTGICEQSLYGHMHSINDAIFDPRGHMIASCDACGVTKLWDFRKLLPIVSIDIGPSPGNEVNFDSSGRVLAQASGNGVIHLLDLKSGEIHKLMGHENEAHTVVFSHDGEILFSGGSDGTVRTWS

SEQ ID NO: 8819 - protein, 443 aa, Homo sapiens
MTILASQKVKKIWQKQFRWPKNRLQILKFCKAREDLLKIQKERDFHRMHHKRIVQEKNKLINDLKGLKLHYASYEPTIRVLHEKHHTLLKEKMLTSLERDKVVGQISGLQETLKKLQRGHSYHGPQIKVDHSREKENAPEGPTQKGLREAREQNKCKTKMKGNTKDSEFPIDMQPNPNLNVSKESLSPAKFDYKLKNIFRLHELPVSCVSMQPHKDILVSCGEDRLWKVLGLPKCNVLLTGFGHTDWLSDCCFHPSGDKLATSSGDTTVKLWDLCKGDCILTFEGHSRAVWSCTWHSCGNFVASSSLDKTSKIWDVNSERCRCTLYGHTDSVNSIEFFPFSNTLLTSSADKTLSIWDARTGICEQSLYGHMHSINDAIFDPRGHMIASCDACGVTKLWDFRKLLPIVSIDIGPSPGNEVNFDSSENTTYLYRPGAQIYYFQLS

SEQ ID NO: 8820 - protein, 251 aa, Homo sapiens
MGVGTKARASHWRRLLSLGATPEEPLLDFKIPDDNFSIPEGEEDLAKAIQMAQEQATDTEILERKTVLPSKHAVPEVIEDFLCNFLIKMGMTRTLDCFQSEWYELIQKGVTELRTVGNVPDVYTQIMLLENENKNLKKDLKHYKQAADKAREDLLKIQKERDFHRMHHKRIVQEKNKLINDLKGLKLHYASYEPTIRVLHEKHHTLLKEKMLTSLERDKVVGQISGLQETLKKLQRGHSYHGPQIKGKGCM

SEQ ID NO: 8821 - protein, 183 aa, Homo sapiens
MAAQRGMPSSAVRVLEEALGMGLTAAGDARDTADAVAAEGAYYLEQVTITEASEDDYEYEEIPDDNFSIPEGEEDLAKAIQMAQEQATDTEILERKTVLPSKHAVPEVIEDFLCNFLIKMGMTRTLDCFQSEWYELIQKGVTELRTVGNVPDVYTQIMLLENENKNLKKDLKHYKQAAEYVIF

SEQ ID NO: 8822 - protein, 347 aa, Homo sapiens
MAAQRGMPSSAVRVLEEALGMGLTAAGDARDTADAVAAEGAYYLEQVTITEASEDDYEYEEIPDDNFSIPEGEEDLAKAIQMAQEQATDTEILERKTVLPSKHAVPEVIEDFLCNFLIKMGMTRTLDCFQSEWYELIQKGVTELRTVGNVPDVYTQIMLLENENKNLKKDLKHYKQAADKAREDLLKIQKERDFHRMHHKRIVQEKNKLINDLKGLKLHYASYEPTIRVLHEKHHTLLKEKMLTSLERDKVVGQISGLQETLKKLQRGHSYHGPQIKVDHSREKENAPEGPTQKGLREAREQNKCKTKMKGNTKQWTGNSQTWNKTVPLQDTIGRRQENNSAHQHID

SEQ ID NO: 8823 - protein, 638 aa, Homo sapiens
MLDFFTIFSKGGLVLWCFQGVSDSCTGPVNALIRSVLLQERGGNNSFTHEALTLKYKLDNQFELVFVVGFQKILTLTYVDKLIDDVHRLFRDKYRTEIQQQSALSLLNGTFDFQNDFLRLLREAEESSKIRAPTTMKKFEDSEKAKKPVRSMIETRGEKPKEKAKNSKKKGAKKEGSDGPLATSKPVPAEKSGLPVGPENGVELSKEELIRRKREEFIQKHGRGMEKSNKSTKSDAPKEKGKKAPRVWELGGCANKEVLDYSTPTTNGTPEAALSEDINLIRGTGSGGQLQDLDCSSSDDEGAAQNSTKPSATKGTLGGMFGMLKGLVGSKSLSREDMESVLDKMRDHLIAKNVAADIAVQLCESVANKLEGKVMGTFSTVTSTVKQALQESLVQILQPQRRVDMLRDIMDAQRRQRPYVVTFCGVNGVGKSTNLAKISFWLLENGFSVLIAACDTFRAGAVEQLRTHTRRLSALHPPEKHGGRTMVQLFEKGYGKDAAGIAMEAIAFARNQGFDVVLVDTAGRMQDNAPLMTALAKLITVNTPDLVLFVGEALVGNEAVDQLVKFNRALADHSMAQTPRLIDGIVLTKFDTIDDKVGAAISMTYITSKPIVFVGTGQTYCDLRSLNAKAVVAALMKA

SEQ ID NO: 8824 - protein, 610 aa, Homo sapiens
MLDFFTIFSKGGLVLWCFQGVSDSCTGPVNALIRSVLLQVGFQKILTLTYVDKLIDDVHRLFRDKYRTEIQQQSALSLLNGTFDFQNDFLRLLREAEESSKIRAPTTMKKFEDSEKAKKPVRSMIETRGEKPKEKAKNSKKKGAKKEGSDGPLATSKPVPAEKSGLPVGPENGVELSKEELIRRKREEFIQKHGRGMEKSNKSTKSDAPKEKGKKAPRVWELGGCANKEVLDYSTPTTNGTPEAALSEDINLIRGTGSGGQLQDLDCSSSDDEGAAQNSTKPSATKGTLGGMFGMLKGLVGSKSLSREDMESVLDKMRDHLIAKNVAADIAVQLCESVANKLEGKVMGTFSTVTSTVKQALQESLVQILQPQRRVDMLRDIMDAQRRQRPYVVTFCGVNGVGKSTNLAKISFWLLENGFSVLIAACDTFRAGAVEQLRTHTRRLSALHPPEKHGGRTMVQLFEKGYGKDAAGIAMEAIAFARNQGFDVVLVDTAGRMQDNAPLMTALAKLITVNTPDLVLFVGEALVGNEAVDQLVKFNRALADHSMAQTPRLIDGIVLTKFDTIDDKVGAAISMTYITSKPIVFVGTGQTYCDLRSLNAKAVVAALMKA

SEQ ID NO: 8825 - protein, 1027 aa, Homo sapiens
MRAALWTLGLGPLLLNLWAVPIGGPGALRLAYRHSTCDGVVLVRHHGAWGYVCNQEWTLAEASVVCRQLGCGPAVGAPKYVPLPGEMAQPWLHNVSCRGNESSLWECSLGSWCQSPCPHAWVVVALCSNGTFRELRLVKGRSPCAGLPEIRNVNGVDRLCVLHVEEAMVFCRELGCGPVLQAPRRDVGVVRKYLACRGTEPTIRSCRLDNNFRSGCDLRLDAEVVCSGHTEARLVGGEHPCAGRLEVTWGTVCDAALDLATAHVVCRELQCGAVVSTPEGARFGRGSGPVWTEAFRCAGNESLLFHCPRGRGSQCGHGHDAGLRCSEFRMVNGSSSCEGRVEFQVQGSWAPLCATHWDIADATVLCHQLNCGNAVAAPGGGHFGDGDAAIWPDAFHCEGTESYLWNCPVSTLGAPACAPGNTASAVCSGLAHALRLREGQSRCDGRVEVSLDGVWGRVLDDAWDLRGAGVVCRQLGCRGAQQAYDAPAPSRGSVQVALSRVRCLGTETRLTQCNVSATLQEPAGTSRDAGVVCSGEVGTASPMARRHGIPGALTLSLHREPQGAAGRGAGALHGGAWGTVCDDAWDLRDAHVVCRQLGCGRALSALGAAHFGAGAGRIWLDELGCQGHESALWQCPSAGWGRHDWRHKEDAGVFCSESVALRLRGGTCCCAGWLDVFYNGTWGAMCSNALKDLSLSIICKQLGCGVWGVGLAGEQALPLCGHRDRLGGQHRVPQAAQLHSVAMPFPPMAPALLRPSRAGLSEDRPQAAGEPLNCSSWLGCPEEGALRVRGGEDRCSGRVELWHAGSWGTVCDDGWDLADAEVVCRQLGCGRAVAALGAAAFGPGSGPVWLDEVGCRGSEASLWGCPAERWGRGDRAHEEDAGVRCWEPGPGPPLPAAPFRTFWVVSVVLGSLLGLLLLGLMAFLILPRVTQAMQRGLGRSEVSPGEAIYDVIGEMPPAGLYEEIMEAEAVLQDEEDGSVVKVDTEAAVSGEVSNLLEGQSIRAEGGHSRPVSQGYDEAAFPLEEMTL

SEQ ID NO: 8826 - protein, 232 aa, Homo sapiens
MRAALWTLGLGPLLLNLWAVPIGGPGALRLAYRHSTCDGVVLVRHHGAWGYVCNQEWTLAEASVVCRQLGCGPAVGAPKYVPLPGEMAQPWLHNVSCRGNESSLWECSLGSWCQSPCPHAWVVVALCSNGTFRELRLVKGRSPCAGLPEIRNVNGVDRLCVLHVEEAMVFCRELGCGPVLQAPRRDVGVVRKYLACRGTEPTIRSCRLDNNFRSGCDLRLDAEVVCSGEAAT

SEQ ID NO: 8827 - protein, 649 aa, Homo sapiens
MRAALWTLGLGPLLLNLWAVPIGGPGALRLAYRHSTCDGVVLVRHHGAWGYVCNQEWTLAEASVVCRQLGCGPAVGAPKYVPLPGEMAQPWLHNVSCRGNESSLWECSLGSWCQSPCPHAWVVVALCSNGTFRELRLVKGRSPCAGLPEIRNVNGVDRLCVLHVEEAMVFCRELGCGPVLQAPRRDVGVVRKYLACRGTEPTIRSCRLDNNFRSGCDLRLDAEVVCSEFRMVNGSSSCEGRVEFQVQGSWAPLCATHWDIADATVLCHQLNCGNAVAAPGGGHFGDGDAAIWPDAFHCEGTESYLWNCPVSTLGAPACAPGNTASAVCSGLAHALRLREGQSRCDGRVEVSLDGVWGRVLDDAWDLRGAGVVCRQLGCRGAQQAYDAPAPSRGSVQVALSRVRCLGTETRLTQCNVSATLQEPAGTSRDAGVVCSGEVGTASPMARRHGIPGALTLSLHREPQGAAGRGAGALHGGAWGTVCDDAWDLRDAHVVCRQLGCGRALSALGAAHFGAGAGRIWLDELGCQGHESALWQCPSAGWGRHDWRHKEDAGVFCSGLGRSEVSPGEAIYDVIGEMPPAGLYEEIMEAEAVLQDEEDGSVVKVDTEAAVSGEVSNLLEGQSIRAEGGHSRPVSQGYDEAAFPLEEMTL

SEQ ID NO: 8828 - protein, 502 aa, Homo sapiens
MSCPVPACCALLLVLGLCRARPRNALLLLADDGGFESGAYNNSAIATPHLDALARRSLLFRNAFTSVSSCSPSRASLLTGLPQHQNGMYGLHQDVHHFNSFDKVRSLPLLLSQAGVRTGIIGKKHVGPETVYPFDFAYTEENGSVLQVGRNITRIKLLVRKFLQTQDDRPFFLYVAFHDPHRCGHSQPQYGTFCEKFGNGESGMGRIPDWTPQAYDPLDVLVPYFVPNTPAARADLAAQYTTVGRMDQGVGLVLQELRDAGVLNDTLVIFTSDNGIPFPSGRTNLYWPGTAEPLLVSSPEHPKRWGQVSEAYVSLLDLTPTILDWFSIPYPSYAIFGSKTIHLTGRSLLPALEAEPLWATVFGSQSHHEVTMSYPMRSVQHRHFRLVHNLNFKMPFPIDQDFYVSPTFQDLLNRTTAGQPTGWYKDLRHYYYRARWELYDRSRDPHETQNLATDPRFAQLLEMLRDQLAKWQWETHDPWVCAPDGVLEEKLSPQCQPLHNEL

SEQ ID NO: 8829 - protein, 72 aa, Homo sapiens
MSYQQQQCKQPCQPPPVCPTPKCPEPCPPPKCPEPCPPPKCPQPCPPQQCQQKYPPVTPSPPCQPKYPPKSK

SEQ ID NO: 8830 - protein, 89 aa, Homo sapiens
MSSQQQKQPCTPPPQLQQQQVKQPCQPPPQEPCIPKTKEPCHPKVPEPCHPKVPEPCQPKVPEPCHPKVPEPCPSIVTPAPAQQKTKQK

SEQ ID NO: 8831 - protein, 392 aa, Homo sapiens
MSTRESFNPESYELDKSFRLTRFTELKGTGCKVPQDVLQKLLESLQENHFQEDEQFLGAVMPRLGIGMDTCVIPLRHGGLSLVQTTDYIYPIVDDPYMMGRIACANVLSDLYAMGVTECDNMLMLLGVSNKMTDRERDKVMPLIIQGFKDAAEEAGTSVTGGQTVLNPWIVLGGVATTVCQPNEFIMPDNAVPGDVLVLTKPLGTQVAVAVHQWLDIPEKWNKIKLVVTQEDVELAYQEAMMNMARLNRTAAGLMHTFNAHAATDITGFGILGHAQNLAKQQRNEVSFVIHNLPVLAKMAAVSKACGNMFGLMHGTCPETSGGLLICLPREQAARFCAEIKSPKYGEGHQAWIIGIVEKGNRTARIIDKPRIIEVAPQVATQNVNPTPGATS

SEQ ID NO: 8832 - protein, 321 aa, Homo sapiens
MSTRESFNPESYELDKSFRLTRFTELKGTGCKVPQDVLQKLLESLQENHFQEDEQFLGAVMPRLGIGMDTCVIPLRHGGLSLVQTTDYIYPIVDDPYMMGRIACANVLSDLYAMGVTECDNMLMLLGVSNKMTDRERDKVMPLIIQGFKDAAEEAGTSVTGGQTVLNPWIVLGGVATTVCQPNEFIMPDNAVPGDVLVLTKPLGTQVAVAVHQWLDIPEKWNKIKLVVTQEDVELAYQEAMMNMARLNRTGGLLICLPREQAARFCAEIKSPKYGEGHQAWIIGIVEKGNRTARIIDKPRIIEVAPQVATQNVNPTPGATS

SEQ ID NO: 8833 - protein, 325 aa, Homo sapiens
MDTCVIPLRHGGLSLVQTTDYIYPIVDDPYMMGRIACANVLSDLYAMGVTECDNMLMLLGVSNKMTDRERDKVMPLIIQGFKDAAEEAGTSVTGGQTVLNPWIVLGGVATTVCQPNEFIMPDNAVPGDVLVLTKPLGTQVAVAVHQWLDIPEKWNKIKLVVTQEDVELAYQEAMMNMARLNRTAAGLMHTFNAHAATDITGFGILGHAQNLAKQQRNEVSFVIHNLPVLAKMAAVSKACGNMFGLMHGTCPETSGGLLICLPREQAARFCAEIKSPKYGEGHQAWIIGIVEKGNRTARIIDKPRIIEVAPQVATQNVNPTPGATS

SEQ ID NO: 8834 - protein, 324 aa, Homo sapiens
MSTRESFNPESYELDKSFRLTRFTELKGTGCKVPQDVLQKLLESLQENHFQEDEQFLGAVMPRLGIGMDTCVIPLRHGGLSLVQTTDYIYPIVDDPYMMGRIACANVLSDLYAMGVTECDNMLMLLGVSNKMTDRERDKVMPLIIQGFKDAAEEAGTSVTGGQTVLNPWIVLGGVATTVCQPNEFIMPDNAVPGDVLVLTKPLGTQVAVAVHQWLDIPEKWNKIKLVVTQEDVELAYQEAMMNMARLNRTAAGLMHTFNAHAATDITGFGILGHAQNLAKQQRNEVSFVIHNLPVLAKMAAVSKACGNMFGLMHGTCPETSDVQ

SEQ ID NO: 8835 - protein, 258 aa, Homo sapiens
MKTPNAQEAEGQQTRAAAGRATGSANMTKKKVSQKKQRGRPSSQPRRNIVGCRISHGWKEGDEPITQWKGTVLDQVPINPSLYLVKYDGIDCVYGLELHRDERVLSLKILSDRVASSHISDANLANTIIGKAVEHMFEGEHGSKDEWRGMVLAQAPIMKAWFYITYEKDPVLYMYQLLDDYKEGDLRIMPESSESPPTEREPGGVVDGLIGKHVEYTKEDGSKRIGMVIHQVEAKPSVYFIKFDDDFHIYVYDLVKKS

SEQ ID NO: 8836 - protein, 384 aa, Homo sapiens
MAEQTYSWAYSLVDSSQVSTFLISILLIVYGSFRSLNMDFENQDKEKDSNSSSGSFNGNSTNNSIQTIDSTQALFLPIGASVSLLVMFFFFDSVQVVFTICTAVLATIAFAFLLLPMCQYLTRPCSPQNKISFGCCGRFTAAELLSFSLSVMLVLIWVLTGHWLLMDALAMGLCVAMIAFVRLPSLKVSCLLLSGLLIYDVFWVFFSAYIFNSNVMVKVATQPADNPLDVLSRKLHLGPNVGRDVPRLSLPGKLVFPSSTGSHFSMLGIGDIVMPGLLLCFVLRYDNYKKQASGDSCGAPGPANISGRMQKVSYFHCTLIGYFVGLLTATVASRIHRAAQPALLYLVPFTLLPLLTMAYLKGDLRRMWSEPFHSKSSSSRFLEV

SEQ ID NO: 8837 - protein, 169 aa, Homo sapiens
MVKVATQPADNPLDVLSRKLHLGPNVGRDVPRLSLPGKLVFPSSTGSHFSMLGIGDIVMPGLLLCFVLRYDNYKKQASGDSCGAPGPANISGRMQKVSYFHCTLIGYFVGLLTATVASRIHRAAQPALLYLVPFTLLPLLTMAYLKGDLRRMWSEPFHSKSSSSRFLEV

SEQ ID NO: 8838 - protein, 1822 aa, Homo sapiens
MSEILCQWLNKELKVSRTVSPKSFAKAFSSGYLLGEVLHKFELQDDFSEFLDSRVSSAKLNNFSRLEPTLNLLGVQFDQNVAHGIITEKPGVATKLLYQLYIALQKKKKSGLTGVEMQTMQRLTNLRLQNMKSDTFQERLRHMIPRQTDFNLMRITYRFQEKYKHVKEDLAHLHFEKLERFQKLKEEQRCFDIEKQYLNRRRQNEIMAKIQAAIIQIPKPASNRTLKALEAQKMMKKKKEAEDVADEIKKFEALIKKDLQAKESASKTSLDTAGQTTTDLLNTYSDDEYIKKIQKRLEEDAFAREQREKRRRKLLMDQLIAHEAQEEAYREEQLINRLMRQSQQERRIAVQLMHVRHEKEVLWQNRIFREKQHEERRLKDFQDALDREAALAKQAKIDFEEQFLKEKRFHDQIAVERAQARYEKHYSVCAEILDQIVDLSTKVADYRMLTNNLIPYKLMHDWKELFFNAKPIYEQASVKTLPANPSREQLTELEKRDLLDTNDYEEYKNMVGEWALPEEMVDNLPPSNNCILGHILHRLAEKSLPPRAESTTPELPSFAVKGCLLGKTLSGKTTILRSLQKDFPIQILSIDTLVQEAIQAFHDNEKVSEVLPIQKNDEEDALPVLQEEIKESQDPQHVFSAGPVSDEVLPETEGETMLSANADKTPKAEEVKSSDSFLKLTTRAQLGAKSEQLLKKGKSIPDVLLVDIIVNAINEIPVNQDCILDGFPMTLNQAQLLEEALTGCNRNLTEVERKKAQKSTLAIDPATSKEIPLPSPAFDFVILLDVSDTSSMSRMNDIIAEELSYKTAHEDISQRVAAENQDKDGDQNLRDQIQHRIIGFLDNWPLLEQWFSEPENILIKINAEIDKESLCEKVKEILTTEIAKKKNKVEKKLEEKEAEKKAAASLAELPLPTPPPAPPPEPEKEKEIHQSHVASKTPTAKGKPQSEAPHGKQESLQEGKGKKGETALKRKGSPKGKSSGGKVPVKKSPADSTDTSPVAIVPQPPKPGSEEWVYVNEPVPEEMPLFLVPYWELIENSYINTIKTVLRHLREDQHTVLAYLYEIRTSFQEFLKRPDHKQDFVAQWQADFNSLPDDLWDDEETKAELHQRVNDLRDRLWDICDARKEEAEQERLDIINESWLQDTLGMTMNHFFSLMQAELNRFQDTKRLLQDYYWGMESKIPVEDNKRFTRIPLVQLDSKDNSESQLRIPLVPRISISLETVTPKPKTKSVLKGKMDNSLENVESNFEADEKLVMDTWQQASLAVSHMVAAEIHQRLMEEEKENQPADPKEKSPQMGANKKVKKEPPKKKQEDKKPKGKSPPMAEATPVIVTTEEIAEIKRKNELRVKIKEEHLAALQFEEIATQFRLELIKTKALALLEDLVTKVVDVYKLMEKWLGERYLNEMASTEKLTDVARYHIETSTKIQNELYLSQEDFFINGNIKVFPDPPPSIRPPPVEKEEDGTLTIEQLDSLRDQFLDMAPKGIIGNKAFTDILIDLVTLNLGTNNFPSNWMHLTQPELQELTSLLTVNSEFVDWRKFLLVTSMPWPIPLEEELLETLQKFKAVDKEQLGTITFEQYMQAGLWFTGDEDIKIPENPLEPLPFNRQEHLIEFFFRLFADYEKDPPQLDYTQMLLYFACHPDTVEGVYRALSVAVGTHVFQQVKASIPSAEKTSSTDAGPAEEFPEPEENAAREERKLKDDTEKREQKDEEIPENANNEKMSMETLLKVFKGGSEAQDSNRFASHLKIENIYAEGFIKTFQDLGAKNLEPIEVAVLLKHPFIQDLISNYSDYKFPDIKIILQRSEHVQGSDGERSPSRHTEEKK

SEQ ID NO: 8839 - protein, 1818 aa, Homo sapiens
MSEILCQWLNKELKVSRTVSPKSFAKAFSSGYLLGEVLHKFELQDDFSEFLDSRVSSAKLNNFSRLEPTLNLLGVQFDQNVAHGIITEKPGVATKLLYQLYIALQKKKKSGLTGVEMQTMQRLTNLRLQNMKSDTFQERLRHMIPRQTDFNLMRITYRFQEKYKHVKEDLAHLHFEKLERFQKLKEEQRCFDIEKQYLNRRRQNEIMAKIQAAIIQIPKPASNRTLKALEAQKMMKKKKEAEDVADEIKKFEALIKKDLQAKESASKTSLDTAGQTTTDLLNTYSDDEYIKKIQKRLEEDAFAREQREKRRRKLLMDQLIAHEAQEEAYREEQLINRLMRQSQQERRIAVQLMHVRHEKEVLWQNRIFREKQHEERRLKDFQDALDREAALAKQAKIDFEEQFLKEKRFHDQIAVERAQARYEKHYSVCAEILDQIVDLSTKVADYRMLTNNLIPYKLMHDWKELFFNAKPIYEQASVKTLPANPSREQLTELEKRDLLDTNDYEEYKNMVGEWALPEEMVDNLPPSNNCILGHILHRLAEKSLPPRAESTTPELPSFAVKGCLLGKTLSGKTTILRSLQKDFPIQILSIDTLVQEAIQAFHDNEKVSEVLPIQKNDEEDALPVLQEEIKESQDPQHVFSAGPVSDEVLPETEGANADKTPKAEEVKSSDSFLKLTTRAQLGAKSEQLLKKGKSIPDVLLVDIIVNAINEIPVNQDCILDGFPMTLNQAQLLEEALTGCNRNLTEVERKKAQKSTLAIDPATSKEIPLPSPAFDFVILLDVSDTSSMSRMNDIIAEELSYKTAHEDISQRVAAENQDKDGDQNLRDQIQHRIIGFLDNWPLLEQWFSEPENILIKINAEIDKESLCEKVKEILTTEIAKKKNKVEKKLEEKEAEKKAAASLAELPLPTPPPAPPPEPEKEKEIHQSHVASKTPTAKGKPQSEAPHGKQESLQEGKGKKGETALKRKGSPKGKSSGGKVPVKKSPADSTDTSPVAIVPQPPKPGSEEWVYVNEPVPEEMPLFLVPYWELIENSYINTIKTVLRHLREDQHTVLAYLYEIRTSFQEFLKRPDHKQDFVAQWQADFNSLPDDLWDDEETKAELHQRVNDLRDRLWDICDARKEEAEQERLDIINESWLQDTLGMTMNHFFSLMQAELNRFQDTKRLLQDYYWGMESKIPVEDNKRFTRIPLVQLDSKDNSESQLRIPLVPRISISLETVTPKPKTKSVLKGKMDNSLENVESNFEADEKLVMDTWQQASLAVSHMVAAEIHQRLMEEEKENQPADPKEKSPQMGANKKVKKEPPKKKQEDKKPKGKSPPMAEATPVIVTTEEIAEIKRKNELRVKIKEEHLAALQFEEIATQFRLELIKTKALALLEDLVTKVVDVYKLMEKWLGERYLNEMASTEKLTDVARYHIETSTKIQNELYLSQEDFFINGNIKVFPDPPPSIRPPPVEKEEDGTLTIEQLDSLRDQFLDMAPKGIIGNKAFTDILIDLVTLNLGTNNFPSNWMHLTQPELQELTSLLTVNSEFVDWRKFLLVTSMPWPIPLEEELLETLQKFKAVDKEQLGTITFEQYMQAGLWFTGDEDIKIPENPLEPLPFNRQEHLIEFFFRLFADYEKDPPQLDYTQMLLYFACHPDTVEGVYRALSVAVGTHVFQQVKASIPSAEKTSSTDAGPAEEFPEPEENAAREERKLKDDTEKREQKDEEIPENANNEKMSMETLLKVFKGGSEAQDSNRFASHLKIENIYAEGFIKTFQDLGAKNLEPIEVAVLLKHPFIQDLISNYSDYKFPVHIIYVVEMIVCAKGWAPLPSGKQCARWRN

SEQ ID NO: 8840 - protein, 514 aa, Homo sapiens
MSEILCQWLNKELKVSRTVSPKSFAKAFSSGYLLGEVLHKFELQDDFSEFLDSRVSSAKLNNFSRLEPTLNLLGVQFDQNVAHGIITEKPGVATKLLYQLYIALQKKKKSGLTGVEMQTMQRLTNLRLQNMKSDTFQERLRHMIPRQTDFNLMRITYRFQEKYKHVKEDLAHLHFEKLERFQKLKEEQRCFDIEKQYLNRRRQNEIMAKIQAAIIQIPKPASNRTLKALEAQKMMKKKKEAEDVADEIKKFEALIKKDLQAKESASKTSLDTAGQTTTDLLNTYSDDEYIKKIQKRLEEDAFAREQREKRRRKLLMDQLIAHEAQEEAYREEQLINRLMRQSQQERRIAVQLMHVRHEKEVLWQNRIFREKQHEERRLKDFQDALDREAALAKQAKIDFEEQFLKEKRFHDQIAVERAQARYEKHYSVCAEILDQIVDLSTKVADYRMLTNNLIPYKLMHDWKELFFNAKPIYEQASVKTLPANPSREQLTELEKRDLLDTNDYEEYKVPTDMK

SEQ ID NO: 8841 - protein, 619 aa, Homo sapiens
MPSQIGDRKWLHGLQAALQNFLKGYPAIVRQLHSAGRGKSDTSQKKPKELLESLLQADIVKFAHFLLDVMNVLSILSCVNKNRNSSIADIFATLESMLEMLQMYQTRLGPKERMVDSATHFHGNCLRGKENISAVRNIVLTHLIKRLQGCFRDASQNVVRATVIGSFKLWPTKINQEFGEKEVSILTAHYEPVLEAANVKLSEVDTEWSMLKLEIYARFQNIRKLTWDFVNSIYLHKYPNILTLVDLVLTLPASSAEAEHGFSQMKWTKSHMHAKIKAESIIGNKAFTDILIDLVTLNLGTNNFPSNWMHLTQPELQELTSLLTVNSEFVDWRKFLLVTSMPWPIPLEEELLETLQKFKAVDKEQLGTITFEQYMQAGLWFTGDEDIKIPENPLEPLPFNRQEHLIEFFFRLFADYEKDPPQLDYTQMLLYFACHPDTVEGVYRALSVAVGTHVFQQVKASIPSAEKTSSTDAGPAEEFPEPEENAAREERKLKDDTEKREQKDEEIPENANNEKMSMETLLKVFKGGSEAQDSNRFASHLKIENIYAEGFIKTFQDLGAKNLEPIEVAVLLKHPFIQDLISNYSDYKFPDIKIILQRSEHVQGSDGERSPSRHTEEKK

SEQ ID NO: 8842 - protein, 221 aa, Homo sapiens
MEAGGFLDSLIYGACVVFTLGMFSAGLSDLRHMRMTRSVDNVQFLPFLTTEVNNLGWLSYGALKGDGILIVVNTVGAALQTLYILAYLHYCPRKRVVLLQTATLLGVLLLGYGYFWLLVPNPEARLQQLGLFCSVFTISMYLSPLADLAKVIQTKSTQCLSYPLTIATLLTSASWCLYGFRLRDPYIMVSNFPGIVTSFIRFWLFWKYPQEQDRNYWLLQT

SEQ ID NO: 8843 - protein, 166 aa, Homo sapiens
MRGLHPWHVLRRPLGPQAHANDPECGQRPVPALSHHGSQRVVLLQTATLLGVLLLGYGYFWLLVPNPEARLQQLGLFCSVFTISMYLSPLADLAKVIQTKSTQCLSYPLTIATLLTSASWCLYGFRLRDPYIMVSNFPGIVTSFIRFWLFWKYPQEQDRNYWLLQT

SEQ ID NO: 8844 - protein, 167 aa, Homo sapiens
MEAGGFLDSLIYGACVVFTLGMFSAGLSDLRHMRMTRSVDNVQFLPFLTTEVNNLGWLSYGALKGDGILIVVNTVGAALQTLYILAYLHYCPRKAKVIQTKSTQCLSYPLTIATLLTSASWCLYGFRLRDPYIMVSNFPGIVTSFIRFWLFWKYPQEQDRNYWLLQT

SEQ ID NO: 8845 - protein, 425 aa, Homo sapiens
MASGQFVNKLQEEVICPICLDILQKPVTIDCGHNFCLKCITQIGETSCGFFKCPLCKTSVRKNAIRFNSLLRNLVEKIQALQASEVQSKRKEATCPRHQEMFHYFCEDDGKFLCFVCRESKDHKSHNVSLIEEAAQNYQGQIQEQIQVLQQKEKETVQVKAQGVHRVDVFTDQVEHEKQRILTEFELLHQVLEEEKNFLLSRIYWLGHEGTEAGKHYVASTEPQLNDLKKLVDSLKTKQNMPPRQLLEDIKVVLCRSEEFQFLNPTPVPLELEKKLSEAKSRHDSITGSLKKFKDQLQADRKKDENRFFKSMNKNDMKSWGLLQKNNHKMNKTSEPGSSSAGGRTTSGPPNHHSSAPSHSLFRASSAGKVTFPVCLLASYDEISGQGASSQDTKTFDVALSEELHAALSEWLTAIRAWFCEVPSS

SEQ ID NO: 8846 - protein, 267 aa, Homo sapiens
MASGQFVNKLQEEVICPICLDILQKPVTIDCGHNFCLKCITQIGETSCGFFKCPLCKTSVRKNAIRFNSLLRNLVEKIQALQASEVQSKRKEATCPRHQEMFHYFCEDDGKFLCFVCRESKDHKSHNVSLIEEAAQNYQGQIQEQIQVLQQKEKETVQVKAQGVHRVDVFTDQVEHEKQRILTEFELLHQVLEEEKNFLLSRIYWLGHEGTEAGKHYVASTEPQLNDLKKLVDSLKTKQNMPPRQLLENWRKNSVKQNQDTTPSQGA

SEQ ID NO: 8847 - protein, 648 aa, Homo sapiens
MEGAGYRVVFEKGGVYLHTSAKKYQDRDSLIAGVIRVVEKDNDVLLHWAPVEEAGDSTQILFSKKDSSGGDSCASEEEPTFDPDYEPDWAVISTVRPQLCHSEPTRGAEPSCPQGSWAFSVSLGELKSIRRSKPGLSWAYLVLVTQAGGSLPALHFHRGGTRALLRVLSRYLLLASSPQDSRLYLVFPHDSSALSNSFHHLQLFDQDSSNVVSRFLQDPYSTTFSSFSRVTNFFRGALQPQPEGAASDLPPPPDDEPEPGFEVISCVELGPRPTVERGPPVTEEEWARHVGPEGRLQQVPELKNRIFSGGLSPSLRREAWKFLLGYLSWEGTAEEHKAHIRKKTDEYFRMKLQWKSVSPEQERRNSLLHGYRSLIERDVSRTDRTNKFYEGPENPGLGLLNDILLTYCMYHFDLGYVQGMSDLLSPILYVIQNEVDAFWCFCGFMELVQGNFEESQETMKRQLGRLLLLLRVLDPLLCDFLDSQDSGSLCFCFRWLLIWFKREFPFPDVLRLWEVLWTGLPGPNLHLLVACAILDMERDTLMLSGFGSNEILKHINELTMKLSVEDVLTRAEALHRQLTACPELPHNVQEILGLAPPAEPHSPSPTASPLPLSPTRAPPTPPPSTDTAPQPDSSLEILPEEEDEGADS

SEQ ID NO: 8848 - protein, 615 aa, Homo sapiens
MEGAGYRDNDVLLHWAPVEEAGDSTQILFSKKDSSGGDSCASEEEPTFDPDYEPDWAVISTVRPQLCHSEPTRGAEPSCPQGSWAFSVSLGELKSIRRSKPGLSWAYLVLVTQAGGSLPALHFHRGGTRALLRVLSRYLLLASSPQDSRLYLVFPHDSSALSNSFHHLQLFDQDSSNVVSRFLQDPYSTTFSSFSRVTNFFRGALQPQPEGAASDLPPPPDDEPEPGFEVISCVELGPRPTVERGPPVTEEEWARHVGPEGRLQQVPELKNRIFSGGLSPSLRREAWKFLLGYLSWEGTAEEHKAHIRKKTDEYFRMKLQWKSVSPEQERRNSLLHGYRSLIERDVSRTDRTNKFYEGPENPGLGLLNDILLTYCMYHFDLGYVQGMSDLLSPILYVIQNEVDAFWCFCGFMELVQGNFEESQETMKRQLGRLLLLLRVLDPLLCDFLDSQDSGSLCFCFRWLLIWFKREFPFPDVLRLWEVLWTGLPGPNLHLLVACAILDMERDTLMLSGFGSNEILKHINELTMKLSVEDVLTRAEALHRQLTACPELPHNVQEILGLAPPAEPHSPSPTASPLPLSPTRAPPTPPPSTDTAPQPDSSLEILPEEEDEGADS

SEQ ID NO: 8849 - protein, 594 aa, Homo sapiens
MEGAGYRVVFEKGGVYLHTSAKKYQDRDSLIAGVIRVVEKDNDVLLHWAPVEEAGDSTQILFSKKDSSGGDSCASEEEPTFDPDYEPDWAVISTVRPQLCHSEPTRGAEPSCPQGSWAFSVSLGELKSIRRSKPGLSWAYLVLVTQAGGSLPALHFHRGGTRALLRVLSRYLLLASSPQDSRLYLVFPHDSSALSNSFHHLQLFDQDSSNVVSRFLQDPYSTTFSSFSRVTNFFRGALQPQPEGAASDLPPPPDDEPEPGFEVISCVELGPRPTVERGPPVTEEEWARHVGPEGRLQQVPELKNRIFSGGLSPSLRREAWKFLLGYLSWEGTAEEHKAHIRKKTDEYFRMKLQWKSVSPEQERRNSLLHGYRSLIERDVSRTDRTNKFYEGPENPGLGLLNDILLTYCMYHFDLGYVQGMSDLLSPILYVIQNEVDAFWCFCGFMELVQGNFEESQETMKRQLGRLLLLLRVLDPLLCDFLDSQDSGSLCFCFRWLLIWFKREFPFPDVLRLWEVLWTGLPGPNLHLLVACAILDMERDTLMLSGFGSNEILKHINELTMKLSVEDVLTRAEALHRQLTACPELPEEEDEGADS

SEQ ID NO: 8850 - protein, 435 aa, Homo sapiens
MLLPWATSAPGLAWGPLVLGLFGLLAASQPQAVPPYASENQTCRDQEKEYYEPQHRICCSRCPPGTYVSAKCSRIRDTVCATCAENSYNEHWNYLTICQLCRPCDPVMGLEEIAPCTSKRKTQCRCQPGMFCAAWALECTHCELLSDCPPGTEAELKDEVGKGNNHCVPCKAGHFQNTSSPSARCQPHTRCENQGLVEAAPGTAQSDTTCKNPLEPLPPEMSGTMLMLAVLLPLAFFLLLATVFSCIWKSHPSLCRKLGSLLKRRPQGEGPNPVAGSWEPPKAHPYFPDLVQPLLPISGDVSPVSTGLPAAPVLEAGVPQQQSPLDLTREPQLEPGEQSQVAHGTNGIHVTGGSMTITGNIYIYNGPVLGGPPGPGDLPATPEPPYPIPEEGDPGPPGLSTPHQEDGKAWHLAETEHCGATPSNRGPRNQFITHD

SEQ ID NO: 8851 - protein, 416 aa, Homo sapiens
MEATGISLASQLKVPPYASENQTCRDQEKEYYEPQHRICCSRCPPGTYVSAKCSRIRDTVCATCAENSYNEHWNYLTICQLCRPCDPVMGLEEIAPCTSKRKTQCRCQPGMFCAAWALECTHCELLSDCPPGTEAELKDEVGKGNNHCVPCKAGHFQNTSSPSARCQPHTRCENQGLVEAAPGTAQSDTTCKNPLEPLPPEMSGTMLMLAVLLPLAFFLLLATVFSCIWKSHPSLCRKLGSLLKRRPQGEGPNPVAGSWEPPKAHPYFPDLVQPLLPISGDVSPVSTGLPAAPVLEAGVPQQQSPLDLTREPQLEPGEQSQVAHGTNGIHVTGGSMTITGNIYIYNGPVLGGPPGPGDLPATPEPPYPIPEEGDPGPPGLSTPHQEDGKAWHLAETEHCGATPSNRGPRNQFITHD

SEQ ID NO: 8852 - protein, 485 aa, Homo sapiens
MDPTALVEAIVEEVACPICMTFLREPMSIDCGHSFCHSCLSGLWEIPGESQNWGYTCPLCRAPVQPRNLRPNWQLANVVEKVRLLRLHPGMGLKGDLCERHGEKLKMFCKEDVLIMCEACSQSPEHEAHSVVPMEDVAWEYKWELHEALEHLKKEQEEAWKLEVGERKRTATWKIQVETRKQSIVWEFEKYQRLLEKKQPPHRQLGAEVAAALASLQREAAETMQKLELNHSELIQQSQVLWRMIAELKERSQRPVRWMLQDIQEVLNRSKSWSLQQPEPISLELKTDCRVLGLREILKTYAADVRLDPDTAYSRLIVSEDRKRVHYGDTNQKLPDNPERFYRYNIVLGSQCISSGRHYWEVEVGDRSEWGLGVCKQNVDRKEVVYLSPHYGFWVIRLRKGNEYRAGTDEYPILSLPVPPRRVGIFVDYEAHDISFYNVTDCGSHIFTFPRYPFPGRLLPYFSPCYSIGTNNTAPLAICSLDGED

SEQ ID NO: 8853 - protein, 206 aa, Homo sapiens
MQKLELKTDCRVLGLREILKTYAADVRLDPDTAYSRLIVSEDRKRVHYGDTNQKLPDNPERFYRYNIVLGSQCISSGRHYWEVEVGDRSEWGLGVCKQNVDRKEVVYLSPHYGFWVIRLRKGNEYRAGTDEYPILSLPVPPRRVGIFVDYEAHDISFYNVTDCGSHIFTFPRYPFPGRLLPYFSPCYSIGTNNTAPLAICSLDGED

SEQ ID NO: 8854 - protein, 486 aa, Homo sapiens
MAWAPPGERLREDARCPVCLDFLQEPVSVDCGHSFCLRCISEFCEKSDGAQGGVYACPQCRGPFRPSGFRPNRQLAGLVESVRRLGLGAGPGARRCARHGEDLSRFCEEDEAALCWVCDAGPEHRTHRTAPLQEAAGSYQVKLQMALELMRKELEDALTQEANVGKKTVIWKEKVEMQRQRFRLEFEKHRGFLAQEEQRQLRRLEAEERATLQRLRESKSRLVQQSKALKELADELQERCQRPALGLLEGVRGVLSRSKAVTRLEAENIPMELKTACCIPGRRELLRKFQVDVKLDPATAHPSLLLTADLRSVQDGEPWRDVPNNPERFDTWPCILGLQSFSSGRHYWEVLVGEGAEWGLGVCQDTLPRKGETTPSPENGVWALWLLKGNEYMVLASPSVPLLQLESPRCIGIFLDYEAGEISFYNVTDGSYIYTFNQLFSGLLRPYFFICDATPLILPPTTIAGSGNWASRDHLDPASDVRDDHL

SEQ ID NO: 8855 - protein, 580 aa, Homo sapiens
MSENRKPLLGFVSKLTSGTALGNSGKTHCPLCLGLFKAPRLLPCLHTVCTTCLEQLEPFSVVDIRGGDSDTSSEGSIFQELKPRSLQSQIGILCPVCDAQVDLPMGGVKALTIDHLAVNDVMLESLRGEGQGLVCDLCNDREVEKRCQTCKANLCHFCCQAHRRQKKTTYHTMVDLKDLKGYSRIGKPILCPVHPAEELRLFCEFCDRPVCQDCVVGEHREHPCDFTSNVIHKHGDSVWELLKGTQPHVEALEEALAQIHIINSALQKRVEAVAADVRTFSEGYIKAIEEHRDKLLKQLEDIRAQKENSLQLQKAQLEQLLADMRTGVEFTEHLLTSGSDLEILITKRVVVERLRKLNKVQYSTRPGVNDKIRFCPQEKAGQCRGYEIYGTINTKEVDPAKCVLQGEDLHRAREKQTASFTLLCKDAAGEIMGRGGDNVQVAVVPKDKKDSPVRTMVQDNKDGTYYISYTPKEPGVYTVWVCIKEQHVQGSPFTVMVRRKHRPHSGVFHCCTFCSSGGQKTARCACGGTMPGGYLGCGHGHKGHPGHPHWSCCGKFNEKSECTWTGGQSAPRSLLRTVAL

SEQ ID NO: 8856 - protein, 562 aa, Homo sapiens
MSENRKPLLGFVSKLTSGTALGNSGKTHCPLCLGLFKAPRLLPCLHTVCTTCLEQLEPFSVVDIRGGDSDTSSEGSIFQELKPRSLQSQIGILCPVCDAQVDLPMGGVKALTIDHLAVNDVMLESLRGEGQGLVCDLCNDREVEKRCQTCKANLCHFCCQAHRRQKKTTYHTMVDLKDLKGYSRIGKPILCPVHPAEELRLFCEFCDRPVCQDCVVGEHREHPCDFTSNVIHKHGDSVWELLKGTQPHVEALEEALAQIHIINSALQKRVEAVAADVRTFSEGYIKAIEEHRDKLLKQLEDIRAQKENSLQLQKAQLEQLLADMRTGVEFTEHLLTSGSDLEILITKRVVVERLRKLNKVQYSTRPGVNDKIRFCPQEKAGQCRGYEIYDLHRAREKQTASFTLLCKDAAGEIMGRGGDNVQVAVVPKDKKDSPVRTMVQDNKDGTYYISYTPKEPGVYTVWVCIKEQHVQGSPFTVMVRRKHRPHSGVFHCCTFCSSGGQKTARCACGGTMPGGYLGCGHGHKGHPGHPHWSCCGKFNEKSECTWTGGQSAPRSLLRTVAL

SEQ ID NO: 8857 - protein, 138 aa, Homo sapiens
MPAAFPCVFPPQSLQVFPQMIVKVWEKQSLPLPGLRGSPVERLYLPRNELDNPHKQKAWKIYPPEFAVEILFGMVSVDSLLFVLSSPHWWLHLAQGSFWMSEGGFSLCHPGWSVVAQSLLTSTSAFCVRAILLPQPPE

SEQ ID NO: 8858 - protein, 108 aa, Homo sapiens
MPAAFPCVFPPQSLQVFPQMIVKVWEKQSLPLPGLRGSPVERLYLPRNELDNPHKQKAWKIYPPEFAVEILFGGFSLCHPGWSVVAQSLLTSTSAFCVRAILLPQPPE

SEQ ID NO: 8859 - protein, 1127 aa, Homo sapiens
MAENKGGGEAESGGGGSGSAPVTAGAAGPAAQEAEPPLTAVLVEEEEEEGGRAGAEGGAAGPDDGGVAAASSGSAQAASSPAASVGTGVAGGAVSTPAPAPASAPAPGPSAGPPPGPPASLLDTCAVCQQSLQSRREAEPKLLPCLHSFCLRCLPEPERQLSVPIPGGSNGDIQQVGVIRCPVCRQECRQIDLVDNYFVKDTSEAPSSSDEKSEQVCTSCEDNASAVGFCVECGEWLCKTCIEAHQRVKFTKDHLIRKKEDVSESVGASGQRPVFCPVHKQEQLKLFCETCDRLTCRDCQLLEHKEHRYQFLEEAFQNQKGAIENLLAKLLEKKNYVHFAATQVQNRIKEVNETNKRVEQEIKVAIFTLINEINKKGKSLLQQLENVTKERQMKLLQQQNDITGLSRQVKHVMNFTNWAIASGSSTALLYSKRLITFQLRHILKARCDPVPAANGAIRFHCDPTFWAKNVVNLGNLVIESKPAPGYTPNVVVGQVPPGTNHISKTPGQINLAQLRLQHMQQQVYAQKHQQLQQMRMQQPPAPVPTTTTTTQQHPRQAAPQMLQQQPPRLISVQTMQRGNMNCGAFQAHQMRLAQNAARIPGIPRHSGPQYSMMQPHLQRQHSNPGHAGPFPVVSVHNTTINPTSPTTATMANANRGPTSPSVTAIELIPSVTNPENLPSLPDIPPIQLEDAGSSSLDNLLSRYISGSHLPPQPTSTMNPSPGPSALSPGSSGLSNSHTPVRPPSTSSTGSRGSCGSSGRTAEKTSLSFKSDQVKVKQEPGTEDEICSFSGGVKQEKTEDGRRSACMLSSPESSLTPPLSTNLHLESELDALASLENHVKIEPADMNESCKQSGLSSLVNGKSPIRSLMHRSARIGGDGNNKDDDPNEDWCAVCQNGGDLLCCEKCPKVFHLTCHVPTLLSFPSGDWICTFCRDIGKPEVEYDCDNLQHSKKGKTAQGLSPVDQRKCERLLLYLYCHELSIEFQEPVPASIPNYYKIIKKPMDLSTVKKKLQKKHSQHYQIPDDFVADVRLIFKNCERFNEMMKVVQVYADTQEINLKADSEVAQAGKAVALYFEDKLTEIYSDRTFAPLPEFEQEEDDGEVTEDSDEDFIQPRRKRLKSDERPVHIK

SEQ ID NO: 8860 - protein, 1110 aa, Homo sapiens
MAENKGGGEAESGGGGSGSAPVTAGAAGPAAQEAEPPLTAVLVEEEEEEGGRAGAEGGAAGPDDGGVAAASSGSAQAASSPAASVGTGVAGGAVSTPAPAPASAPAPGPSAGPPPGPPASLLDTCAVCQQSLQSRREAEPKLLPCLHSFCLRCLPEPERQLSVPIPGGSNGDIQQVGVIRCPVCRQECRQIDLVDNYFVKDTSEAPSSSDEKSEQVCTSCEDNASAVGFCVECGEWLCKTCIEAHQRVKFTKDHLIRKKEDVSESVGASGQRPVFCPVHKQEQLKLFCETCDRLTCRDCQLLEHKEHRYQFLEEAFQNQKGAIENLLAKLLEKKNYVHFAATQVQNRIKEVNETNKRVEQEIKVAIFTLINEINKKGKSLLQQLENVTKERQMKLLQQQNDITGLSRQVKHVMNFTNWAIASGSSTALLYSKRLITFQLRHILKARCDPVPAANGAIRFHCDPTFWAKNVVNLGNLVIESKPAPGYTPNVVVGQVPPGTNHISKTPGQINLAQLRLQHMQQQVYAQKHQQLQQMRMQQPPAPVPTTTTTTQQHPRQAAPQMLQQQPPRLISVQTMQRGNMNCGAFQAHQMRLAQNAARIPGIPRHSGPQYSMMQPHLQRQHSNPGHAGPFPVVSVHNTTINPTSPTTATMANANRGPTSPSVTAIELIPSVTNPENLPSLPDIPPIQLEDAGSSSLDNLLSRYISGSHLPPQPTSTMNPSPGPSALSPGSSGLSNSHTPVRPPSTSSTGSRGSCGSSGRTAEKTSLSFKSDQVKVKQEPGTEDEICSFSGGVKQEKTEDGRRSACMLSSPESSLTPPLSTNLHLESELDALASLENHVKIEPADMNESCKQSGLSSLVNGKSPIRSLMHRSARIGGDGNNKDDDPNEDWCAVCQNGGDLLCCEKCPKVFHLTCHVPTLLSFPSGDWICTFCRDIGKPEVEYDCDNLQHSKKGKTAQGLSPVDQRKCERLLLYLYCHELSIEFQEPVPASIPNYYKIIKKPMDLSTVKKKLQKKHSQHYQIPDDFVADVRLIFKNCERFNEADSEVAQAGKAVALYFEDKLTEIYSDRTFAPLPEFEQEEDDGEVTEDSDEDFIQPRRKRLKSDERPVHIK

SEQ ID NO: 8861 - protein, 625 aa, Homo sapiens
MSENLDNEGPKPMESCGQESSSALSCPTVSVPPAAPAALEEVEKEGAGAATGPGPQPGLYSYIRDDLFTSEIFKLELQNVPRHASFSDVRRFLGRFGLQPHKTKLFGQPPCAFVTFRSAAERDKALRVLHGALWKGRPLSVRLARPKADPMARRRRQEGESEPPVTRVADVVTPLWTVPYAEQLERKQLECEQVLQKLAKEIGSTNRALLPWLLEQRHKHNKACCPLEGVRPSPQQTEYRNKCEFLVGVGVDGEDNTVGCRLGKYKGGTCAVAAPFDTVHIPEATKQVVKAFQEFIRSTPYSAYDPETYTGHWKQLTVRTSRRHQAMAIAYFHPQKLSPEELAELKTSLAQHFTAGPGRASGVTCLYFVEEGQRKTPSQEGLPLEHVAGDRCIHEDLLGLTFRISPHAFFQVNTPAAEVLYTVIQDWAQLDAGSMVLDVCCGTGTIGLALARKVKRVIGVELCPEAVEDARVNAQDNELSNVEFHCGRAEDLVPTLVSRLASQHLVAILDPPRAGLHSKVILAIRRAKNLRRLLYVSCNPRAAMGNFVDLCRAPSNRVKGIPFRPVKAVAVDLFPQTPHCEMLILFERVEHPNGTGVLGPHSPPAQPTPGPPDNTLQETGTFPSS

SEQ ID NO: 8862 - protein, 562 aa, Homo sapiens
MSENLDNEGPKPMESCGQESSSALSCPTVSVPPAAPAALEEVEKEGAGAATGPGPQPGLYSYIRDDLFTSEIFKLELQNVPRHASFSDVRRFLGRFGLQPHKTKLFGQPPCAFVTFRSAAERDKALRVLHGALWKGRPLSVRLARPKADPMARRRRQEGESEPPVTRVADVVTPLWTVPYAEQLERKQLECEQVLQKLAKEIGSTNRALLPWLLEQRHKHNKACCPLEGVRPSPQQTEYRNKCEFLVGVGVDGEDNTVGCRLGKYKGGTCAVAAPFDTVHIPEATKQVVKAFQEFIRSTPYSAYDPETYTGHWKQLTVRTSRRHQAMAIAYFHPQKLSPEELAELKTSLAQHFTAGPGRASGVTCLYFVEEGQRKTPSQEGLPLEHVAGDRCIHEDLLGLTFRISPHAFFQVNTPAAEVLYTVIQDWAQLDAGSMVLDVCCGTGTIGLALARKVKRVIGVELCPEAVEDARVNAQDNELSNVEFHCGRAEDLVPTLVSRLASQHLVAILDPPRAGLHSKVILAIRRAKNLRRLLYVSCNPRAAMGNFVDAPLFPPQPLQSPI

SEQ ID NO: 8863 - protein, 343 aa, Homo sapiens
MNIHRSTPITIARYGRSRNKTQDFEELSSIRSAEPSQSFSPNLGSPSPPETPNLSHCVSCIGKYLLLEPLEGDHVFRAVHLHSGEELVCKVFDISCYQESLAPCFCLSAHSNINQITEIILGETKAYVFFERSYGDMHSFVRTCKKLREEEAARLFYQIASAVAHCHDGGLVLRDLKLRKFIFKDEERTRVKLESLEDAYILRGDDDSLSDKHGCPAYVSPEILNTSGSYSGKAADVWSLGVMLYTMLVGRYPFHDIEPSSLFSKIRRGQFNIPETLSPKAKCLIRSILRREPSERLTSQEILDHPWFSTDFSVSNSAYGAKEVSDQLVPDVNMEENLDPFFN

SEQ ID NO: 8864 - protein, 1435 aa, Homo sapiens
MAQCVQSVQELIPDSFVPCVAALCSDEAERLTRLNHLSFAELLKPFSRLTSEVHMRDPNNQLHVIKNLKIAVSNIVTQPPQPGAIRKLLNDVVSGSQPAEGLVANVITAGDYDLNISATTPWFESYRETFLQSMPALDHEFLNHYLACMLVASSSEAEPVEQFSKLSQEQHRIQHNSDYSYPKWFIPNTLKYYVLLHDVSAGDEQRAESIYEEMKQKYGTQGCYLLKINSRTSNRASDEQIPDPWSQYLQKNSIQNQESYEDGPCTITSNKNSDNNLLSLDGLDNEVKDGLPNNFRAHPLQLEQSSDPSNSIDGPDHLRSASSLHETKKGNTGIIHGACLTLTDHDRIRQFIQEFTFRGLLPHIEKTIRQLNDQLISRKGLSRSLFSATKKWFSGSKVPEKSINDLKNTSGLLYPPEAPELQIRKMADLCFLVQHYDLAYSCYHTAKKDFLNDQAMLYAAGALEMAAVSAFLQPGAPRPYPAHYMDTAIQTYRDICKNMVLAERCVLLSAELLKSQSKYSEAAALLIRLTSEDSDLRSALLLEQAAHCFINMKSPMVRKYAFHMILAGHRFSKAGQKKHALRCYCQAMQVYKGKGWSLAEDHINFTIGRQSYTLRQLDNAVSAFRHILINESKQSAAQQGAFLREYLYVYKNVSQLSPDGPLPQLPLPYINSSATRVFFGHDRRPADGEKQAATHVSLDQEYDSESSQQWRELEEQVVSVVNKGVIPSNFHPTQYCLNSYSDNSRFPLAVVEEPITVEVAFRNPLKVLLLLTDLSLLWKFHPKDFSGKDNEEVKQLVTSEPEMIGAEVISEFLINGEESKVARLKLFPHHIGELHILGVVYNLGTIQGSMTVDGIGALPGCHTGKYSLSMSVRGKQDLEIQGPRLNNTKEEKTSVKYGPDRRLDPIITEEMPLLEVFFIHFPTGLLCGEIRKAYVEFVNVSKCPLTGLKVVSKRPEFFTFGGNTAVLTPLSPSASENCSAYKTVVTDATSVCTALISSASSVDFGIGTGSQPEVIPVPLPDTVLLPGASVQLPMWLRGPDEEGVHEINFLFYYESVKKQPKIRHRILRHTAIICTSRSLNVRATVCRSNSLENEEGRGGNMLVFVDVENTNTSEAGVKEFHIVQVSSSSKHWKLQKSVNLSENKDTKLASREKGKFCFKAIRCEKEEAATQSSEKYTFADIIFGNEQIISSASPCADFFYRSLSSELKKPQAHLPVHTEKQSTEDAVRLIQKCSEVDLNIVILWKAYVVEDSKQLILEGQHHVILRTIGKEAFSYPQKQEPPEMELLKFFRPENITVSSRPSVEQLSSLIKTSLHYPESFNHPFHQKSLCLVPVTLLLSNCSKADVDVIVDLRHKTTSPEALEIHGSFTWLGQTQYKLQLKSQEIHSLQLKACFVHTGVYNLGTPRVFAKLSDQVTVFETSQQNSMPALIIISNV

SEQ ID NO: 8865 - protein, 1359 aa, Homo sapiens
MAQCVQSVQELIPDSFVPCVAALCSDEAERLTRLNHLSFAELLKPFSRLTSEVHMRDPNNQLHVIKNLKIAVSNIVTQPPQPGAIRKLLNDVVSGSQPAEGLVANVITAGDYDLNISATTPWFESYRETFLQSMPALDHEFLNHYLACMLVASSSEAEPVEQFSKLSQEQHRIQHNSDYSYPKWFIPNTLKYYVLLHDVSAGDEQRAESIYEEMKQKYGTQGCYLLKINSRTSNRASDEQIPDPWSQYLQKNSIQNQESYEDGPCTITSNKNSDNNLLSLDGLDNEVKDGLPNNFRAHPLQLEQSSDPSNSIDGPDHLRSASSLHETKKGNTGIIHGACLTLTDHDRIRQFIQEFTFRGLLPHIEKTIRQLNDQLISRKGLSRSLFSATKKWFSGSKVPEKSINDLKNTSGLLYPPEAPELQIRKMADLCFLVQHYDLAYSCYHTAKKDFLNDQAMLYAAGALEMAAVSAFLQPGAPRPYPAHYMDTAIQTYRDICKNMVLAERCVLLSAELLKSQSKYSEAAALLIRLTSEDSDLRSALLLEQAAHCFINMKSPMVRKYAFHMILAGHRFSKAGQKKHALRCYCQAMQVYKGKGWSLAEDHINFTIGRQSYTLRQLDNAVSAFRHILINESKQSAAQQGAFLREYLYVYKNVSQLSPDGPLPQLPLPYINSSATRVFFGHDRRPADGEKQAATHVSLDQEYDSESSQQWRELEEQVVSVVNKGVIPSNFHPTQYCLNSYSDNSRFPLAVVEEPITVEVAFRNPLKVLLLLTDLSLLWKFHPKDFSGKDNEEVKQLVTSEPEMIGAEVISEFLINGEESKVARLKLFPHHIGELHILGVVYNLGTIQGSMTVDGIGALPGCHTGKYSLSMSVRGKQDLEIQGPRLNNTKEEKTSVKYGPDRRLDPIITEEMPLLETLALAQEVNQRDFGIGTGSQPEVIPVPLPDTVLLPGASVQLPMWLRGPDEEGVHEINFLFYYESVKKQPKIRHRILRHTAIICTSRSLNVRATVCRSNSLENEEGRGGNMLVFVDVENTNTSEAGVKEFHIVQVSSSSKHWKLQKSVNLSENKDTKLASREKGKFCFKAIRCEKEEAATQSSEKYTFADIIFGNEQIISSASPCADFFYRSLSSELKKPQAHLPVHTEKQSTEDAVRLIQKCSEVDLNIVILWKAYVVEDSKQLILEGQHHVILRTIGKEAFSYPQKQEPPEMELLKFFRPENITVSSRPSVEQLSSLIKTSLHYPESFNHPFHQKSLCLVPVTLLLSNCSKADVDVIVDLRHKTTSPEALEIHGSFTWLGQTQYKLQLKSQEIHSLQLKACFVHTGVYNLGTPRVFAKLSDQVTVFETSQQNSMPALIIISNV

SEQ ID NO: 8866 - protein, 360 aa, Homo sapiens
MPGTVATLRFQLLPPEPDDAFWGAPCEQPLERRYQALPALVCIMCCLFGVVYCFFGYRCFKAVLFLTGLLFGSVVIFLLCYRERVLETQLSAGASAGIALGIGLLCGLVAMLVRSVGLFLVGLLLGLLLAAAALLGSAPYYQPGSVWGPLGLLLGGGLLCALLTLRWPRPLTTLATAVTGAALIATAADYFAELLLLGRYVVERLRAAPVPPLCWRSWALLALWPLLSLMGVLVQWRVTAEGDSHTEVVISRQRRRVQLMRIRQQEDRKEKRRKKRPPRAPLRGPRAPPRPGPPDPAYRRRPVPIKRFNGDVLSPSYIQSFRDRQTGSSLSSFMASPTDADYEYGSRGPLTACSGPPVRV

SEQ ID NO: 8867 - protein, 670 aa, Homo sapiens
MSSGKSARYNRFSGGPSNLPTPDVTTGTRMETTFGPAFSAVTTITKADGTSTYKQHCRTPSSSSTLAYSPRDEEDSMPPISTPRRSDSAISVRSLHSESSMSLRSTFSLPEEEEEPEPLVFAEQPSVKLCCQLCCSVFKDPVITTCGHTFCRRCALKSEKCPVDNVKLTVVVNNIAVAEQIGELFIHCRHGCRVAGSGKPPIFEVDPRGCPFTIKLSARKDHEGSCDYRPVRCPNNPSCPPLLRMNLEAHLKECEHIKCPHSKYGCTFIGNQDTYETHLETCRFEGLKEFLQQTDDRFHEMHVALAQKDQEIAFLRSMLGKLSEKIDQLEKSLELKFDVLDENQSKLSEDLMEFRRDASMLNDELSHINARLNMGILGSYDPQQIFKCKGTFVGHQGPVWCLCVYSMGDLLFSGSSDKTIKVWDTCTTYKCQKTLEGHDGIVLALCIQGCKLYSGSADCTIIVWDIQNLQKVNTIRAHDNPVCTLVSSHNVLFSGSLKAIKVWDIVGTELKLKKELTGLNHWVRALVAAQSYLYSGSYQTIKIWDIRTLDCIHVLQTSGGSVYSIAVTNHHIVCGTYENLIHVWDIESKEQVRTLTGHVGTVYALAVISTPDQTKVFSASYDRSLRVWSMDNMICTQTLLRHQGSVTALAVSRGRLFSGAVDSTVKVWTC

SEQ ID NO: 8868 - protein, 594 aa, Homo sapiens
MPPISTPRRSDSAISVRSLHSESSMSLRSTFSLPEEEEEPEPLVFAEQPSVKLCCQLCCSVFKDPVITTCGHTFCRRCALKSEKCPVDNVKLTVVVNNIAVAEQIGELFIHCRHGCRVAGSGKPPIFEVDPRGCPFTIKLSARKDHEGSCDYRPVRCPNNPSCPPLLRMNLEAHLKECEHIKCPHSKYGCTFIGNQDTYETHLETCRFEGLKEFLQQTDDRFHEMHVALAQKDQEIAFLRSMLGKLSEKIDQLEKSLELKFDVLDENQSKLSEDLMEFRRDASMLNDELSHINARLNMGILGSYDPQQIFKCKGTFVGHQGPVWCLCVYSMGDLLFSGSSDKTIKVWDTCTTYKCQKTLEGHDGIVLALCIQGCKLYSGSADCTIIVWDIQNLQKVNTIRAHDNPVCTLVSSHNVLFSGSLKAIKVWDIVGTELKLKKELTGLNHWVRALVAAQSYLYSGSYQTIKIWDIRTLDCIHVLQTSGGSVYSIAVTNHHIVCGTYENLIHVWDIESKEQVRTLTGHVGTVYALAVISTPDQTKVFSASYDRSLRVWSMDNMICTQTLLRHQGSVTALAVSRGRLFSGAVDSTVKVWTC

SEQ ID NO: 8869 - protein, 476 aa, Homo sapiens
MAFGKSHRDPYATSVGHLIEKATFAGVQTEDWGQFMHICDIINTTQDGPKDAVKALKKRISKNYNHKEIQLTLSLIDMCVQNCGPSFQSLIVKKEFVKENLVKLLNPRYNLPLDIQNRILNFIKTWSQGFPGGVDVSEVKEVYLDLVKKGVQFPPSEAEAETARQETAQISSNPPTSVPTAPALSSVIAPKNSTVTLVPEQIGKLHSELDMVKMNVRVMSAILMENTPGSENHEDIELLQKLYKTGREMQERIMDLLVVVENEDVTVELIQVNEDLNNAILGYERFTRNQQRILEQNKNQKEATNTTSEPSAPSQDLLDLSPSPRMPRATLGELNTMNNQLSGLNFSLPSSDVTNNLKPSLHPQMNLLALENTEIPPFAQRTSQNLTSSHAYDNFLEHSNSVFLQPVSLQTIAAAPSNQSLPPLPSNHPAMTKSDLQPPNYYEVMEFDPLAPAVTTEAIYEEIDAHQHKGAQNDGD

SEQ ID NO: 8870 - protein, 346 aa, Homo sapiens
MAFGKSHRDPYATSVGHLIEKATFAGVQTEDWGQFMHICDIINTTQDGPKDAVKALKKRISKNYNHKEIQLTLSLIDMCVQNCGPSFQSLIVKKEFVKENLVKLLNPRYNLPLDIQNRILNFIKTWSQGFPGGVDVSEVKEVYLDLVKKGVQFPPSEAEAETARQETAQISSNPPTSVPTAPALSSVIAPKNSTVTLVPEQIGKLHSELDMVKMNVRVMSAILMENTPGSENHEDIELLQKLYKTGREMQERIMDLLVVVENEDVTVELIQVNEDLNNAILGYERFTRNQQRILEQNKNQKEATNTTSEPSAPSQDLLDLSPSPRMPRATLGELNTMNNQLSGLSK

SEQ ID NO: 8871 - protein, 399 aa, Homo sapiens
MCVQNCGPSFQSLIVKKEFVKENLVKLLNPRYNLPLDIQNRILNFIKTWSQGFPGGVDVSEVKEVYLDLVKKGVQFPPSEAEAETARQETAQISSNPPTSVPTAPALSSVIAPKNSTVTLVPEQIGKLHSELDMVKMNVRVMSAILMENTPGSENHEDIELLQKLYKTGREMQERIMDLLVVVENEDVTVELIQVNEDLNNAILGYERFTRNQQRILEQNKNQKEATNTTSEPSAPSQDLLDLSPSPRMPRATLGELNTMNNQLSGLNFSLPSSDVTNNLKPSLHPQMNLLALENTEIPPFAQRTSQNLTSSHAYDNFLEHSNSVFLQPVSLQTIAAAPSNQSLPPLPSNHPAMTKSDLQPPNYYEVMEFDPLAPAVTTEAIYEEIDAHQHKGAQNDGD

SEQ ID NO: 8872 - protein, 368 aa, Homo sapiens
MEGLVFLNALATRLLFLLHSLVGVWRVTEVKKEPRYWLLALLNLLLFLETALTLKFKRGRGYKWFSPAIFLYLISIVPSLWLLELHHETQYCSIQAEGTSQNTSRKEDFNQTLTSNEQTSRADDLIETAKVFVNNLSTVCEKVWTLGLHQTFLLMLIIGRWLLPIGGGITRDQLSQLLLMFVGTAADILEFTSETLEEQNVRNSPALVYAILVIWTWSMLQFPLDLAVQNVVCPVSVTERGFPSLFFCQYSADLWNIGISVFIQDGPFLVVRLILMTYFKVINQMLVFFAAKNFLVVVLQLYRLVVLALAVRASLRSQSEGLKGEHGCRAQTSESGPSQRDWQNESKEGLAIPLRGSPVTSDDSHHTP

SEQ ID NO: 8873 - protein, 223 aa, Homo sapiens
MEGLVFLNALATRLLFLLHSLVGVWRVTEVKKEPRYWLLALLNLLLFLETALTLKFKRGRGYKWFSPAIFLYLISIVPSLWLLELHHETQYCSIQAEGTSQNTSRKEDFNQTLTSNEQTSRADDLIETAKVFVNNLSTVCEKVWTLGLHQTFLLMLIIGRWLLPIGGGITRDQLSQLLLMFVGTAADILEFTSETLEEQNVRLCWKNSTNRRHTNPKWQLVLF

SEQ ID NO: 8874 - protein, 118 aa, Homo sapiens
MRWALLVLLAFLSPASQKSSNLEGRTKSVTRQTGSSAEITCDLTVTNTFYIHWYLHQEGKAPQRLLYYDVSTARDVLESGLSPGKYYTHTPRRWSWILRLQNLIENDSGVYYCATWDR

SEQ ID NO: 8875 - protein, 207 aa, Homo sapiens
MAPFEPLASGILLLLWLIAPSRACTCVPPHPQTAFCNSDLVIRAKFVGTPEVNQTTLYQRYEIKMTKMYKGFQALGDAADIRFVYTPAMESVCGYFHRSHNRSEEFLIAGKLQDGLLHITTCSFVAPWNSLSLAQRRGFTKTYTVGCEECTVFPCLSIPCKLQSGTHCLWTDQLLQGSEKGFQSRHLACLPREPGLCTWQSLRSQIA

SEQ ID NO: 8876 - protein, 211 aa, Homo sapiens
MTPWLGLIVLLGSWSLGDWGAEACTCSPSHPQDAFCNSDIVIRAKVVGKKLVKEGPFGTLVYTIKQMKMYRGFTKMPHVQYIHTEASESLCGLKLEVNKYQYLLTGRVYDGKMYTGLCNFVERWDQLTLSQRKGLNYRYHLGCNCKIKSCYYLPCFVTSKNECLWTDMLSNFGYPGYQSKHYACIRQKGGYCSWYRGWAPPDKSIINATDP

SEQ ID NO: 8877 - protein, 247 aa, Homo sapiens
MNPLLILAFVGAAVAVPFDDDDKIVGGYTCEENSVPYQVSLNSGSHFCGGSLISEQWVVSAGHCYKPHIQVRLGEHNIEVLEGNEQFINAAKIIRHPKYNRIILNNDIMLIKLSTPAVINAHVSTISLPTAPPAAGTECLISGWGNTLSSGADYPDELQCLDAPVLTQAKCKASYPLKITSNMFCVGFLEGGKDSCQGDSGGPVVCNGQLQGIVSWGYGCAQKRRPGVYTKVYNYVDWIKDTIAANS

SEQ ID NO: 8878 - protein, 508 aa, Homo sapiens
MELDSALEAPSQEDSNLSEELSHSAFGQAFSKILHCLARPEARRGNVKDAVLKDLGDLIEATEFDRLFEGTGARLRGMPETLGQVAKALEKYAAPSKEEEGGGDGHSEAAEKAAQVGLLFLKLLGKVETAKNSLVGPAWQTGLHHLAGPVYIFAITHSLEQPWTTPRSREVAREVLTSLLQVTECGSVAGFLHGENEDEKGRLSVILGLLKPDLYKESWKNNPAIKHVFSWTLQQVTRPWLSQHLERVLPASLVISDDYQTENKILGVHCLHHIVLNVPAADLLQYNRAQVLYHAISNHLYTPEHHLIQAVLLCLLDLFPILEKTLHWKGDGARPTTHCDEVLRLILTHMEPEHRLLLRRTYARNLPAFVNRLGILTVRHLKRLERVIIGYLEVYDGPEEEARLKILETLKLLMQHTWPRVSCRLVVLLKALLKLICDVARDPNLTPESVKSALLQEATDCLILLDRCSQGRVKGLLAKIPQSCEDRKVVNYIRKVQQVSEGAPYNGT

SEQ ID NO: 8879 - protein, 1172 aa, Homo sapiens
MVWRLVLLALWVWPSTQAGHQDKDTTFDLFSISNINRKTIGAKQFRGPDPGVPAYRFVRFDYIPPVNADDLSKITKIMRQKEGFFLTAQLKQDGKSRGTLLALEGPGLSQRQFEIVSNGPADTLDLTYWIDGTRHVVSLEDVGLADSQWKNVTVQVAGETYSLHVGCDLIDSFALDEPFYEHLQAEKSRMYVAKGSARESHFRGLLQNVHLVFENSVEDILSKKGCQQGQGAEINAISENTETLRLGPHVTTEYVGPSSERRPEVCERSCEELGNMVQELSGLHVLVNQLSENLKRVSNDNQFLWELIGGPPKTRNMSACWQDGRFFAENETWVVDSCTTCTCKKFKTICHQITCPPATCASPSFVEGECCPSCLHSVDGEEGWSPWAEWTQCSVTCGSGTQQRGRSCDVTSNTCLGPSIQTRACSLSKCDTRIRQDGGWSHWSPWSSCSVTCGVGNITRIRLCNSPVPQMGGKNCKGSGRETKACQGAPCPIDGRWSPWSPWSACTVTCAGGIRERTRVCNSPEPQYGGKACVGDVQERQMCNKRSCPVDGCLSNPCFPGAQCSSFPDGSWSCGSCPVGFLGNGTHCEDLDECALVPDICFSTSKVPRCVNTQPGFHCLPCPPRYRGNQPVGVGLEAAKTEKQVCEPENPCKDKTHNCHKHAECIYLGHFSDPMYKCECQTGYAGDGLICGEDSDLDGWPNLNLVCATNATYHCIKDNCPHLPNSGQEDFDKDGIGDACDDDDDNDGVTDEKDNCQLLFNPRQADYDKDEVGDRCDNCPYVHNPAQIDTDNNGEGDACSVDIDGDDVFNERDNCPYVYNTDQRDTDGDGVGDHCDNCPLVHNPDQTDVDNDLVGDQCDNNEDIDDDGHQNNQDNCPYISNANQADHDRDGQGDACDPDDDNDGVPDDRDNCRLVFNPDQEDLDGDGRGDICKDDFDNDNIPDIDDVCPENNAISETDFRNFQMVPLDPKGTTQIDPNWVIRHQGKELVQTANSDPGIAVGFDEFGSVDFSGTFYVNTDRDDDYAGFVFGYQSSSRFYVVMWKQVTQTYWEDQPTRAYGYSGVSLKVVNSTTGTGEHLRNALWHTGNTPGQVRTLWHDPRNIGWKDYTAYRWHLTHRPKTGYIRVLVHEGKQVMADSGPIYDQTYAGGRLGLFVFSQEMVYFSDLKYECRDI

SEQ ID NO: 8880 - protein, 245 aa, Homo sapiens
MAEIHTPYSSLKKLLSLLNGFVAVSGIILVGLGIGGKCGGASLTNVLGLSSAYLLHVGNLCLVMGCITVLLGCAGWYGATKESRGTLLFCILSMVIVLIMEVTAATVVLLFFPIVGDVALEHTFVTLRKNYRGYNEPDDYSTQWNLVMEKLKCCGVNNYTDFSGSSFEMTTGHTYPRSCCKSIGSVSCDGRDVSPNVIHQKGCFHKLLKITKTQSFTLSGSSLGAAVIQRWGSRYVAQAGLELLA

SEQ ID NO: 8881 - protein, 244 aa, Homo sapiens
MAEIHTPYSSLKKLLSLLNGFVAVSGIILVGLGIGGKCGGASLTNVLGLSSAYLLHVGNLCLVMGCITVLLGCAGWYGATKESRGTLLFCILSMVIVLIMEVTAATVVLLFFPIVGDVALEHTFVTLRKNYRGYNEPDDYSTQWNLVMEKLKCCGVNNYTDFSGSSFEMTTGHTYPRSCCKSIGSVSCDGRDVSPNVIHQKGCFHKLLKITKTQSFTLSGSSLGAAVIQLPGILATLLLFIKLG

SEQ ID NO: 8882 - protein, 219 aa, Homo sapiens
MAEIHTPYSSLKKLLSLLNGFVAVSGIILVGLGIGGKCGGASLTNVLGLSSAYLLHVGNLCLVMGCITVLLGCAGWYGATKESRGTLLFVGDVALEHTFVTLRKNYRGYNEPDDYSTQWNLVMEKLKCCGVNNYTDFSGSSFEMTTGHTYPRSCCKSIGSVSCDGRDVSPNVIHQKGCFHKLLKITKTQSFTLSGSSLGAAVIQLPGILATLLLFIKLG

SEQ ID NO: 8883 - protein, 160 aa, Homo sapiens
MAEIHTPYSSLKKLLSLLNGFVAVSGIILVGLGIGGKCGGASLTNVLGLSSAYLLHVGNLCLVMGCITVLLGCAGWYGATKESRGTLLFCILSMVIVLIMEVTAATVVLLFFPIVGDVALEHTFVTLRKNYRGYNEPDDYSTQWNLVMEKGLSKYFFSSL

SEQ ID NO: 8884 - protein, 432 aa, Homo sapiens
MPARPGRLLPLLARPAALTALLLLLLGHGGGGRWGARAQEAAAAAADGPPAADGEDGQDPHSKHLYTADMFTHGIQSAAHFVMFFAPWCGHCQRLQPTWNDLGDKYNSMEDAKVYVAKVDCTAHSDVCSAQGVRGYPTLKLFKPGQEAVKYQGPRDFQTLENWMLQTLNEEPVTPEPEVEPPSAPELKQGLYELSASNFELHVAQGDHFIKFFAPWCGHCKALAPTWEQLALGLEHSETVKIGKVDCTQHYELCSGNQVRGYPTLLWFRDGKKVDQYKGKRDLESLREYVESQLQRTETGATETVTPSEAPVLAAEPEADKGTVLALTENNFDDTIAEGITFIKFYAPWCGHCKTLAPTWEELSKKEFPGLAGVKIAEVDCTAERNICSKYSVRGYPTLLLFRGGKKVSEHSGGRDLDSLHRFVLSQAKDEL

SEQ ID NO: 8885 - protein, 324 aa, Homo sapiens
MEDAKVYVAKVDCTAHSDVCSAQGVRGYPTLKLFKPGQEAVKYQGPRDFQTLENWMLQTLNEEPVTPEPEVEPPSAPELKQGLYELSASNFELHVAQGDHFIKFFAPWCGHCKALAPTWEQLALGLEHSETVKIGKVDCTQHYELCSGNQVRGYPTLLWFRDGKKVDQYKGKRDLESLREYVESQLQRTETGATETVTPSEAPVLAAEPEADKGTVLALTENNFDDTIAEGITFIKFYAPWCGHCKTLAPTWEELSKKEFPGLAGVKIAEVDCTAERNICSKYSVRGYPTLLLFRGGKKVSEHSGGRDLDSLHRFVLSQAKDEL

SEQ ID NO: 8886 - protein, 523 aa, Homo sapiens
MVGQRVLLLVAFLLSGVLLSEAAKILTISTLGGSHYLLLDRVSQILQEHGHNVTMLHQSGKFLIPDIKEEEKSYQVIRWFSPEDHQKRIKKHFDSYIETALDGRKESEALVKLMEIFGTQCSYLLSRKDIMDSLKNENYDLVFVEAFDFCSFLIAEKLVKPFVAILPTTFGSLDFGLPSPLSYVPVFPSLLTDHMDFWGRVKNFLMFFSFSRSQWDMQSTFDNTIKEHFPEGSRPVLSHLLLKAELWFVNSDFAFDFARPLLPNTVYIGGLMEKPIKPVPQDLDNFIANFGDAGFVLVAFGSMLNTHQSQEVLKKMHNAFAHLPQGVIWTCQSSHWPRDVHLATNVKIVDWLPQSDLLAHPSIRLFVTHGGQNSVMEAIRHGVPMVGLPVNGDQHGNMVRVVAKNYGVSIRLNQVTADTLTLTMKQVIEDKRYKSAVVAASVILHSQPLSPAQRLVGWIDHILQTGGATHLKPYAFQQPWHEQYLIDVFVFLLGLTLGTMWLCGKLLGVVARWLRGARKVKKT

SEQ ID NO: 8887 - protein, 252 aa, Homo sapiens
MLHQSGKFLIPDIKEEEKSYQVIRWFSPEDHQKRIKKHFDSYIETALDGRKESEALVKLMEIFGTQCSYLLSRKDIMDSLKNENYDLVFVEAFDFCSFLIAEKLVKPFVAILPTTFGSLDFGLPSPLSYVPVFPSLLTDHMDFWGRVKNFLMFFSFSRSQWDMQSTFDNTIKEHFPEGSRPVLSHLLLKAELWFVNSDFAFDFARPLLPNTVYIGGLMEKPIKPVPQNGQPALFTTPSLFSSGVYPEPLRWL

SEQ ID NO: 8888 - protein, 1555 aa, Homo sapiens
MGCKGDASGACAAGALPVTGVCYKMGVLVVLTVLWLFSSVKADSKAITTSLTTKWFSTPLLLEASEFLAEDSQEKFWNFVEASQNIGSSDHDGTDYSYYHAILEAAFQFLSPLQQNLFKFCLSLRSYSATIQAFQQIAADEPPPEGCNSFFSVHGKKTCESDTLEALLLTASERPKPLLFKGDHRYPSSNPESPVVIFYSEIGSEEFSNFHRQLISKSNAGKINYVFRHYIFNPRKEPVYLSGYGVELAIKSTEYKAKDDTQVKGTEVNTTVIGENDPIDEVQGFLFGKLRDLHPDLEGQLKELRKHLVESTNEMAPLKVWQLQDLSFQTAARILASPVELALVVMKDLSQNFPTKARAITKTAVSSELRTEVEENQKYFKGTLGLQPGDSALFINGLHMDLDTQDIFSLFDVLRNEARVMEGLHRLGIEGLSLHNVLKLNIQPSEADYAVDIRSPAISWVNNLEVDSRYNSWPSSLQELLRPTFPGVIRQIRKNLHNMVFIVDPAHETTAELMNTAEMFLSNHIPLRIGFIFVVNDSEDVDGMQDAGVAVLRAYNYVAQEVDDYHAFQTLTHIYNKVRTGEKVKVEHVVSVLEKKYPYVEVNSILGIDSAYDRNRKEARGYYEQTGVGPLPVVLFNGMPFEREQLDPDELETITMHKILETTTFFQRAVYLGELPHDQDVVEYIMNQPNVVPRINSRILTAERDYLDLTASNNFFVDDYARFTILDSQGKTAAVANSMNYLTKKGMSSKEIYDDSFIRPVTFWIVGDFDSPSGRQLLYDAIKHQKSSNNVRISMINNPAKEISYENTQISRAIWAALQTQTSNAAKNFITKMAKEGAAEALAAGADIAEFSVGGMDFSLFKEVFESSKMDFILSHAVYCRDVLKLKKGQRAVISNGRIIGPLEDSELFNQDDFHLLENIILKTSGQKIKSHIQQLRVEEDVASDLVMKVDALLSAQPKGDPRIEYQFFEDRHSAIKLRPKEGETYFDVVAVVDPVTREAQRLAPLLLVLAQLINMNLRVFMNCQSKLSDMPLKSFYRYVLEPEISFTSDNSFAKGPIAKFLDMPQSPLFTLNLNTPESWMVESVRTPYDLDNIYLEEVDSVVAAEYELEYLLLEGHCYDITTGQPPRGLQFTLGTSANPVIVDTIVMANLGYFQLKANPGAWILRLRKGRSEDIYRIYSHDGTDSPPDADEVVIVLNNFKSKIIKVKVQKKADMVNEDLLSDGTSENESGFWDSFKWGFTGQKTEEVKQDKDDIINIFSVASGHLYERFLRIMMLSVLKNTKTPVKFWFLKNYLSPTFKEFIPYMANEYNFQYELVQYKWPRWLHQQTEKQRIIWGYKILFLDVLFPLVVDKFLFVDADQIVRTDLKELRDFNLDGAPYGYTPFCDSRREMDGYRFWKSGYWASHLAGRKYHISALYVVDLKKFRKIAAGDRLRGQYQGLSQDPNSLSNLDQDLPNNMIHQVPIKSLPQEWLWCETWCDDASKKRAKTIDLCNNPMTKEPKLEAAVRIVPEWQDYDQEIKQLQIRFQKEKETGALYKEKTKEPSREGPQKREEL

SEQ ID NO: 8889 - protein, 1531 aa, Homo sapiens
MGVLVVLTVLWLFSSVKADSKAITTSLTTKWFSTPLLLEASEFLAEDSQEKFWNFVEASQNIGSSDHDGTDYSYYHAILEAAFQFLSPLQQNLFKFCLSLRSYSATIQAFQQIAADEPPPEGCNSFFSVHGKKTCESDTLEALLLTASERPKPLLFKGDHRYPSSNPESPVVIFYSEIGSEEFSNFHRQLISKSNAGKINYVFRHYIFNPRKEPVYLSGYGVELAIKSTEYKAKDDTQVKGTEVNTTVIGENDPIDEVQGFLFGKLRDLHPDLEGQLKELRKHLVESTNEMAPLKVWQLQDLSFQTAARILASPVELALVVMKDLSQNFPTKARAITKTAVSSELRTEVEENQKYFKGTLGLQPGDSALFINGLHMDLDTQDIFSLFDVLRNEARVMEGLHRLGIEGLSLHNVLKLNIQPSEADYAVDIRSPAISWVNNLEVDSRYNSWPSSLQELLRPTFPGVIRQIRKNLHNMVFIVDPAHETTAELMNTAEMFLSNHIPLRIGFIFVVNDSEDVDGMQDAGVAVLRAYNYVAQEVDDYHAFQTLTHIYNKVRTGEKVKVEHVVSVLEKKYPYVEVNSILGIDSAYDRNRKEARGYYEQTGVGPLPVVLFNGMPFEREQLDPDELETITMHKILETTTFFQRAVYLGELPHDQDVVEYIMNQPNVVPRINSRILTAERDYLDLTASNNFFVDDYARFTILDSQGKTAAVANSMNYLTKKGMSSKEIYDDSFIRPVTFWIVGDFDSPSGRQLLYDAIKHQKSSNNVRISMINNPAKEISYENTQISRAIWAALQTQTSNAAKNFITKMAKEGAAEALAAGADIAEFSVGGMDFSLFKEVFESSKMDFILSHAVYCRDVLKLKKGQRAVISNGRIIGPLEDSELFNQDDFHLLENIILKTSGQKIKSHIQQLRVEEDVASDLVMKVDALLSAQPKGDPRIEYQFFEDRHSAIKLRPKEGETYFDVVAVVDPVTREAQRLAPLLLVLAQLINMNLRVFMNCQSKLSDMPLKSFYRYVLEPEISFTSDNSFAKGPIAKFLDMPQSPLFTLNLNTPESWMVESVRTPYDLDNIYLEEVDSVVAAEYELEYLLLEGHCYDITTGQPPRGLQFTLGTSANPVIVDTIVMANLGYFQLKANPGAWILRLRKGRSEDIYRIYSHDGTDSPPDADEVVIVLNNFKSKIIKVKVQKKADMVNEDLLSDGTSENESGFWDSFKWGFTGQKTEEVKQDKDDIINIFSVASGHLYERFLRIMMLSVLKNTKTPVKFWFLKNYLSPTFKEFIPYMANEYNFQYELVQYKWPRWLHQQTEKQRIIWGYKILFLDVLFPLVVDKFLFVDADQIVRTDLKELRDFNLDGAPYGYTPFCDSRREMDGYRFWKSGYWASHLAGRKYHISALYVVDLKKFRKIAAGDRLRGQYQGLSQDPNSLSNLDQDLPNNMIHQVPIKSLPQEWLWCETWCDDASKKRAKTIDLCNNPMTKEPKLEAAVRIVPEWQDYDQEIKQLQIRFQKEKETGALYKEKTKEPSREGPQKREEL

SEQ ID NO: 8890 - protein, 529 aa, Homo sapiens
MSVKWTSVILLIQLSFCFSSGNCGKVLVWAAEYSHWMNIKTILDELIQRGHEVTVLASSASILFDPNNSSALKIEIYPTSLTKTELENFIMQQIKRWSDLPKDTFWLYFSQVQEIMSIFGDITRKFCKDVVSNKKFMKKVQESRFDVIFADAIFPCSELLAELFNIPFVYSLSFSPGYTFEKHSGGFIFPPSYVPVVMSELTDQMTFMERVKNMIYVLYFDFWFEIFDMKKWDQFYSEVLGRPTTLSETMGKADVWLIRNSWNFQFPYPLLPNVDFVGGLHCKPAKPLPKEMEDFVQSSGENGVVVFSLGSMVSNMTEERANVIASALAQIPQKVLWRFDGNKPDTLGLNTRLYKWIPQNDLLGHPKTRAFITHGGANGIYEAIYHGIPMVGIPLFADQPDNIAHMKARGAAVRVDFNTMSSTDLLNALKRVINDPSYKENVMKLSRIQHDQPVKPLDRAVFWIEFVMRHKGAKHLRVAAHDLTWFQYHSLDVIGFLLVCVATVIFIVTKCCLFCFWKFARKAKKGKND

SEQ ID NO: 8891 - protein, 423 aa, Homo sapiens [sequence omitted]

SEQ ID NO: 8892 - protein, 261 aa, Homo sapiens
MALNKNHSEGGGVIVNNTESILMSYDHVELTFNDMKNVPEAFKGTKKGTVYLTPYRVIFLSKGKDAMQSFMMPFYLMKDCEIKQPVFGANYIKGTVKAEAGGGWEGSASYKLTFTAGGAIEFGQRMLQVASQASRGEVPSGAYGYSYMPSGAYVYPPPVANGMYPCPPGYPYPPPPPEFYPGPPMMDGAMGYVQPPPPPYPGPMEPPVSGPDVPSTPAAEAKAAEAAASAYYNPGNPHNVYMPTSQPPPPPYYPPEDKKTQ

SEQ ID NO: 8893 - protein, 216 aa, Homo sapiens
MALNKNHSEGGGVIVNNTESILMSYDHVELTFNDMKNVPEAFKGTKKGTVYLTPYRVIFLSKGKDAMQSFMMPFYLMKDCEIKQPVFGANYIKGTVKAEAGGGWEGSASYKLTFTAGGAIEFGQRMLQVASQEFYPGPPMMDGAMGYVQPPPPPYPGPMEPPVSGPDVPSTPAAEAKAAEAAASAYYNPGNPHNVYMPTSQPPPPPYYPPEDKKTQ

SEQ ID NO: 8894 - protein, 139 aa, Homo sapiens
MYNPWQVGASLAPARAGPRPFPTPRARPPDCSGGHAPSGFPALGLRTAQRPRPFSSSPRSASGRLRGPRPVARGPAHSSSPTGLPAYLPPAAALDSQTSAPTVSPVTRPRVVARGKTPRVSLAGLETLSSLLHQQQLFD

SEQ ID NO: 8895 - protein, 619 aa, Homo sapiens
MANDIDELIGIPFPNHSSEVLCSLNEQRHDGLLCDVLLVVQEQEYRTHRSVLAACSKYFKKLFTAGTLASQPYVYEIDFVQPEALAAILEFAYTSTLTITAGNVKHILNAARMLEIQCIVNVCLEIMEPGGDGGEEDDKEDDDDDEDDDDEEDEEEEEEEEEDDDDDTEDFADQENLPDPQDISCHQSPSKTDHLTEKAYSDTPRDFPDSFQAGSPGHLGVIRDFSIESLLRENLYPKANIPDRRPSLSPFAPDFFPHLWPGDFGAFAQLPEQPMDSGPLDLVIKNRKIKEEEKEELPPPPPPPFPNDFFKDMFPDLPGGPLGPIKAENDYGAYLNFLSATHLGGLFPPWPLVEERKLKPKASQQCPICHKVIMGAGKLPRHMRTHTGEKPYMCTICEVRFTRQDKLKIHMRKHTGERPYLCIHCNAKFVHNYDLKNHMRIHTGVRPYQCEFCYKSFTRSDHLHRHIKRQSCRMARPRRGRKPAAWRAASLLFGPGGPAPDKAAFVMPPALGEVGGHLGGAAVCLPGPSPAKHFLAAPKGALSLQELERQFEETQMKLFGRAQLEAERNAGGLLAFALAENVAAARPYFPLPDPWAAGLAGLPGLAGLNHVASMSEANN

SEQ ID NO: 8896 - protein, 836 aa, Homo sapiens
MTATAEVETPKMEKSASKEEKQQPKQDSTEQGNADSEEWMSSESDPEQISLKSSDNSKSCQPRDGQLKKKEMHSKPHRQLCRSPCLDRPSFSQSSILQDGKLDLEKEYQAKMEFALKLGYAEEQIQSVLNKLGPESLINDVLAELVRLGNKGDSEGQINLSLLVPRGPSSREIASPELSLEDEIDNSDNLRPVVIDGSNVAMSHGNKEEFSCRGIQLAVDWFLDKGHKDITVFVPAWRKEQSRPDAPITDQDILRKLEKEKILVFTPSRRVQGRRVVCYDDRFIVKLAFDSDGIIVSNDNYRDLQVEKPEWKKFIEERLLMYSFVNDKFMPPDDPLGRHGPSLENFLRKRPIVPEHKKQPCPYGKKCTYGHKCKYYHPERANQPQRSVADELRISAKLSTVKTMSEGTLAKCGTGMSSAKGEITSEVKRVAPKRQSDPSIRSVAMEPEEWLSIARKPEASSVPSLVTALSVPTIPPPKSHAVGALNTRSASSPVPGSSHFPHQKASLEHMASMQYPPILVTNSHGTPISYAEQYPKFESMGDHGYYSMLGDFSKLNINSMHNREYYMAEVDRGVYARNPNLCSDSRVSHTRNDNYSSYNNVYLAVADTHPEGNLKLHRSASQNRLQPFPHGYHEALTRVQSYGPEDSKQGPHKQSVPHLALHAQHPSTGTRSSCPADYPMPPNIHPGATPQPGRALVMTRMDSISDSRLYESNPVRQRRPPLCREQHASWDPLPCTTDSYGYHSYPLSNSLMQPCYEPVMVRSVPEKMEQLWRNPWVGMCNDSREHMIPEHQYQTYKNLCNIFPSNIVLAVMEKNPHTADAQQLAALIVAKLRAAR

SEQ ID NO: 8897 - protein, 783 aa, Homo sapiens
MTATAEVETPKMEKSASKEEKQQPKQDSTEQGNADSEEWMSSESDPEQISLKSSDNSKSCQPRDGQLKKKEMHSKPHRQLCRSPCLDRPSFSQNHLLMMYWQSLSDLGTKVIQKGSSREIASPELSLEDEIDNSDNLRPVVIDGSNVAMSHGNKEEFSCRGIQLAVDWFLDKGHKDITVFVPAWRKEQSRPDAPITDQDILRKLEKEKILVFTPSRRVQGRRVVCYDDRFIVKLAFDSDGIIVSNDNYRDLQVEKPEWKKFIEERLLMYSFVNDKFMPPDDPLGRHGPSLENFLRKRPIVPEHKKQPCPYGKKCTYGHKCKYYHPERANQPQRSVADELRISAKLSTVKTMSEGTLAKCGTGMSSAKGEITSEVKRVAPKRQSDPSIRSVAMEPEEWLSIARKPEASSVPSLVTALSVPTIPPPKSHAVGALNTRSASSPVPGSSHFPHQKASLEHMASMQYPPILVTNSHGTPISYAEQYPKFESMGDHGYYSMLGDFSKLNINSMHNREYYMAEVDRGVYARNPNLCSDSRVSHTRNDNYSSYNNVYLAVADTHPEGNLKLHRSASQNRLQPFPHGYHEALTRVQSYGPEDSKQGPHKQSVPHLALHAQHPSTGTRSSCPADYPMPPNIHPGATPQPGRALVMTRMDSISDSRLYESNPVRQRRPPLCREQHASWDPLPCTTDSYGYHSYPLSNSLMQPCYEPVMVRSVPEKMEQLWRNPWVGMCNDSREHMIPEHQYQTYKNLCNIFPSNIVLAVMEKNPHTADAQQLAALIVAKLRAAR

SEQ ID NO: 8898 - protein, 327 aa, Homo sapiens
MEVAVPVKQEAEGLALDSPWHRFRRFHLGDAPGPREALGLLRALCRDWLRPEVHTKEQMLELLVLEQFLSALPADTQAWVCSRQPQSGEEAVALLEELWGPAASPDGSSATRVPQDVTQGPGATGGKEDSGMIPLAGTAPGAEGPAPGDSQAVRPYKQEPSSPPLAPGLPAFLAAPGTTSCPECGKTSLKPAHLLRHRQSHSGEKPHACPECGKAFRRKEHLRRHRDTHPGSPGSPGPALRPLPAREKPHACCECGKTFYWREHLVRHRKTHSGARPFACWECGKGFGRREHVLRHQRIHGRAAASAQGAVAPGPDGGGPFPPWPLG

SEQ ID NO: 8899 - protein, 326 aa, Homo sapiens
MEVAVPVKQEAEGLALDSPWHRFRRFHLGDAPGPREALGLLRALCRDWLRPEVHTKEQMLELLVLEQFLSALPADTQAWVCSRQPQSGEEAVALLEELWGPAASPDGSSATRVPQDVTQGPGATGGKEDSGMIPLGTAPGAEGPAPGDSQAVRPYKQEPSSPPLAPGLPAFLAAPGTTSCPECGKTSLKPAHLLRHRQSHSGEKPHACPECGKAFRRKEHLRRHRDTHPGSPGSPGPALRPLPAREKPHACCECGKTFYWREHLVRHRKTHSGARPFACWECGKGFGRREHVLRHQRIHGRAAASAQGAVAPGPDGGGPFPPWPLG

SEQ ID NO: 8900 - protein, 456 aa, Homo sapiens
MNKFQGPVTLKDVIVEFTKEEWKLLTPAQRTLYKDVMLENYSHLVSVGYHVNKPNAVFKLKQGKEPWILEVEFPHRGFPEDLWSIHDLEARYQESQAGNSRNGELTKHQKTHTTEKACECKECGKFFCQKSALIVHQHTHSKGKSYDCDKCGKSFSKNEDLIRHQKIHTRDKTYECKECKKIFYHLSSLSRHLRTHAGEKPYECNQCEKSFYQKPHLTEHQKTHTGEKPFECTECGKFFYVKAYLMVHQKTHTGEKPYECKECGKAFSQKSHLTVHQRMHTGEKPYKCKECGKFFSRNSHLKTHQRSHTGEKPYECKECRKCFYQKSALTVHQRTHTGEKPFECNKCGKTFYYKSDLTKHQRKHTGEKPYECTECGKSFAVNSVLRLHQRTHTGEKPYACKECGKSFSQKSHFIIHQRKHTGEKPYECQECGETFIQKSQLTAHQKTHTKKRNAEK

SEQ ID NO: 8901 - protein, 362 aa, Homo sapiens
MWNFLSRNGELTKHQKTHTTEKACECKECGKFFCQKSALIVHQHTHSKGKSYDCDKCGKSFSKNEDLIRHQKIHTRDKTYECKECKKIFYHLSSLSRHLRTHAGEKPYECNQCEKSFYQKPHLTEHQKTHTGEKPFECTECGKFFYVKAYLMVHQKTHTGEKPYECKECGKAFSQKSHLTVHQRMHTGEKPYKCKECGKFFSRNSHLKTHQRSHTGEKPYECKECRKCFYQKSALTVHQRTHTGEKPFECNKCGKTFYYKSDLTKHQRKHTGEKPYECTECGKSFAVNSVLRLHQRTHTGEKPYACKECGKSFSQKSHFIIHQRKHTGEKPYECQECGETFIQKSQLTAHQKTHTKKRNAEK

SEQ ID NO: 8902 - protein, 622 aa, Homo sapiens
MEGPGLGSQCRNHSHGPHPPGFGRYGICAHENKELANAREALPLIEDSSNCDIVKATQYGIFERCKELVEAGYDVRQPDKENVSLLHWAAINNRLDLVKFYISKGAVVDQLGGDLNSTPLHWAIRQGHLPMVILLLQHGADPTLIDGEGFSSIHLAVLFQHMPIIAYLISKGQSVNMTDVNGQTPLMLSAHKVIGPEPTGFLLKFNPSLNVVDKIHQNTPLHWAVAAGNVNAVDKLLEAGSSLDIQNVKGETPLDMALQNKNQLIIHMLKTEAKMRANQKFRLWRWLQKCELFLLLMLSVITMWAIGYILDFNSDSWLLKGCLLVTLFFLTSLFPRFLVGYKNLVYLPTAFLLSSVFWIFMTWFILFFPDLAGAPFYFSFIFSIVAFLYFFYKTWATDPGFTKASEEEKKVNIITLAETGSLDFRTFCTSCLIRKPLRSLHCHVCNCCVARYDQHCLWTGRCIGFGNHHYYIFFLFFLSMVCGWIIYGSFIYLSSHCATTFKEDGLWTYLNQIVACSPWVLYILMLATFHFSWSTFLLLNQLFQIAFLGLTSHERISLQKQSKHMKQTLSLRKTPYNLGFMQNLADFFQCGCFGLVKPCVVDWTSQYTMVFHPAREKVLRSV

SEQ ID NO: 8903 - protein, 446 aa, Homo sapiens
MTDVNGQTPLMLSAHKVIGPEPTGFLLKFNPSLNVVDKIHQNTPLHWAVAAGNVNAVDKLLEAGSSLDIQNVKGETPLDMALQNKNQLIIHMLKTEAKMRANQKFRLWRWLQKCELFLLLMLSVITMWAIGYILDFNSDSWLLKGCLLVTLFFLTSLFPRFLVGYKNLVYLPTAFLLSSVFWIFMTWFILFFPDLAGAPFYFSFIFSIVAFLYFFYKTWATDPGFTKASEEEKKVNIITLAETGSLDFRTFCTSCLIRKPLRSLHCHVCNCCVARYDQHCLWTGRCIGFGNHHYYIFFLFFLSMVCGWIIYGSFIYLSSHCATTFKEDGLWTYLNQIVACSPWVLYILMLATFHFSWSTFLLLNQLFQIAFLGLTSHERISLQKQSKHMKQTLSLRKTPYNLGFMQNLADFFQCGCFGLVKPCVVDWTSQYTMVFHPAREKVLRSV

SEQ ID NO: 8904 - protein, 492 aa, Homo sapiens
MVILLLQHGADPTLIDGEGFSSIHLAVLFQHMPIIAYLISKGQSVNMTDVNGQTPLMLSAHKVIGPEPTGFLLKFNPSLNVVDKIHQNTPLHWAVAAGNVNAVDKLLEAGSSLDIQNVKGETPLDMALQNKNQLIIHMLKTEAKMRANQKFRLWRWLQKCELFLLLMLSVITMWAIGYILDFNSDSWLLKGCLLVTLFFLTSLFPRFLVGYKNLVYLPTAFLLSSVFWIFMTWFILFFPDLAGAPFYFSFIFSIVAFLYFFYKTWATDPGFTKASEEEKKVNIITLAETGSLDFRTFCTSCLIRKPLRSLHCHVCNCCVARYDQHCLWTGRCIGFGNHHYYIFFLFFLSMVCGWIIYGSFIYLSSHCATTFKEDGLWTYLNQIVACSPWVLYILMLATFHFSWSTFLLLNQLFQIAFLGLTSHERISLQKQSKHMKQTLSLRKTPYNLGFMQNLADFFQCGCFGLVKPCVVDWTSQYTMVFHPAREKVLRSV

SEQ ID NO: 8905 - protein, 261 aa, Homo sapiens
MAATAREDGASGQERGQRGCEHYDRGCLLKAPCCDKLYTCRLCHDNNEDHQLDRFKVKEVQCINCEKIQHAQQTCEECSTLFGEYYCDICHLFDKDKKQYHCENCGICRIGPKEDFFHCLKCNLCLAMNLQGRHKCIENVSRQNCPICLEDIHTSRVVAHVLPCGHLLHRTCYEEMLKEGYRCPLCMHSALDMTRYWRQLDDEVAQTPMPSEYQNMTVDILCNDCNGRSTVQFHILGMKCKICESYNTAQAGGRRISLDQQ

SEQ ID NO: 8906 - protein, 252 aa, Homo sapiens
MAATAREDGASGQERGQRGCEHYDRGCLLKAPCCDKLYTCRLCHDNNEDHQLDRFKVKEVQCINCEKIQHAQQTCEECSTLFGEYYCDICHLFDKDKKQYHCENCGICRIGPKEDFFHCLKCNLCLAMNLQGRHKCIENVSRQNCPICLEDIHTSRVVAHVLPCGHLLHRGYRCPLCMHSALDMTRYWRQLDDEVAQTPMPSEYQNMTVDILCNDCNGRSTVQFHILGMKCKICESYNTAQAGGRRISLDQQ

SEQ ID NO: 8907 - protein, 179 aa, Homo sapiens
MAATAREDGASGQERGQRGCEHYDRGCLLKAPCCDKLYTCRLCHDNNEDHQLDRFKVKEVQCINCEKIQHAQQTCEECSTLFGEYYCDICHLFDKDKKQYHCENCGICRIGPKEDFFHCLKCNLCLAMNLQGRHKCIENVSRQNCPICLEDIHTSRVVAHVLPCGHLLHRTCYEEMLKE

SEQ ID NO: 8908 - protein, 188 aa, Homo sapiens
MAATAREDGASGQERGQRGCEHYDRGCLLKAPCCDKLYTCRLCHDNNEDHQLDRFKVKEVQCINCEKIQHAQQTCEECSTLFGEYYCDICHLFDKDKKQYHCENCGICRIGPKEDFFHCLKCNLCLAMNLQGRHKCIENVSRQNCPICLEDIHTSRVVAHVLPCGHLLHRTCYEEMLKEYDQVLETAG

SEQ ID NO: 8909 - protein, 75 aa, Homo sapiens
MAATAREDGASGQERGQRGCEHYDRGCLLKAPCCDKLYTCRLCHDNNEDHQLDRFKVKEVQCINCEKNSTCPTDL

SEQ ID NO: 8910 - protein, 239 aa, Homo sapiens
MAPAVKSEAPCCDKLYTCRLCHDNNEDHQLDRFKVKEVQCINCEKIQHAQQTCEECSTLFGEYYCDICHLFDKDKKQYHCENCGICRIGPKEDFFHCLKCNLCLAMNLQGRHKCIENVSRQNCPICLEDIHTSRVVAHVLPCGHLLHRTCYEEMLKEGYRCPLCMHSALDMTRYWRQLDDEVAQTPMPSEYQNMTVDILCNDCNGRSTVQFHILGMKCKICESYNTAQAGGRRISLDQQ

SEQ ID NO: 8911 - protein, 221 aa, Homo sapiens
MAATAREDGASGQERGQRGCEHYDRGCLLKAQQTCEECSTLFGEYYCDICHLFDKDKKQYHCENCGICRIGPKEDFFHCLKCNLCLAMNLQGRHKCIENVSRQNCPICLEDIHTSRVVAHVLPCGHLLHRTCYEEMLKEGYRCPLCMHSALDMTRYWRQLDDEVAQTPMPSEYQNMTVDILCNDCNGRSTVQFHILGMKCKICESYNTAQAGGRRISLDQQ

SEQ ID NO: 8912 - protein, 212 aa, Homo sapiens
MAATAREDGASGQERGQRGCEHYDRGCLLKAQQTCEECSTLFGEYYCDICHLFDKDKKQYHCENCGICRIGPKEDFFHCLKCNLCLAMNLQGRHKCIENVSRQNCPICLEDIHTSRVVAHVLPCGHLLHRGYRCPLCMHSALDMTRYWRQLDDEVAQTPMPSEYQNMTVDILCNDCNGRSTVQFHILGMKCKICESYNTAQAGGRRISLDQQ

SEQ ID NO: 8913 - protein, 489 aa, Homo sapiens
MAAAEPMGPAQVPMNSEVIVDPIQGQVNFEDVFVYFSQEEWVLLDEAQRLLYRDVMLENFALMASLGHTSFMSHIVASLVMGSEPWVPDWVDMTLAVATETPGGSDPGCWHGMEDEEIPFEQSFSIGMSQIRIPKGGPSTQKAYPCGTCGLVLKDILHLAEHQETHPGQKPYMCVLCGKQFCFSANLHQHQKQHSGEKPFRSDKSRPFLLNNCAVQSMEMSFVTGEACKDFLASSSIFEHHAPHNEWKPHSNTKCEEASHCGKRHYKCSECGKTFSRKDSLVQHQRVHTGERPYECGECGKTFSRKPILAQHQRIHTGEMPYECGICGKVFNHSSNLIVHQRVHTGARPYKCSECGKAYSHKSTLVQHESIHTGERPYECSECGKYFGHKYRLIKHWSVHTGARPYECIACGKFFSQSSDLIAHQRVHNGEKPYVCSECGKAFSHKHVLVQHHRIHTGERPYKCSECGKAFRQRASLIRHWKIHTGERP

SEQ ID NO: 8914 - protein, 377 aa, Homo sapiens
MEDEEIPFEQSFSIGMSQIRIPKGGPSTQKAYPCGTCGLVLKDILHLAEHQETHPGQKPYMCVLCGKQFCFSANLHQHQKQHSGEKPFRSDKSRPFLLNNCAVQSMEMSFVTGEACKDFLASSSIFEHHAPHNEWKPHSNTKCEEASHCGKRHYKCSECGKTFSRKDSLVQHQRVHTGERPYECGECGKTFSRKPILAQHQRIHTGEMPYECGICGKVFNHSSNLIVHQRVHTGARPYKCSECGKAYSHKSTLVQHESIHTGERPYECSECGKYFGHKYRLIKHWSVHTGARPYECIACGKFFSQSSDLIAHQRVHNGEKPYVCSECGKAFSHKHVLVQHHRIHTGERPYKCSECGKAFRQRASLIRHWKIHTGERP

SEQ ID NO: 8915 - protein, 448 aa, Homo sapiens
MAAAEPMGPAQVPMNSEVIVDPIQGQVNFEDVFVYFSQEEWVLLDEAQRLLYRDVMLENFALMASLGCWHGMEDEEIPFEQSFSIGMSQIRIPKGGPSTQKAYPCGTCGLVLKDILHLAEHQETHPGQKPYMCVLCGKQFCFSANLHQHQKQHSGEKPFRSDKSRPFLLNNCAVQSMEMSFVTGEACKDFLASSSIFEHHAPHNEWKPHSNTKCEEASHCGKRHYKCSECGKTFSRKDSLVQHQRVHTGERPYECGECGKTFSRKPILAQHQRIHTGEMPYECGICGKVFNHSSNLIVHQRVHTGARPYKCSECGKAYSHKSTLVQHESIHTGERPYECSECGKYFGHKYRLIKHWSVHTGARPYECIACGKFFSQSSDLIAHQRVHNGEKPYVCSECGKAFSHKHVLVQHHRIHTGERPYKCSECGKAFRQRASLIRHWKIHTGERP

SEQ ID NO: 8916 - protein, 1235 aa, Homo sapiens
MPAGGRAGSLKDPDVAELFFKDDPEKLFSDLREIGHGSFGAVYFARDVRNSEVVAIKKMSYSGKQSNEKWQDIIKEVRFLQKLRHPNTIQYRGCYLREHTAWLVMEYCLGSASDLLEVHKKPLQEVEIAAVTHGALQGLAYLHSHNMIHRDVKAGNILLSEPGLVKLGDFGSASIMAPANSFVGTPYWMAPEVILAMDEGQYDGKVDVWSLGITCIELAERKPPLFNMNAMSALYHIAQNESPVLQSGHWSEYFRNFVDSCLQKIPQDRPTSEVLLKHRFVLRERPPTVIMDLIQRTKDAVRELDNLQYRKMKKILFQEAPNGPGAEAPEEEEEAEPYMHRAGTLTSLESSHSVPSMSISASSQSSSVNSLADASDNEEEEEEEEEEEEEEEGPEAREMAMMQEGEHTVTSHSSIIHRLPGSDNLYDDPYQPEITPSPLQPPAAPAPTSTTSSARRRAYCRNRDHFATIRTASLVSRQIQEHEQDSALREQLSGYKRMRRQHQKQLLALESRLRGEREEHSARLQRELEAQRAGFGAEAEKLARRHQAIGEKEARAAQAEERKFQQHILGQQKKELAALLEAQKRTYKLRKEQLKEELQENPSTPKREKAEWLLRQKEQLQQCQAEEEAGLLRRQRQYFELQCRQYKRKMLLARHSLDQDLLREDLNKKQTQKDLECALLLRQHEATRELELRQLQAVQRTRAELTRLQHQTELGNQLEYNKRREQELRQKHAAQVRQQPKSLKVRAGQRPPGLPLPIPGALGPPNTGTPIEQQPCSPGQEAVLDQRMLGEEEEAVGERRILGKEGATLEPKQQRILGEESGAPSPSPQKHGSLVDEEVWGLPEEIEELRVPSLVPQERSIVGQEEAGTWSLWGKEDESLLDEEFELGWVQGPALTPVPEEEEEEEEGAPIGTPRDPGDGCPSPDIPPEPPPTHLRPCPASQLPGLLSHGLLAGLSFAVGSSSGLLPLLLLLLLPLLAAQGGGGLQAALLALEVGLVGLGASYLLLCTALHLPSSLFLLLAQGTALGAVLGLSWRRGLMGVPLGLGAAWLLAWPGLALPLVAMAAGGRWVRQQGPRVRRGISRLWLRVLLRLSPMAFRALQGCGAVGDRGLFALYPKTNKDGFRSRLPVPGPRRRNPRTTQHPLALLARVWVLCKGWNWRLARASQGLASHLPPWAIHTLASWGLLRGERPTRIPRLLPRSQRQLGPPASRQPLPGTLAGRRSRTRQSRALPPWR

SEQ ID NO: 8917 - protein, 1049 aa, Homo sapiens
MPAGGRAGSLKDPDVAELFFKDDPEKLFSDLREIGHGSFGAVYFARDVRNSEVVAIKKMSYSGKQSNEKWQDIIKEVRFLQKLRHPNTIQYRGCYLREHTAWLVMEYCLGSASDLLEVHKKPLQEVEIAAVTHGALQGLAYLHSHNMIHRDVKAGNILLSEPGLVKLGDFGSASIMAPANSFVGTPYWMAPEVILAMDEGQYDGKVDVWSLGITCIELAERKPPLFNMNAMSALYHIAQNESPVLQSGHWSEYFRNFVDSCLQKIPQDRPTSEVLLKHRFVLRERPPTVIMDLIQRTKDAVRELDNLQYRKMKKILFQEAPNGPGAEAPEEEEEAEPYMHRAGTLTSLESSHSVPSMSISASSQSSSVNSLADASDNEEEEEEEEEEEEEEEGPEAREMAMMQEGEHTVTSHSSIIHRLPGSDNLYDDPYQPEITPSPLQPPAAPAPTSTTSSARRRAYCRNRDHFATIRTASLVSRQIQEHEQDSALREQLSGYKRMRRQHQKQLLALESRLRGEREEHSARLQRELEAQRAGFGAEAEKLARRHQAIGEKEARAAQAEERKFQQHILGQQKKELAALLEAQKRTYKLRKEQLKEELQENPSTPKREKAEWLLRQKEQLQQCQAEEEAGLLRRQRQYFELQCRQYKRKMLLARHSLDQDLLREDLNKKQTQKDLECALLLRQHEATRELELRQLQAVQRTRAELTRLQHQTELGNQLEYNKRREQELRQKHAAQVRQQPKSLKSKELQIKKQFQETCKIQTRQYKALRAHLLETTPKAQHKSLLKRLKEEQTRKLAILAEQYDQSISEMLSSQALRLDETQEAEFQALRQQLQQELELLNAYQSKIKIRTESQHERELRELEQRVALRRALLEQRVEEELLALQTGRSERIRSLLERQAREIEAFDAESMRLGFSSMALGGIPAEAAAQGYPAPPPAPAWPSRPVPRSGAHWSHGPPPPGMPPPAWRQPSLLAPPGPPNWLGPPTQSGTPRGGALLLLRNSPQPLRRAASGGSGSENVGPPAAAVPGPLSRSTSVASHILNGSSHFYS

SEQ ID NO: 8918 - protein, 1062 aa, Homo sapiens
MMGTSQGHVARKSRNWGLNPSRLSSIPLSSTPCHLSPSSLSPFSVAERKPPLFNMNAMSALYHIAQNESPVLQSGHWSEYFRNFVDSCLQKIPQDRPTSEVLLKHRFVLRERPPTVIMDLIQRTKDAVRELDNLQYRKMKKILFQEAPNGPGAEAPEEEEEAEPYMHRAGTLTSLESSHSVPSMSISASSQSSSVNSLADASDNEEEEEEEEEEEEEEEGPEAREMAMMQEGEHTVTSHSSIIHRLPGSDNLYDDPYQPEITPSPLQPPAAPAPTSTTSSARRRAYCRNRDHFATIRTASLVSRQIQEHEQDSALREQLSGYKRMRRQHQKQLLALESRLRGEREEHSARLQRELEAQRAGFGAEAEKLARRHQAIGEKEARAAQAEERKFQQHILGQQKKELAALLEAQKRTYKLRKEQLKEELQENPSTPKREKAEWLLRQKEQLQQCQAEEEAGLLRRQRQYFELQCRQYKRKMLLARHSLDQDLLREDLNKKQTQKDLECALLLRQHEATRELELRQLQAVQRTRAELTRLQHQTELGNQLEYNKRREQELRQKHAAQVRQQPKSLKVRAGQRPPGLPLPIPGALGPPNTGTPIEQQPCSPGQEAVLDQRMLGEEEEAVGERRILGKEGATLEPKQQRILGEESGAPSPSPQKHGSLVDEEVWGLPEEIEELRVPSLVPQERSIVGQEEAGTWSLWGKEDESLLDEEFELGWVQGPALTPVPEEEEEEEEGAPIGTPRDPGDGCPSPDIPPEPPPTHLRPCPASQLPGLLSHGLLAGLSFAVGSSSGLLPLLLLLLLPLLAAQGGGGLQAALLALEVGLVGLGASYLLLCTALHLPSSLFLLLAQGTALGAVLGLSWRRGLMGVPLGLGAAWLLAWPGLALPLVAMAAGGRWVRQQGPRVRRGISRLWLRVLLRLSPMAFRALQGCGAVGDRGLFALYPKTNKDGFRSRLPVPGPRRRNPRTTQHPLALLARVWVLCKGWNWRLARASQGLASHLPPWAIHTLASWGLLRGERPTRIPRLLPRSQRQLGPPASRQPLPGTLAGRRSRTRQSRALPPWR

SEQ ID NO: 8919 - protein, 1122 aa, Homo sapiens
MPAGGRAGSLKDPDVAELFFKDDPEKLFSDLREIGHGSFGAVYFARDVRNSEVVAIKKMSYSGKQSNEKWQDIIKEVRFLQKLRHPNTIQYRGCYLREHTAWLVMEYCLGSASDLLEVHKKPLQEVEIAAVTHGALQGLAYLHSHNMIHRDVKAGNILLSEPGLVKLGDFGSASIMAPANSFVGTPYWMAPEVILAMDEGQYDGKVDVWSLGITCIELAERKPPLFNMNAMSALYHIAQNESPVLQSGHWSEYFRNFVDSCLQKIPQDRPTSEVLLKHRFVLRERPPTVIMDLIQRTKDAVRELDNLQYRKMKKILFQEAPNGPGAEAPEEEEEAEPYMHRAGTLTSLESSHSVPSMSISASSQSSSVNSLADASDNEEEEEEEEEEEEEEEGPEAREMAMMQEGEHTVTSHSSIIHRLPGSDNLYDDPYQPEITPSPLQPPAAPAPTSTTSSARRRAYCRNRDHFATIRTASLVSRQIQEHEQDSALREQLSGYKRMRRQHQKQLLALESRLRGEREEHSARLQRELEAQRAGFGAEAEKLARRHQAIGEKEARAAQAEERKFQQHILGQQKKELAALLEAQKRTYKLRKEQLKEELQENPSTPKREKAEWLLRQKEQLQQCQAEEEAGLLRRQRQYFELQCRQYKRKMLLARHSLDQDLLREDLNKKQTQKDLECALLLRQHEATRELELRQLQAVQRTRAELTRLQHQTELGNQLEYNKRREQELRQKHAAQVRQQPKSLKERSIVGQEEAGTWSLWGKEDESLLDEEFELGWVQGPALTPVPEEEEEEEEGAPIGTPRDPGDGCPSPDIPPEPPPTHLRPCPASQLPGLLSHGLLAGLSFAVGSSSGLLPLLLLLLLPLLAAQGGGGLQAALLALEVGLVGLGASYLLLCTALHLPSSLFLLLAQGTALGAVLGLSWRRGLMGVPLGLGAAWLLAWPGLALPLVAMAAGGRWVRQQGPRVRRGISRLWLRVLLRLSPMAFRALQGCGAVGDRGLFALYPKTNKDGFRSRLPVPGPRRRNPRTTQHPLALLARVWVLCKGWNWRLARASQGLASHLPPWAIHTLASWGLLRGERPTRIPRLLPRSQRQLGPPASRQPLPGTLAGRRSRTRQSRALPPWR

SEQ ID NO: 8920 - protein, 589 aa, Homo sapiens
MKRVRTEQIQMAVSCYLKRRQYVDSDGPLKQGLRLSQTAEEMAANLTVQSESGCANIVSAAPCQAEPQQYEVQFGRLRNFLTDSDSQHSHEVMPLLYPLFVYLHLNLVQNSPKSTVESFYSRFHGMFLQNASQKDVIEQLQTTQTIQDILSNFKLRAFLDNKYVVRLQEDSYNYLIRYLQSDNNTALCKVLTLHIHLDVQPAKRTDYQLYASGSSSRSENNGLEPPDMPSPILQNEAALEVLQESIKRVKDGPPSLTTICFYAFYNTEQLLNTAEISPDSKLLAAGFDNSCIKLWSLRSKKLKSEPHQVDVSRIHLACDILEEEDDEDDNAGTEMKILRGHCGPVYSTRFLADSSGLLSCSEDMSIRYWDLGSFTNTVLYQGHAYPVWDLDISPYSLYFASGSHDRTARLWSFDRTYPLRIYAGHLADVDCVKFHPNSNYLATGSTDKTVRLWSAQQGNSVRLFTGHRGPVLSLAFSPNGKYLASAGEDQRLKLWDLASGTLYKELRGHTDNITSLTFSPDSGLIASASMDNSVRVWDIRNTYCSAPADGSSSELVGVYTGQMSNVLSVQFMACNLLLVTGITQENQEH

SEQ ID NO: 8921 - protein, 325 aa, Homo sapiens
MKRVRTEQIQMAVSCYLKRRQYVDSDGPLKQGLRLSQTAEEMAANLTVQSESGCANIVSAAPCQAEPQQYEVQFGRLRNFLTDSDSQHSHEVMPLLYPLFVYLHLNLVQNSPKSTVESFYSRFHGMFLQNASQKDVIEQLQTTQTIQDILSNFKLRAFLDNKYVVRLQEDSYNYLIRYLQSDNNTALCKVLTLHIHLDVQPAKRTDYQLYASGSSSRSENNGLEPPDMPSPILQNEAALEVLQESIKRVKDGPPSLTTICFYAFYNTEQLLNTAEISPDSKLLAAGFDNSCIKLWSLRSKKLKSEPHQVDVSRIHLACDILEEEV

SEQ ID NO: 8922 - protein, 307 aa, Homo sapiens
MQAALTAFFVLLFSLLSLLGIAANGFIVLVLGREWLRYGRLLPLDMILISLGASRFCLQLVGTVHNFYYSAQKVEYSGGLGRQFFHLHWHFLNSATFWFCSWLSVLFCVKIANITHSTFLWLKWRFPGWVPWLLLGSVLISFIITLLFFWVNYPVYQEFLIRKFSGNMTYKWNTRIETYYFPSLKLVIWSIPFSVFLVSIMLLINSLRRHTQRMQHNGHSLQDPSTQAHTRALKSLISFLILYALSFLSLIIDAAKFISMQNDFYWPWQIAVYLCISVHPFILIFSNLKLRSVFSQLLLLARGFWVA

SEQ ID NO: 8923 - protein, 109 aa, Homo sapiens
MAYQLYRNTTLGNSLQESLDELIQSQQITPQLALQVLLQFDKAINAALAQRVRNRVNFRGSLNTYRFCDNVWTFVLNDVEFREVTELIKVDKVKIVACDGKNTGSNTTE

SEQ ID NO: 8924 - protein, 326 aa, Homo sapiens
MQPPVPGPLGLLDPAEGLSRRKKTSLWFVGSLLLVSVLIVTVGLAATTRTENVTVGGYYPGIILGFGSFLGIIGINLVENRRQMLVAAIVFISFGVVAAFCCAIVDGVFAAQHIEPRPLTTGRCQFYSSGVGYLYDVYQTEVTCHSLDGKCQLKVRSNTCYCCDLYACGSAEPSPAYYEFIGVSGCQDVLHLYRLLWASAVLNVLGLFLGIITAAVLGAFKDMVPLSQLAYGPAVPPQTLYNPAQQILAYAGFRLTPEPVPTCSSYPLPLQPCSRFPVAPSSALASSEDLQPPSPSSSGSGLPGQAPPCYAPTYFPPGEKPPPYAP

SEQ ID NO: 8925 - protein, 161 aa, Homo sapiens
MNLAISIALLLTVLQVSRGQKVTSLTACLVDQSLRLDCRHENTSSSPIQYEFSLTRETKKHVLFGTVGVPEHTYRSRTNFTSKYNMKVLYLSAFTSKDEGTYTCALHHSGHSPPISSQNVTVLRDKLVKCEGISLLAQNTSWLLLLLLSLSLLQATDFMSL

SEQ ID NO: 8926 - protein, 1018 aa, Homo sapiens
MVSHFMGSLSVLCFLLLLGFQFVCPQPSTQHRKVPQRMAAEGAPEDDGGGGAPGVWGAWGPWSACSRSCSGGVMEQTRPCLPRSYRLRGGQRPGAPARAFADHVVSAVRTSVPLHRSRDETPALAGTDASRQGPTVLRGSRHPQPQGLEVTGDRRSRTRGTIGPGKYGYGKAPYILPLQTDTAHTPQRLRRQKLSSRHSRSQGASSARHGYSSPAHQVPQHGPLYQSDSGPRSGLQAAEAPIYQLPLTHDQGYPAASSLFHSPETSNNHGVGTHGATQSFSQPARSTAISCIGAYRQYKLCNTNVCPESSRSIREVQCASYNNKPFMGRFYEWEPFAEVKGNRKCELNCQAMGYRFYVRQAEKVIDGTPCDQNGTAICVSGQCKSIGCDDYLGSDKVVDKCGVCGGDNTGCQVVSGVFKHALTSLGYHRVVEIPEGATKINITEMYKSNNYLALRSRSGRSIINGNWAIDRPGKYEGGGTMFTYKRPNEISSTAGESFLAEGPTNEILDVYMIHQQPNPGVHYEYVIMGTNAISPQVPPHRRPGEPFNGQMVTEGRSQEEGEQKGRNEEKEDLRGEAPEMFTSESAQTFPVRHPDRFSPHRPDNLVPPAPQPPRRSRDHNWKQLGTTECSTTCGKGSQYPIFRCVHRSTHEEAPESYCDSSMKPTPEEEPCNIFPCPAFWDIGEWSECSKTCGLGMQHRQVLCRQVYANRSLTVQPYRCQHLEKPETTSTCQLKICSEWQIRTDWTSCSVPCGVGQRTRDVKCVSNIGDVVDDEECNMKLRPNDIENCDMGPCAKSWFLTEWSERCSAECGAGVRTRSVVCMTNHVSSLPLEGCGNNRPAEATPCDNGPCTGKVEWFAGSWSQCSIECGSGTQQREVICVRKNADTFEVLDPSECSFLEKPPSQQSCHLKPCGAKWFSTEWSMCSKSCQGGFRVREVRCLSDDMTLSNLCDPQLKPEERESCNPQDCVPEVDENCKDKYYNCNVVVQARLCVYNYYKTACCASCTRVANRQTGFLGSR

SEQ ID NO: 8927 - protein, 523 aa, Homo sapiens
MVSHFMGSLSVLCFLLLLGFQFVCPQPSTQHRKVPQRMAAEGAPEDDGGGGAPGVWGAWGPWSACSRSCSGGVMEQTRPCLPRSYRLRGGQRPGAPARAFADHVVSAVRTSVPLHRSRDETPALAGTDASRQGPTVLRGSRHPQPQGLEVTGDRRSRTRGTIGPGKYGYGKAPYILPLQTDTAHTPQRLRRQKLSSRHSRSQGASSARHGYSSPAHQVPQHGPLYQSDSGPRSGLQAAEAPIYQLPLTHDQGYPAASSLFHSPETSNNHGVGTHGATQSFSQPARSTAISCIGAYRQYKLCNTNVCPESSRSIREVQCASYNNKPFMGRFYEWEPFAEVKGNRKCELNCQAMGYRFYVRQAEKVIDGTPCDQNGTAICVSGQCKSIGCDDYLGSDKVVDKCGVCGGDNTGCQVVSGVFKHALTSLGYHRVVEIPEGATKINITEMYKSNNYLALRSRSGRSIINGNWAIDRPGKYEGGGTMFTYKRPNEISSTAGESFLAEGPTNEILDVYVSLDVSGLFFGF

SEQ ID NO: 8928 - protein, 219 aa, Homo sapiens
MFVSYLILTLLHVQTAVLARPGGESIGCDDYLGSDKVVDKCGVCGGDNTGCQVVSGVFKHALTSLGYHRVVEIPEGATKINITEMYKSNKKKSHLKPATRGSQFSSVKVCSVPAACKLLGTPGRARQPVPAPRELEHDKNSPHCAYLSLYLTSLAQSSWRVFSLFSYVLIYLFSKYLAFNTLFALKRMALQRDRKEKTRAWCIFIKLCGREIQILPGPV

SEQ ID NO: 8929 - protein, 658 aa, Homo sapiens
MFVSYLILTLLHVQTAVLARPGGESIGCDDYLGSDKVVDKCGVCGGDNTGCQVVSGVFKHALTSLGYHRVVEIPEGATKINITEMYKSNNYLALRSRSGRSIINGNWAIDRPGKYEGGGTMFTYKRPNEISSTAGESFLAEGPTNEILDVYMIHQQPNPGVHYEYVIMGTNAISPQVPPHRRPGEPFNGQMVTEGRSQEEGEQKGRNEEKEDLRGEAPEMFTSESAQTFPVRHPDRFSPHRPDNLVPPAPQPPRRSRDHNWKQLGTTECSTTCGKGSQYPIFRCVHRSTHEEAPESYCDSSMKPTPEEEPCNIFPCPAFWDIGEWSECSKTCGLGMQHRQVLCRQVYANRSLTVQPYRCQHLEKPETTSTCQLKICSEWQIRTDWTSCSVPCGVGQRTRDVKCVSNIGDVVDDEECNMKLRPNDIENCDMGPCAKSWFLTEWSERCSAECGAGVRTRSVVCMTNHVSSLPLEGCGNNRPAEATPCDNGPCTGKVEWFAGSWSQCSIECGSGTQQREVICVRKNADTFEVLDPSECSFLEKPPSQQSCHLKPCGAKWFSTEWSMCSKSCQGGFRVREVRCLSDDMTLSNLCDPQLKPEERESCNPQDCVPEVDENCKDKYYNCNVVVQARLCVYNYYKTACCASCTRVANRQTGFLGSR

SEQ ID NO: 8930 - protein, 940 aa, Homo sapiens
MISAHCNLRLLCSSDSSASASQVAGTTEVVENLVTNDNSPNIPEAIDRLFSDIANINRESMAEITDIQIEEMAVNLWNWALTIGGGWLVNEEQKIRLHYVACKLLSMCEASFASEQSIQRLIMMNMRIGKEWLDAGNFLIADECFQAAVASLEQLYVKLIQRSSPEADLTMEKITVESDHFRVLSYQAESAVAQGDFQRASMCVLQCKDMLMRLPQMTSSLHHLCYNFGVETQKNNKYEESSFWLSQSYDIGKMDKKSTGPEMLAKVLRLLATNYLDWDDTKYYDKALNAVNLANKEHLSSPGLFLKMKILLKGETSNEELLEAVMEILHLDMPLDFCLNIAKLLMDHERESVGFHFLTIIHERFKSSENIGKVLILHTDMLLQRKEELLAKEKIEEIFLAHQTGRQLTAESMNWLHNILWRQAASSFEVQNYTDALQWYYYSLRFYSTDEMDLDFTKLQRNMACCYLNLQQLDKAKEAVAEAERHDPRNVFTQFYIFKIAVIEGNSERALQAIITLENILTDEESEDNDLVAERGSPTMLLSLAAQFALENGQQIVAEKALEYLAQHSEDQEQVLTAVKCLLRFLLPKIAEMPESEDKKKEMDRLLTCLNRAFVKLSQPFGEEALSLESRANEAQWFRKTAWNLAVQCDKDPVMMREFFILSYKMSQFCPSDQVILIARKTCLLMAVAVDLEQGRKASTAFEQTMFLSRALEEIQTCNDIHNFLKQTGTFSNDSCEKLLLLYEFEVRAKLNDPLLESFLESVWELPHLETKTFETIAIIAMEKPAHYPLIALKALKKALLLYKKEEPIDISQYSKCMHNLVNLSVPDGASNVELCPLEEVWGYFEDALSHISRTKDYPEMEILWLMVKSWNTGVLMFSRSKYASAEKWCGLALRFLNHLTSFKESYETQMNMLYSQLVEALSNNKGPVFHEHGYWSKSD

SEQ ID NO: 8931 - protein, 615 aa, Homo sapiens
MEILHLDMPLDFCLNIAKLLMDHERESVGFHFLTIIHERFKSSENIGKVLILHTDMLLQRKEELLAKEKIEEIFLAHQTGRQLTAESMNWLHNILWRQAASSFEVQNYTDALQWYYYSLRFYSTDEMDLDFTKLQRNMACCYLNLQQLDKAKEAVAEAERHDPRNVFTQFYIFKIAVIEGNSERALQAIITLENILTDEESEDNDLVAERGSPTMLLSLAAQFALENGQQIVAEKALEYLAQHSEDQEQVLTAVKCLLRFLLPKIAEMPESEDKKKEMDRLLTCLNRAFVKLSQPFGEEALSLESRANEAQWFRKTAWNLAVQCDKDPVMMREFFILSYKMSQFCPSDQVILIARKTCLLMAVAVDLEQGRKASTAFEQTMFLSRALEEIQTCNDIHNFLKQTGTFSNDSCEKLLLLYEFEVRAKLNDPLLESFLESVWELPHLETKTFETIAIIAMEKPAHYPLIALKALKKALLLYKKEEPIDISQYSKCMHNLVNLSVPDGASNVELCPLEEVWGYFEDALSHISRTKDYPEMEILWLMVKSWNTGVLMFSRSKYASAEKWCGLALRFLNHLTSFKESYETQMNMLYSQLVEALSNNKGPVFHEHGYWSKSD

SEQ ID NO: 8932 - protein, 925 aa, Homo sapiens
MDNDDFFSMDFKEVVENLVTNDNSPNIPEAIDRLFSDIANINRESMAEITDIQIEEMAVNLWNWALTIGGGWLVNEEQKIRLHYVACKLLSMCEASFASEQSIQRLIMMNMRIGKEWLDAGNFLIADECFQAAVASLEQLYVKLIQRSSPEADLTMEKITVESDHFRVLSYQAESAVAQGDFQRASMCVLQCKDMLMRLPQMTSSLHHLCYNFGVETQKNNKYEESSFWLSQSYDIGKMDKKSTGPEMLAKVLRLLATNYLDWDDTKYYDKALNAVNLANKEHLSSPGLFLKMKILLKGETSNEELLEAVMEILHLDMPLDFCLNIAKLLMDHERESVGFHFLTIIHERFKSSENIGKVLILHTDMLLQRKEELLAKEKIEEIFLAHQTGRQLTAESMNWLHNILWRQAASSFEVQNYTDALQWYYYSLRFYSTDEMDLDFTKLQRNMACCYLNLQQLDKAKEAVAEAERHDPRNVFTQFYIFKIAVIEGNSERALQAIITLENILTDEESEDNDLVAERGSPTMLLSLAAQFALENGQQIVAEKALEYLAQHSEDQEQVLTAVKCLLRFLLPKIAEMPESEDKKKEMDRLLTCLNRAFVKLSQPFGEEALSLESRANEAQWFRKTAWNLAVQCDKDPVMMREFFILSYKMSQFCPSDQVILIARKTCLLMAVAVDLEQGRKASTAFEQTMFLSRALEEIQTCNDIHNFLKQTGTFSNDSCEKLLLLYEFEVRAKLNDPLLESFLESVWELPHLETKTFETIAIIAMEKPAHYPLIALKALKKALLLYKKEEPIDISQYSKCMHNLVNLSVPDGASNVELCPLEEVWGYFEDALSHISRTKDYPEMEILWLMVKSWNTGVLMFSRSKYASAEKWCGLALRFLNHLTSFKESYETQMNMLYSQLVEALSNNKGPVFHEHGYWSKSD

SEQ ID NO: 8933 - protein, 204 aa, Homo sapiens
MGAPLAVALGALHYLALFLQLGGATRPAGHAPWDNHVSGHALFTETPHDMTARTGEDVEMACSFRGSGSPSYSLEIQWWYVRSHRDWTDKQAWASNQLKASQQEDAGKEATKISVVKVVGSNISHKLRLSRVKPTDEGTYECRVIDFSDGKARHHKVKAYLRVQPGENSVLHLPEAPPAAPAPPPPKPGKELRKRSVDQEACSL

SEQ ID NO: 8934 - protein, 149 aa, Homo sapiens
MGAPLAVALGALHYLALFLQLGGATRPAGHAPWDNHVSGHALFTETPHDMTARTGEDVEMACSFRGSGSPSYSLEIQWWYVRSHRDWTDKQAWASNQVVKVVGSNISHKLRLSRVKPTDEGTYECRVIDFSDGKARHHKVKAYLRVQPG

SEQ ID NO: 8935 - protein, 132 aa, Homo sapiens
MGAPLAVALGALHYLALFLQLGGATRPAGHAPWDNHVSGHGGQGGGQQHLPQAAPVPGEAHGRRHLRVPRHRLQRRQGPAPQGQGLPAGAARGELRPASARSPSRRARPAAPQARQGAEEALGGPGGLQPLD

SEQ ID NO: 8936 - protein, 395 aa, Homo sapiens
MALPGYPLGNVDDSRSKDSPAGEPQGQVPLTADVLAVSSSVASTDWQDIDQASFKTATPRAISTSGDKDKSAVVPEHGQKTPRKITPLLPSQNPSPLQVSMSLQNPAWDRQVQDARTSQSLVVFPSHLLGKDKMSQMASVPEREPESAPSAPSAELQSTQHMEAQPVESDADHVTAGANGQHGPQAASTTKSAEEKAEHPKAPHPEAEALPSDESPVAMGANVVDSLGDLQTWFFPPPPAGSVSPSPGPHEVALGRRPLDSSLYTASEENSYMRSMTSLLDRGEGSISSLADILVWSETTMGMAIATGFLDSGHSTVADLLHSSGPSLRSVPSLVGSVSSAFSSGLVSGTSSALRTITRVLETVEQRTVEGIRSAMRYLTSHLTPRQAQADPNYD

SEQ ID NO: 8937 - protein, 447 aa, Homo sapiens
MEFTASPKPQLSSRANAFSIAALMSSGGSKEKEATENTIKPLEQFVEKSSCAQPLGELTSLDAHGEFGGGSGSSPSSSSLCTEPLIPTTPIIPSEEMAKIACSLETKELWDKFHELGTEMIITKSGRRMFPTIRVSFSGVDPEAKYIVLMDIVPVDNKRYRYAYHRSSWLVAGKADPPLPARLYVHPDSPFTGEQLLKQMVSFEKVKLTNNELDQHGHIILNSMHKYQPRVHIIKKKDHTASLLNLKSEEFRTFIFPETVFTAVTAYQNQLITKLKIDSNPFAKGFRDSSRLTDIERESVESLIQKHSYARSPIRTYGGEEDVLGDESQTTPNRGSAFTTSDNLSLSSWVSSSSSFPGFQHPQSLTALGTSTASIATPIPHPIQGSLPPYSRLGMPLTPSAIASSMQGSGPTFPSFHMPRYHHYFQQGPYAAIQGLRHSSAVMTPFV

SEQ ID NO: 8938 - protein, 435 aa, Homo sapiens
MSSPGTESAGKSLQYRVDHLLSAVENELQAGSEKGDPTERELRVGLEESELWLRFKELTNEMIVTKNGRRMFPVLKVNVSGLDPNAMYSFLLDFVAADNHRWKYVNGEWVPGGKPEPQAPSCVYIHPDSPNFGAHWMKAPVSFSKVKLTNKLNGGGQIMLNSLHKYEPRIHIVRVGGPQRMITSHCFPETQFIAVTAYQNEEITALKIKYNPFAKAFLDAKERSDHKEMMEEPGDSQQPGYSQWGWLLPGTSTLCPPANPHPQFGGALSLPSTHSCDRYPTLRSHRSSPYPSPYAHRNNSPTYSDNSPACLSMLQSHDNWSSLGMPAHPSMLPVSHNASPPTSSSQYPSLWSVSNGAVTPGSQAAAVSNGLGAQFFRGSPAHYTPLTHPVSAPSSSGSPLYEGAAAATDIVDSQYDAAAQGRLIASWTPVSPPSM

SEQ ID NO: 8939 - protein, 377 aa, Homo sapiens
MSSPGTESAGKSLQYRVDHLLSAVENELQAGSEKGDPTERELRVGLEESELWLRFKELTNEMIVTKNGRRMFPVLKVNVSGLDPNAMYSFLLDFVAADNHRWKYVNGEWVPGGKPEPQAPSCVYIHPDSPNFGAHWMKAPVSFSKVKLTNKLNGGGQIMLNSLHKYEPRIHIVRVGGPQRMITSHCFPETQFIAVTAYQNEEITALKIKYNPFAKAFLDAKERSDHKEMMEEPGDSQQPGYSQSYSDNSPACLSMLQSHDNWSSLGMPAHPSMLPVSHNASPPTSSSQYPSLWSVSNGAVTPGSQAAAVSNGLGAQFFRGSPAHYTPLTHPVSAPSSSGSPLYEGAAAATDIVDSQYDAAAQGRLIASWTPVSPPSM

SEQ ID NO: 8940 - protein, 712 aa, Homo sapiens
MREPALAASAMAYHPFHAPRPADFPMSAFLAAAQPSFFPALALPPGALAKPLPDPGLAGAAAAAAAAAAAAEAGLHVSALGPHPPAAHLRSLKSLEPEDEVEDDPKVTLEAKELWDQFHKLGTEMVITKSGRRMFPPFKVRVSGLDKKAKYILLMDIVAADDCRYKFHNSRWMVAGKADPEMPKRMYIHPDSPATGEQWMAKPVAFHKLKLTNNISDKHGFTILNSMHKYQPRFHIVRANDILKLPYSTFRTYVFPETDFIAVTAYQNDKITQLKIDNNPFAKGFRDTGNGRREKRKQLTLPSLRLYEEHCKPERDGAESDASSCDPPPAREPPTSPGAAPSPLRLHRARAEEKSCAADSDPEPERLSEERAGAPLGRSPAPDSASPTRLTEPERARERRSPERGKEPAESGGDGPFGLRSLEKERAEARRKDEGRKEAAEGKEQGLAPLVVQTDSASPLGAGHLPGLAFSSHLHGQQFFGPLGAGQPLFLHPGQFTMGPGAFSAMGMGHLLASVAGGGNGGGGGPGTAAGLDAGGLGPAASAASTAAPFPFHLSQHMLASQGIPMPTFGGLFPYPYTYMAAAAAAASALPATSAAAAAAAAAGSLSRSPFLGSARPRLRFSPYQIPVTIPPSTSLLTTGLASEGSKAAGGNSREPSPLPELALRKVGAPSRGALSPSGSAKEAANELQSIQRLVSGLESQRALSPGRESPK

SEQ ID NO: 8941 - protein, 202 aa, Homo sapiens
MELWGAYLLLCLFSLLTQVTTEPPTQKPKKIVNAKKDVVNTKMFEELKSRLDTLAQEVALLKEQQALQTVCLKGTKVHMKCFLAFTQTKTFHEASEDCISRGGTLGTPQTGSENDALYEYLRQSVGNEAEIWLGLNDMAAEGTWVDMTGARIAYKNWETEITAQPDGGKTENCAVLSGAANGKWFDKRCRDQLPYICQFGIV

SEQ ID NO: 8942 - protein, 206 aa, Homo sapiens
MDSQQEDLRFPGMWVSLYFGILGLCSVITGGCIIFLHWRKNLRREEHAQQWVEVMRAATFTYSPLLYWINKRRRYGMNAAINTGPAPAVTKTETEVQNPDVLWDLDIPEGRSHADQDSNPKAEAPAPLQPALQLAPQQPQARSPFPLPIFQEVPFAPPLCNLPPLLNHSVSYPLATCPERNVLFHSLLNLAQEDHSFNAKPFPSEL

SEQ ID NO: 8943 - protein, 536 aa, Homo sapiens
MEEPPQEALAEPLKHESPAAPSSAGHTKGQEEDDQKNQAERKADNHTAHRIADQTALRVPSQAESSIFSQATNGVAEQNGHSTPGQAGRRASNPADVSDLRADDQVNQTPSEQTKGKASSQANNVQHEQSDGQVSGLTEERTAEQTERRLPTQAERRTSGQIDGRLAMPSDQRGSRQTDHRMAGQSERRASEQMDRRMSGEAERRTSEQITHRLSKLSERRPSVQIDSGSSVPSDQSPSVQIDSGSSVPSDQRPSVQIDRRMSGKVRRRSSEKTDYRLAGLADPGTSEQTDLRLYGLVDHKTSVKTHHQVYGQATELAEHQAIDQAHSNADQPPVDNAHYTESDQTDHLADRQANHKDQLSYYETRGQSEDRIFPQLGNSKEDKEADYRVQPCKFEDSQVDLNSKPSVEMETQNATTIPPYNPVDARFTSNFQAKDQALFPRLPSISSKLNYTSSQEKTQAIVTKSDEFSEIDQGKGYHIRNQTYRRFPSIVYEDPYQVSLQYMEKHHILQIFQQITENLVYEKPEDPLNFMLCQV

SEQ ID NO: 8944 - protein, 2768 aa, Homo sapiens
MALVLEIFTLLASICWVSANIFEYQVDAQPLRPCELQRETAFLKQADYVPQCAEDGSFQTVQCQNDGRSCWCVGANGSEVLGSRQPGRPVACLSFCQLQKQQILLSGYINSTDTSYLPQCQDSGDYAPVQCDVQQVQCWCVDAEGMEVYGTRQLGRPKRCPRSCEIRNRRLLHGVGDKSPPQCSAEGEFMPVQCKFVNTTDMMIFDLVHSYNRFPDAFVTFSSFQRRFPEVSGYCHCADSQGRELAETGLELLLDEIYDTIFAGLDLPSTFTETTLYRILQRRFLAVQSVISGRFRCPTKCEVERFTATSFGHPYVPSCRRNGDYQAVQCQTEGPCWCVDAQGKEMHGTRQQGEPPSCAEGQSCASERQQALSRLYFGTSGYFSQHDLFSSPEKRWASPRVARFATSCPPTIKELFVDSGLLRPMVEGQSQQFSVSENLLKEAIRAIFPSRGLARLALQFTTNPKRLQQNLFGGKFLVNVGQFNLSGALGTRGTFNFSQFFQQLGLASFLNGGRQEDLAKPLSVGLDSNSSTGTPEAAKKDGTMNKPTVGSFGFEINLQENQNALKFLASLLELPEFLLFLQHAISVPEDVARDLGDVMETVLSSQTCEQTPERLFVPSCTTEGSYEDVQCFSGECWCVNSWGKELPGSRVRGGQPRCPTDCEKQRARMQSLMGSQPAGSTLFVPACTSEGHFLPVQCFNSECYCVDAEGQAIPGTRSAIGKPKKCPTPCQLQSEQAFLRTVQALLSNSSMLPTLSDTYIPQCSTDGQWRQVQCNGPPEQVFELYQRWEAQNKGQDLTPAKLLVKIMSYREAASGNFSLFIQSLYEAGQQDVFPVLSQYPSLQDVPLAALEGKRPQPRENILLEPYLFWQILNGQLSQYPGSYSDFSTPLAHFDLRNCWCVDEAGQELEGMRSEPSKLPTCPGSCEEAKLRVLQFIRETEEIVSASNSSRFPLGESFLVAKGIRLRNEDLGLPPLFPPREAFAEQFLRGSDYAIRLAAQSTLSFYQRRRFSPDDSAGASALLRSGPYMPQCDAFGSWEPVQCHAGTGHCWCVDEKGGFIPGSLTARSLQIPQCPTTCEKSRTSGLLSSWKQARSQENPSPKDLFVPACLETGEYARLQASGAGTWCVDPASGEELRPGSSSSAQCPSLCNVLKSGVLSRRVSPGYVPACRAEDGGFSPVQCDQAQGSCWCVMDSGEEVPGTRVTGGQPACESPRCPLPFNASEVVGGTILCETISGPTGSAMQQCQLLCRQGSWSVFPPGPLICSLESGRWESQLPQPRACQRPQLWQTIQTQGHFQLQLPPGKMCSADYADLLQTFQVFILDELTARGFCQIQVKTFGTLVSIPVCNNSSVQVGCLTRERLGVNVTWKSRLEDIPVASLPDLHDIERALVGKDLLGRFTDLIQSGSFQLHLDSKTFPAETIRFLQGDHFGTSPRTWFGCSEGFYQVLTSEASQDGLGCVKCPEGSYSQDEECIPCPVGFYQEQAGSLACVPCPVGRTTISAGAFSQTHCVTDCQRNEAGLQCDQNGQYRASQKDRGSGKAFCVDGEGRRLPWWETEAPLEDSQCLMMQKFEKVPESKVIFDANAPVAVRSKVPDSEFPVMQCLTDCTEDEACSFFTVSTTEPEISCDFYAWTSDNVACMTSDQKRDALGNSKATSFGSLRCQVKVRSHGQDSPAVYLKKGQGSTTTLQKRFEPTGFQNMLSGLYNPIVFSASGANLTDAHLFCLLACDRDLCCDGFVLTQVQGGAIICGLLSSPSVLLCNVKDWMDPSEAWANATCPGVTYDQESHQVILRLGDQEFIKSLTPLEGTQDTFTNFQQVYLWKDSDMGSRPESMGCRKDTVPRPASPTEAGLTTELFSPVDLNQVIVNGNQSLSSQKHWLFKHLFSAQQANLWCLSRCVQEHSFCQLAEITESASLYFTCTLYPEAQVCDDIMESNAQGCRLILPQMPKALFRKKVILEDKVKNFYTRLPFQKLMGISIRNKVPMSEKSISNGFFECERRCDADPCCTGFGFLNVSQLKGGEVTCLTLNSLGIQMCSEENGGAWRILDCGSPDIEVHTYPFGWYQKPIAQNNAPSFCPLVVLPSLTEKVSLDSWQSLALSSVVVDPSIRHFDVAHVSTAATSNFSAVRDLCLSECSQHEACLITTLQTQPGAVRCMFYADTQSCTHSLQGQNCRLLLREEATHIYRKPGISLLSYEASVPSVPISTHGRLLGRSQAIQVGTSWKQVDQFLGVPYAAPPLAERRFQAPEPLNWTGSWDASKPRASCWQPGTRTSTSPGVSEDCLYLNVFIPQNVAPNASVLVFFHNTMDREESEGWPAIDGSFLAAVGNLIVVTASYRVGVFGFLSSGSGEVSGNWGLLDQVAALTWVQTHIRGFGGDPRRVSLAADRGGADVASIHLLTARATNSQLFRRAVLMGGSALSPAAVISHERAQQQAIALAKEVSCPMSSSQEVVSCLRQKPANVLNDAQTKLLAVSGPFHYWGPVIDGHFLREPPARALKRSLWVEVDLLIGSSQDDGLINRAKAVKQFEESRGRTSSKTAFYQALQNSLGGEDSDARVEAAATWYYSLEHSTDDYASFSRALENATRDYFIICPIIDMASAWAKRARGNVFMYHAPENYGHGSLELLADVQFALGLPFYPAYEGQFSLEEKSLSLKIMQYFSHFIRSGNPNYPYEFSRKVPTFATPWPDFVPRAGGENYKEFSELLPNRQGLKKADCSFWSKYISSLKTSADGAKGGQSAESEEEELTAGSGLREDLLSLQEPGSKTYSK

SEQ ID NO: 8945 - protein, 2711 aa, Homo sapiens
MALVLEIFTLLASICWVSANIFEYQVDAQPLRPCELQRETAFLKQADYVPQCAEDGSFQTVQCQNDGRSCWCVGANGSEVLGSRQPGRPVACLSFCQLQKQQILLSGYINSTDTSYLPQCQDSGDYAPVQCDVQQVQCWCVDAEGMEVYGTRQLGRPKRCPRSCEIRNRRLLHGVGDKSPPQCSAEGEFMPVQCKFVNTTDMMIFDLVHSYNRFPDAFVTFSSFQRRFPEVSGYCHCADSQGRELAETGLELLLDEIYDTIFAGLDLPSTFTETTLYRILQRRFLAVQSVISGRFRCPTKCEVERFTATSFGHPYVPSCRRNGDYQAVQCQTEGPCWCVDAQGKEMHGTRQQGEPPSCAEGQSCASERQQALSRLYFGTSGYFSQHDLFSSPEKRWASPRVARFATSCPPTIKELFVDSGLLRPMVEGQSQQFSVSENLLKEAIRAIFPSRGLARLALQFTTNPKRLQQNLFGGKFLVNVGQFNLSGALGTRGTFNFSQFFQQLGLASFLNGGRQEDLAKPLSVGLDSNSSTGTPEAAKKDGTMNKPTVGSFGFEINLQENQNALKFLASLLELPEFLLFLQHAISVPEDVARDLGDVMETVLSSQTCEQTPERLFVPSCTTEGSYEDVQCFSGECWCVNSWGKELPGSRVRGGQPRCPTDCEKQRARMQSLMGSQPAGSTLFVPACTSEGHFLPVQCFNSECYCVDAEGQAIPGTRSAIGKPKKCPTPCQLQSEQAFLRTVQALLSNSSMLPTLSDTYIPQCSTDGQWRQVQCNGPPEQVFELYQRWEAQNKGQDLTPAKLLVKIMSYREAASGNFSLFIQSLYEAGQQDVFPVLSQYPSLQDVPLAALEGKRPQPRENILLEPYLFWQILNGQLSQYPGSYSDFSTPLAHFDLRNCWCVDEAGQELEGMRSEPSKLPTCPGSCEEAKLRVLQFIRETEEIVSASNSSRFPLGESFLVAKGIRLRNEDLGLPPLFPPREAFAEQFLRGSDYAIRLAAQSTLSFYQRRRFSPDDSAGASALLRSGPYMPQCDAFGSWEPVQCHAGTGHCWCVDEKGGFIPGSLTARSLQIPQCPTTCEKSRTSGLLSSWKQARSQENPSPKDLFVPACLETGEYARLQASGAGTWCVDPASGEELRPGSSSSAQCPSLCNVLKSGVLSRRVSPGYVPACRAEDGGFSPVQCDQAQGSCWCVMDSGEEVPGTRVTGGQPACESPRCPLPFNASEVVGGTILCETISGPTGSAMQQCQLLCRQGSWSVFPPGPLICSLESGRWESQLPQPRACQRPQLWQTIQTQGHFQLQLPPGKMCSADYADLLQTFQVFILDELTARGFCQIQVKTFGTLVSIPVCNNSSVQVGCLTRERLGVNVTWKSRLEDIPVASLPDLHDIERALVGKDLLGRFTDLIQSGSFQLHLDSKTFPAETIRFLQGDHFGTSPRTWFGCSEGFYQVLTSEASQDGLGCVKCPEGSYSQDEECIPCPVGFYQEQAGSLACVPCPVGRTTISAGAFSQTHLMQKFEKVPESKVIFDANAPVAVRSKVPDSEFPVMQCLTDCTEDEACSFFTVSTTEPEISCDFYAWTSDNVACMTSDQKRDALGNSKATSFGSLRCQVKVRSHGQDSPAVYLKKGQGSTTTLQKRFEPTGFQNMLSGLYNPIVFSASGANLTDAHLFCLLACDRDLCCDGFVLTQVQGGAIICGLLSSPSVLLCNVKDWMDPSEAWANATCPGVTYDQESHQVILRLGDQEFIKSLTPLEGTQDTFTNFQQVYLWKDSDMGSRPESMGCRKDTVPRPASPTEAGLTTELFSPVDLNQVIVNGNQSLSSQKHWLFKHLFSAQQANLWCLSRCVQEHSFCQLAEITESASLYFTCTLYPEAQVCDDIMESNAQGCRLILPQMPKALFRKKVILEDKVKNFYTRLPFQKLMGISIRNKVPMSEKSISNGFFECERRCDADPCCTGFGFLNVSQLKGGEVTCLTLNSLGIQMCSEENGGAWRILDCGSPDIEVHTYPFGWYQKPIAQNNAPSFCPLVVLPSLTEKVSLDSWQSLALSSVVVDPSIRHFDVAHVSTAATSNFSAVRDLCLSECSQHEACLITTLQTQPGAVRCMFYADTQSCTHSLQGQNCRLLLREEATHIYRKPGISLLSYEASVPSVPISTHGRLLGRSQAIQVGTSWKQVDQFLGVPYAAPPLAERRFQAPEPLNWTGSWDASKPRASCWQPGTRTSTSPGVSEDCLYLNVFIPQNVAPNASVLVFFHNTMDREESEGWPAIDGSFLAAVGNLIVVTASYRVGVFGFLSSGSGEVSGNWGLLDQVAALTWVQTHIRGFGGDPRRVSLAADRGGADVASIHLLTARATNSQLFRRAVLMGGSALSPAAVISHERAQQQAIALAKEVSCPMSSSQEVVSCLRQKPANVLNDAQTKLLAVSGPFHYWGPVIDGHFLREPPARALKRSLWVEVDLLIGSSQDDGLINRAKAVKQFEESRGRTSSKTAFYQALQNSLGGEDSDARVEAAATWYYSLEHSTDDYASFSRALENATRDYFIICPIIDMASAWAKRARGNVFMYHAPENYGHGSLELLADVQFALGLPFYPAYEGQFSLEEKSLSLKIMQYFSHFIRSGNPNYPYEFSRKVPTFATPWPDFVPRAGGENYKEFSELLPNRQGLKKADCSFWSKYISSLKTSADGAKGGQSAESEEEELTAGSGLREDLLSLQEPGSKTYSK

SEQ ID NO: 8946 - protein, 790 aa, Homo sapiens
MAEQVLPQALYLSNMRKAVKIRERTPEDIFKPTNGIIHHFKTMHRYTLEMFRTCQFCPQFREIIHKALIDRNIQATLESQKKLNWCREVRKLVALKTNGDGNCLMHATSQYMWGVQDTDLVLRKALFSTLKETDTRNFKFRWQLESLKSQEFVETGLCYDTRNWNDEWDNLIKMASTDTPMARSGLQYNSLEEIHIFVLCNILRRPIIVISDKMLRSLESGSNFAPLKVGGIYLPLHWPAQECYRYPIVLGYDSHHFVPLVTLKDSGPEIRAVPLVNRDRGRFEDLKVHFLTDPENEMKEKLLKEYLMVIEIPVQGWDHGTTHLINAAKLDEANLPKEINLVDDYFELVQHEYKKWQENSEQGRREGHAQNPMEPSVPQLSLMDVKCETPNCPFFMSVNTQPLCHECSERRQKNQNKLPKLNSKPGPEGLPGMALGASRGEAYEPLAWNPEESTGGPHSAPPTAPSPFLFSETTAMKCRSPGCPFTLNVQHNGFCERCHNARQLHASHAPDHTRHLDPGKCQACLQDVTRTFNGICSTCFKRTTAEASSSLSTSLPPSCHQRSKSDPSRLVRSPSPHSCHRAGNDAPAGCLSQAARTPGDRTGTSKCRKAGCVYFGTPENKGFCTLCFIEYRENKHFAAASGKVSPTASRFQNTIPCLGRECGTLGSTMFEGYCQKCFIEAQNQRFHEAKRTEEQLRSSQRRDVPRTTQSTSRPKCARASCKNILACRSEELCMECQHPNQRMGPGAHRGEPAPEDPPKQRCRAPACDHFGNAKCNGYCNECFQFKQMYG

SEQ ID NO: 8947 - protein, 45 aa, Homo sapiens
MSDKPDLSEVEKFDRSKLKKTNTEEKNTLPSKETIQQEKECVQTS

SEQ ID NO: 8948 - protein, 557 aa, Homo sapiens
MDQSRVLLWVKAEPFIVGALQVPPPSKFSLHYLRKISTYVQIRATEGAYPRLYWSTWRHIACGKLQLAKDLAWLYFEIFDSLSMKTPEERLEWSEVLSNCMSEEEVEKQRNQLSVDTLQFLLFLYIQQLNKVSLRTSLIGEEWPSPRNKSQSPDLTEKSNCHNKNWNDYSHQAFVYDHLSDLLELLLDPKQLTASFHSTHSSLVSREAVVALSFLIEGTISRARKIYPLHELALWQPLHADSGFSKISKTFSFYKLETWLRSCLTGNPFGTSACLKSGKKLAWAHQVEGTTKRAKIACNTHVAPRMHRLVVMSQVYKQTLAKSSDTLAGAHVKIHRCNESFIYLLSPLRSVTIEKCRNSIFVLGPVGTTLHLHSCDNVKVIAVCHRLSISSTTGCIFHVLTPTRPLILSGNQTVTFAPFHTHYPMLEDHMARTGLATVPNYWDNPMVVCRENSDTRVFQLLPPCEFYVFIIPFEMEGDTTEIPGGLPSVYQKALGQREQKIQIWQKTVKEAHLTKDQRKQFQVLVENKFYEWLINTGHRQQLDSLVPPAAGSKQAAG

SEQ ID NO: 8949 - protein, 461 aa, Homo sapiens
MTDRLKFGFGFHRFLVLSVDTLQFLLFLYIQQLNKVSLRTSLIGEEWPSPRNKSQSPDLTEKSNCHNKNWNDYSHQAFVYDHLSDLLELLLDPKQLTASFHSTHSSLVSREAVVALSFLIEGTISRARKIYPLHELALWQPLHADSGFSKISKTFSFYKLETWLRSCLTGNPFGTSACLKSGKKLAWAHQVEGTTKRAKIACNTHVAPRMHRLVVMSQVYKQTLAKSSDTLAGAHVKIHRCNESFIYLLSPLRSVTIEKCRNSIFVLGPVGTTLHLHSCDNVKVIAVCHRLSISSTTGCIFHVLTPTRPLILSGNQTVTFAPFHTHYPMLEDHMARTGLATVPNYWDNPMVVCRENSDTRVFQLLPPCEFYVFIIPFEMEGDTTEIPGGLPSVYQKALGQREQKIQIWQKTVKEAHLTKDQRKQFQVLVENKFYEWLINTGHRQQLDSLVPPAAGSKQAAG

SEQ ID NO: 8950 - protein, 216 aa, Homo sapiens
MVPMHLLGRLEKPLLLLCCASFLLGLALLGIKTDITPVAYFFLTLGGFFLFAYLLVRFLEWGLRSQLQSMQTESPGPSGNARDNEAFEVPVYEEAVVGLESQCRPQELDQPPPYSTVVIPPAPEEEQPSHPEGSRRAKLEQRRMASEGSMAQEGSPGRAPINLRLRGPRAVSTAPDLQSLAAVPTLEPLTPPPAYDVCFGHPDDDSVFYEDNWAPP

SEQ ID NO: 8951 - protein, 693 aa, Homo sapiens
MTDGKLSTSTNGVAFMGILDGRPGNPLQNLQHVNLKAPRLLSAPEYGPKLKLRALEDRHSLQSVDSGIPTLEIGNPEPVPCSAVHVRRKQSDSDLIPERAFQSACALPSCAPPAPSSTEREQSVRKSSTFPRTGYDSVKLYSPTSKALTRSDDVSVCSVSSLGTELSTTLSVSNEDILDLVVTSSSSAIVTLENDDDPQFTNVTLSSIKETRGLHQQDCVHEAEEGSKLKILGPFSNFFARNLLARKQSARLDKHNDLGWKLFGKAPLRENAQKDSKRIQKEYEDKAGRPSKPPSPKQNVRKNLDFEPLSTTALILEDRPANLPAKPAEEAQKHRQQYEEMVVQAKKRELKEAQRRKKQLEERCRVEESIGNAVLTWNNEILPNWETMWCSRKVRDLWWQGIPPSVRGKVWSLAIGNELNITHELFDICLARAKERWRSLSTGGSEVENEDAGFSAADREASLELIKLDISRTFPNLCIFQQGGPYHDMLHSILGAYTCYRPDVGYVQGMSFIAAVLILNLDTADAFIAFSNLLNKPCQMAFFRVDHGLMLTYFAAFEVFFEENLPKLFAHFKKNNLTPDIYLIDWIFTLYSKSLPLDLACRIWDVFCRDGEEFLFRTALGILKLFEDILTKMDFIHMAQFLTRLPEDLPAEELFASIATIQMQSRNKKWAQVLTALQKDSREMEKGSPSLRH

SEQ ID NO: 8952 - protein, 413 aa, Homo sapiens
MEYEDKAGRPSKPPSPKQNVRKNLDFEPLSTTALILEDRPANLPAKPAEEAQKHRQQYEEMVVQAKKRELKEAQRRKKQLEERCRVEESIGNAVLTWNNEILPNWETMWCSRKVRDLWWQGIPPSVRGKVWSLAIGNELNITHELFDICLARAKERWRSLSTGGSEVENEDAGFSAADREASLELIKLDISRTFPNLCIFQQGGPYHDMLHSILGAYTCYRPDVGYVQGMSFIAAVLILNLDTADAFIAFSNLLNKPCQMAFFRVDHGLMLTYFAAFEVFFEENLPKLFAHFKKNNLTPDIYLIDWIFTLYSKSLPLDLACRIWDVFCRDGEEFLFRTALGILKLFEDILTKMDFIHMAQFLTRLPEDLPAEELFASIATIQMQSRNKKWAQVLTALQKDSREMEKGSPSLRH

SEQ ID NO: 8953 - protein, 795 aa, Homo sapiens
MYHSLSETRHPLQPEEQEVGIDPLSSYSNKSGGDSNKNGRRTSSTLDSEGTFNSYRKEWEELFVNNNYLATIRQKGINGQLRSSRFRSICWKLFLCVLPQDKSQWISRIEELRAWYSNIKEIHITNPRKVVGQQDLMINNPLSQDEGSLWNKFFQDKELRSMIEQDVKRTFPEMQFFQQENVRKILTDVLFCYARENEQLLYKQGMHELLAPIVFVLHCDHQAFLHASESAQPSEEMKTVLNPEYLEHDAYAVFSQLMETAEPWFSTFEHDGQKGKETLMTPIPFARPQDLGPTIAIVTKVNQIQDHLLKKHDIELYMHLNRLEIAPQIYGLRWVRLLFGREFPLQDLLVVWDALFADGLSLGLVDYIFVAMLLYIRDALISSNYQTCLGLLMHYPFIGDVHSLILKALFLRDPKRNPRPVTYQFHPNLDYYKARGADLMNKSRTNAKGAPLNINKVSNSLINFGRKLISPAMAPGSAGGPVPGGNSSSSSSVVIPTRTSAEAPSHHLQQQQQQQRLMKSESMPVQLNKGLSSKNISSSPSVESLPGGREFTGSPPSSATKKDSFFSNISRSRSHSKTMGRKESEEELEAQISFLQGQLNDLDAMCKYCAKVMDTHLVNIQDVILQENLEKEDQILVSLAGLKQIKDILKGSLRFNQSQLEAEENEQITIADNHYCSSGQGQGRGQGQSVQMSGAIKQASSETPGCTDRGNSDDFILISKDDDGSSARGSFSGQAQPLRTLRSTSGKSQAPVCSPLVFSDPLMGPASASSSNPSSSPDDDSSKDSGFTIVSPLDI

SEQ ID NO: 8954 - protein, 817 aa, Homo sapiens
MYHSLSETRHPLQPEEQEVGIDPLSSYSNKSGGDSNKNGRRTSSTLDSEGTFNSYRKEWEELFVNNNYLATIRQKGINGQLRSSRFRSICWKLFLCVLPQDKSQWISRIEELRAWYSNIKEIHITNPRKVVGQQDLMINNPLSQDEGSLWNKFFQDKELRSMIEQDVKRTFPEMQFFQQENVRKILTDVLFCYARENEQLLYKQGMHELLAPIVFVLHCDHQAFLHASESAQPSEEMKTVLNPEYLEHDAYAVFSQLMETAEPWFSTFEHDGQKGKETLMTPIPFARPQDLGPTIAIVTKVNQIQDHLLKKHDIELYMHLNRLEIAPQIYGLRWVRLLFGREFPLQDLLVVWDALFADGLSLGLVDYIFVAMLLYIRDALISSNYQTCLGLLMHYPFIGDVHSLILKALFLRDPKRNPRPVTYQFHPNLDYYKARGADLMNKSRTNAKGAPLNINKVSNSLINFGRKLISPAMAPGSAGGPVPGGNSSSSSSVVIPTRTSAEAPSHHLQQQQQQQRLMKSESMPVQLNKGDVVTGSDAQVSVPVQTLTDLQGLSSKNISSSPSVESLPGGREFTGSPPSSATKKDSFFSNISRSRSHSKTMGRKESEEELEAQISFLQGQLNDLDAMCKYCAKVMDTHLVNIQDVILQENLEKEDQILVSLAGLKQIKDILKGSLRFNQSQLEAEENEQITIADNHYCSSGQGQGRGQGQSVQMSGAIKQASSETPGCTDRGNSDDFILISKDDDGSSARGSFSGQAQPLRTLRSTSGKSQAPVCSPLVFSDPLMGPASASSSNPSSSPDDDSSKDSGFTIVSPLDI

SEQ ID NO: 8955 - protein, 839 aa, Homo sapiens
MMSASRLAGTLIPAMAFLSCVRPESWEPCVEVVPNITYQCMELNFYKIPDNLPFSTKNLDLSFNPLRHLGSYSFFSFPELQVLDLSRCEIQTIEDGAYQSLSHLSTLILTGNPIQSLALGAFSGLSSLQKLVAVETNLASLENFPIGHLKTLKELNVAHNLIQSFKLPEYFSNLTNLEHLDLSSNKIQSIYCTDLRVLHQMPLLNLSLDLSLNPMNFIQPGAFKEIRLHKLTLRNNFDSLNVMKTCIQGLAGLEVHRLVLGEFRNEGNLEKFDKSALEGLCNLTIEEFRLAYLDYYLDDIIDLFNCLTNVSSFSLVSVTIERVKDFSYNFGWQHLELVNCKFGQFPTLKLKSLKRLTFTSNKGGNAFSEVDLPSLEFLDLSRNGLSFKGCCSQSDFGTTSLKYLDLSFNGVITMSSNFLGLEQLEHLDFQHSNLKQMSEFSVFLSLRNLIYLDISHTHTRVAFNGIFNGLSSLEVLKMAGNSFQENFLPDIFTELRNLTFLDLSQCQLEQLSPTAFNSLSSLQVLNMSHNNFFSLDTFPYKCLNSLQVLDYSLNHIMTSKKQELQHFPSSLAFLNLTQNDFACTCEHQSFLQWIKDQRQLLVEVERMECATPSDKQGMPVLSLNITCQMNKTIIGVSVLSVLVVSVVAVLVYKFYFHLMLLAGCIKYGRGENIYDAFVIYSSQDEDWVRNELVKNLEEGVPPFQLCLHYRDFIPGVAIAANIIHEGFHKSRKVIVVVSQHFIQSRWCIFEYEIAQTWQFLSSRAGIIFIVLQKVEKTLLRQQVELYRLLSRNTYLEWEDSVLGRHIFWRRLRKALLDGKSWNPEGTVGTGCNWQEATSI

SEQ ID NO: 8956 - protein, 799 aa, Homo sapiens
MELNFYKIPDNLPFSTKNLDLSFNPLRHLGSYSFFSFPELQVLDLSRCEIQTIEDGAYQSLSHLSTLILTGNPIQSLALGAFSGLSSLQKLVAVETNLASLENFPIGHLKTLKELNVAHNLIQSFKLPEYFSNLTNLEHLDLSSNKIQSIYCTDLRVLHQMPLLNLSLDLSLNPMNFIQPGAFKEIRLHKLTLRNNFDSLNVMKTCIQGLAGLEVHRLVLGEFRNEGNLEKFDKSALEGLCNLTIEEFRLAYLDYYLDDIIDLFNCLTNVSSFSLVSVTIERVKDFSYNFGWQHLELVNCKFGQFPTLKLKSLKRLTFTSNKGGNAFSEVDLPSLEFLDLSRNGLSFKGCCSQSDFGTTSLKYLDLSFNGVITMSSNFLGLEQLEHLDFQHSNLKQMSEFSVFLSLRNLIYLDISHTHTRVAFNGIFNGLSSLEVLKMAGNSFQENFLPDIFTELRNLTFLDLSQCQLEQLSPTAFNSLSSLQVLNMSHNNFFSLDTFPYKCLNSLQVLDYSLNHIMTSKKQELQHFPSSLAFLNLTQNDFACTCEHQSFLQWIKDQRQLLVEVERMECATPSDKQGMPVLSLNITCQMNKTIIGVSVLSVLVVSVVAVLVYKFYFHLMLLAGCIKYGRGENIYDAFVIYSSQDEDWVRNELVKNLEEGVPPFQLCLHYRDFIPGVAIAANIIHEGFHKSRKVIVVVSQHFIQSRWCIFEYEIAQTWQFLSSRAGIIFIVLQKVEKTLLRQQVELYRLLSRNTYLEWEDSVLGRHIFWRRLRKALLDGKSWNPEGTVGTGCNWQEATSI

SEQ ID NO: 8957 - protein, 639 aa, Homo sapiens
MPLLNLSLDLSLNPMNFIQPGAFKEIRLHKLTLRNNFDSLNVMKTCIQGLAGLEVHRLVLGEFRNEGNLEKFDKSALEGLCNLTIEEFRLAYLDYYLDDIIDLFNCLTNVSSFSLVSVTIERVKDFSYNFGWQHLELVNCKFGQFPTLKLKSLKRLTFTSNKGGNAFSEVDLPSLEFLDLSRNGLSFKGCCSQSDFGTTSLKYLDLSFNGVITMSSNFLGLEQLEHLDFQHSNLKQMSEFSVFLSLRNLIYLDISHTHTRVAFNGIFNGLSSLEVLKMAGNSFQENFLPDIFTELRNLTFLDLSQCQLEQLSPTAFNSLSSLQVLNMSHNNFFSLDTFPYKCLNSLQVLDYSLNHIMTSKKQELQHFPSSLAFLNLTQNDFACTCEHQSFLQWIKDQRQLLVEVERMECATPSDKQGMPVLSLNITCQMNKTIIGVSVLSVLVVSVVAVLVYKFYFHLMLLAGCIKYGRGENIYDAFVIYSSQDEDWVRNELVKNLEEGVPPFQLCLHYRDFIPGVAIAANIIHEGFHKSRKVIVVVSQHFIQSRWCIFEYEIAQTWQFLSSRAGIIFIVLQKVEKTLLRQQVELYRLLSRNTYLEWEDSVLGRHIFWRRLRKALLDGKSWNPEGTVGTGCNWQEATSI

SEQ ID NO: 8958 - protein, 372 aa, Homo sapiens
MRVGPVRSAMSGASQPRGPALLFPATRGVPAKRLLDADDAAAVAAKCPRLSECSSPPDYLSPPGSPCSPQPPPAAPGAGGGSGSAPGPSRIADYLLLPLAEREHVSRALCIHTGRELRCKVFPIKHYQDKIRPYIQLPSHSNITGIVEVILGETKAYVFFEKDFGDMHSYVRSRKRLREEEAARLFKQIVSAVAHCHQSAIVLGDLKLRKFVFSTEERTQLRLESLEDTHIMKGEDDALSDKHGCPAYVSPEILNTTGTYSGKAADVWSLGVMLYTLLVGRYPFHDSDPSALFSKIRRGQFCIPEHISPKARCLIRSLLRREPSERLTAPEILLHPWFESVLEPGYIDSEIGTSDQIVPEYQEDSDISSFFC

SEQ ID NO: 8959 - protein, 206 aa, Homo sapiens
MHSYVRSRKRLREEEAARLFKQIVSAVAHCHQSAIVLGDLKLRKFVFSTEERTQLRLESLEDTHIMKGEDDALSDKHGCPAYVSPEILNTTGTYSGKAADVWSLGVMLYTLLVGRYPFHDSDPSALFSKIRRGQFCIPEHISPKARCLIRSLLRREPSERLTAPEILLHPWFESVLEPGYIDSEIGTSDQIVPEYQEDSDISSFFC

SEQ ID NO: 8960 - protein, 451 aa, Homo sapiens
MATPLVAGPAALRFAAAASWQVVRGRCVEHFPRVLEFLRSLRAVAPGLVRYRHHERLCMGLKAKVVVELILQGRPWAQVLKALNHHFPESGPIVRDPKATKQDLRKILEAQETFYQQVKQLSEAPVDLASKLQELEQEYGEPFLAAMEKLLFEYLCQLEKALPTPQAQQLQDVLSWMQPGVSITSSLAWRQYGVDMGWLLPECSVTDSVNLAEPMEQNPPQQQRLALHNPLPKAKPGTHLPQGPSSRTHPEPLAGRHFNLAPLGRRRVQSQWASTRGGHKERPTVMLFPFRNLGSPTQVISKPESKEEHAIYTADLAMGTRAASTGKSKSPCQTLGGRALKENPVDLPATEQKENCLDCYMDPLRLSLLPPRARKPVCPPSLCSSVITIGDLVLDSDEEENGQGEGKESLENYQKTKFDTLIPTLCEYLPPSGHGAIPVSSCDCRDSSRPL

SEQ ID NO: 8961 - protein, 354 aa, Homo sapiens
MATPLVAGPAALRFAAAASWQVVRGRCVEHFPRVLEFLRSLRAVAPGLVRYRHHERLCMGLKAKVVVELILQGRPWAQVLKALNHHFPESGPIVRDPKATKQDLRKILEAQETFYQQVKQLSEAPVDLASKLQELEQEYGEPFLAAMEKLLFEYLCQLEKALPTPQAQQLQDVLSWMQPGVSITSSLAWRQYGVDMGWLLPECSVTDSVNLAEPMEQNPPQQQRLALHNPLPKAKPGTHLPQGPSSRTHPEPLAGRHFNLAPLGRRRVQSQWASTRGGHKERPTVMLFPFRNLGSPTQVISKPESKEEHAIYTADLAMGTRAASTGKSKSPCQTLGGRALKENPVDLPATEQKE

SEQ ID NO: 8962 - protein, 137 aa, Homo sapiens
MATPLVAGPAALRFAAAASWQVVRGRCVEHFPRVLEFLRSLRAVAPGLVRYRHHERLCMGLKAKVVVELILQGRPWAQVLKALNHHFPESGPIVRDPKATKQDLRKILEAQETFYQQVKQLSEAPVDLASKLQVRLV

SEQ ID NO: 8963 - protein, 815 aa, Homo sapiens
MEPSTCRTMESEEDYVEEKESEKCVKEGVTNPSNSSQQALLKADYKALKNGVPSPIMATKIPKKVIAPVDTGDLEAGRRKRRRKRRSLAINLTNCKYESVRRAAQMCGLKEVGEDEEWTLYWTDCAVSLERVMDMKRFQKINHFPGMTEICRKDLLARNLNRMYKLYPSEYNIFPRTWCLPADYGDFQSYGRQRKARTYICKPDSGCQGRGIFITRNPREIKPGEHMICQQYISKPLLIDGFKFDMRVYVLITSCDPLRIFTYEEGLARFATTPYMEPSHNNLDNVCMHLTNYAINKHNENFVRDGAVGSKRKLSTLNIWLQEHSYNPGELWGDIEDIIIKTIISAHSVLRHNYRTCFPQYLNGGTCACFEILGFDILLDHKLKPWLLEVNHSPSFTTDSCLDQEVKDALLCDAMTLVNLRGCDKRKVMEEDKRRVKERLFQCYRQPRESRKEKTESSHVAMLDQERYEDSHLGKYRRIYPGPDTEKYARFFKHNGSLFQETAASKAREECARQQLEEIRLKQEQQETSGTKRQKARDQNQGESAGEKSRPRAGLQSLSTHLAYRNRNWEKELLPGQLDTMRPQEIVEEEELERMKALLQRETLIRSLGIVEQLTRLQHPGPQGQKKLHESRDRLGSQELKSMSLVLLVLLRGAATEQGAPHFLHPVLPHESIPRILGALPSMNAAIPHVPRYHLQPKNFNWTGEPAAINSCSLSMKKAGRCYFSSARIRLTSQGQASRRLEAINRVLAGSVPPTLTPKQGYFLQPERVASDSWTECTLPSMVNSEHRAAKVPLCPASAPMLQRSRALLNINQFR

SEQ ID NO: 8964 - protein, 459 aa, Homo sapiens
MEPSTCRTMESEEDYVEEKESEKCVKEGVTNPSNSSQQALLKADYKALKNGVPSPIMATKIPKKVIAPVDTGDLEAGRRKRRRKRRSLAINLTNCKYESVRRAAQMCGLKEVGEDEEWTLYWTDCAVSLERVMDMKRFQKINHFPGMTEICRKDLLARNLNRMYKLYPSEYNIFPRTWCLPADYGDFQSYGRQRKARTYICKPDSGCQGRGIFITRNPREIKPGEHMICQQYISKPLLIDGFKFDMRVYVLITSCDPLRIFTYEEGLARFATTPYMEPSHNNLDNVCMHLTNYAINKHNENFVRDGAVGSKRKLSTLNIWLQEHSYNPGELWGDIEDIIIKTIISAHSVLRHNYRTCFPQYLNGGTCACFEILGFDILLDHKLKPWLLEVNHSPSFTTDSCLDQEVKDALLCDAMTLVNLRGCDKRKVMEEDKRRVKERLFQCYRQPRESRCARCLACV

SEQ ID NO: 8965 - protein, 241 aa, Homo sapiens
MQCFSFIKTMMILFNLLIFLCGAALLAVGIWVSIDGASFLKIFGPLSSSAMQFVNVGYFLIAAGVVVFALGFLGCYGAKTESKCALVTFFFILLLIFIAEVAAAVVALVYTTMAEHFLTLLVVPAIKKDYGSQEDFTQVWNTTMKGLKCCGFTNYTDFEDSPYFKENSAFPPFCCNDNVTNTANETCTKQKAHDQKVEGCFNQLLYDIRTNAVTVGGVAAGIGGLELAAMIVSMYLYCNLQ

SEQ ID NO: 8966 - protein, 514 aa, Homo sapiens
MAVWLAQWLGPLLLVSLWGLLAPASLLRRLGEHIQQFQESSAQGLGLSLGPGAAALPKVGWLEQLLDPFNVSDRRSFLQRYWVNDQHWVGQDGPIFLHLGGEGSLGPGSVMRGHPAALAPAWGALVISLEHRFYGLSIPAGGLEMAQLRFLSSRLALADVVSARLALSRLFNISSSSPWICFGGSYAGSLAAWARLKFPHLIFASVASSAPVRAVLDFSEYNDVVSRSLMSTAIGGSLECRAAVSVAFAEVERRLRSGGAAQAALRTELSACGPLGRAENQAELLGALQALVGGVVQYDGQTGAPLSVRQLCGLLLGGGGNRSHSTPYCGLRRAVQIVLHSLGQKCLSFSRAETVAQLRSTEPQLSGVGDRQWLYQTCTEFGFYVTCENPRCPFSQLPALPSQLDLCEQVFGLSALSVAQAVAQTNSYYGGQTPGANKVLFVNGDTDPWHVLSVTQALGSSESTLLIRTGSHCLDMAPERPSDSPSLRLGRQNIFQQLQTWLKLAKESQIKGEV

SEQ ID NO: 8967 - protein, 450 aa, Homo sapiens
MGAPPGYRPSAWVHLLHQLPRADFQLRPVPSVFAPQEQEYQQALLLVAALAGLGLGLSLIFIAVYLIRFCCCRPPEPPGSKIPSPGGGCVTWSCIVALLAGCTGIGIGFYGNSETSDGVSQLSSALLHANHTLSTIDHLVLETVERLGEAVRTELTTLEEVLEPRTELVAAARGARRQAEAAAQQLQGLAFWQGVPLSPLQVAENVSFVEEYRWLAYVLLLLLELLVCLFTLLGLAKQSKWLVIVMTVMSLLVLVLSWGSMGLEAATAVGLSDFCSNPDPYVLNLTQEETGLSSDILSYYLLCNRAVSNPFQQRLTLSQRALANIHSQLLGLEREAVPQFPSAQKPLLSLEETLNVTEGNFHQLVALLHCRSLHKDYGAALRGLCEDALEGLLFLLLFSLLSAGALATALCSLPRAWALFPPSDDYDDTDDDDPFNPQESKRFVQWQSSI

SEQ ID NO: 8968 - protein, 451 aa, Homo sapiens
MGAPPGYRPSAWVHLLHQLPRADFQLRPVPSVFAPQEQEYQQALLLVAALAGLGLGLSLIFIAVYLIRFCCCRPPEPPGSKIPSPGGGCVTWSCIVALLAGCTGIGIGFYGNSETSDGVSQLSSALLHANHTLSTIDHLVLETVERLGEAVRTELTTLEEVLEPRTELVAAARGARRQAEAAAQQLQGLAFWQGVPLSPLQVAENVSFVEEYRWLAYVLLLLLELLVCLFTLLGLAKQSKWLVIVMTVMSLLVLVLSWGSMGLEAATAVGLSDFCSNPDPYVLNLTQEETGLSSDILSYYLLCNRAVSNPFQQRLTLSQRALANIHSQLLGLEREAVPQFPSAQKPLLSLEETLNVTEGNFHQLVALLHCRSLHKDYGAALRGLCEDALEGLLFLLLFSLLSAGALATALCSLPRAWALFPPSDDYDDTDDDDPFNPQQESKRFVQWQSSI

SEQ ID NO: 8969 - protein, 460 aa, Homo sapiens
MGAPPGYRPSAWVHLLHQLPRADFQLRPVPSVFAPQEQEYQQALLLVAALAGLGLGLSLIFIAVYLIRFCCCRPPEPPGSKIPSPGGGCVTWSCIVALLAGCTGIGIGFYGNSETSDGVSQLSSALLHANHTLSTIDHLVLETVERLGEAVRTELTTLEEVLEPRTELVAAARGARRQAEAAAQQLQGLAFWQGVPLSPLQVAENVSFVEEYRWLAYVLLLLLELLVCLFTLLGLAKQSKWLVIVMTVMSLLVLVLSWGSMGLEAATAVGLSDFCSNPDPYVLNLTQEETGLSSDILSYYLLCNRAVSNPFQQRLTLSQRALANIHSQLLGLEREAVPQFPSAQKPLLSLEETLNVTEGNFHQLVALLHCRSLHKDYGAALRGLCEDALEGLLFLLLFSLLSAGALATALCSLPRAWALFPPRNPSALCSGSRLSEPLLPAGLEPGSPLRSFPGCRRRPH

SEQ ID NO: 8970 - protein, 239 aa, Homo sapiens
MWLAYVLLLLLELLVCLFTLLGLAKQSKWLVIVMTVMSLLVLVLSWGSMGLEAATAVGLSDFCSNPDPYVLNLTQEETGLSSDILSYYLLCNRAVSNPFQQRLTLSQRALANIHSQLLGLEREAVPQFPSAQKPLLSLEETLNVTEGNFHQLVALLHCRSLHKDYGAALRGLCEDALEGLLFLLLFSLLSAGALATALCSLPRAWALFPPSDDYDDTDDDDPFNPQQESKRFVQWQSSI

SEQ ID NO: 8971 - protein, 320 aa, Homo sapiens
MEKVRLWRGSESRAAICTGIGIGFYGNSETSDGVSQLSSALLHANHTLSTIDHLTVERLGEAVRTELTTLEEVLEPRTELVAAARGARRQAEAAAQQLQGLAFWQGVPLSPLQVAENVSFVEEYRWLAYVLLLLLELLVCLFTLLGLAKQSKWLVIVMTVMSLLVLVLSWGSMGLEAATAVGLSDFCSNPDPYVLNLTQEETGLSSDILSYYLLCNRAVSNPFQQRLTLSQRALANIHSQLLGLEREAVPQFPSAQKPLLSLEETLNVTEGNFHQLVALLHCRSLHKVKPLPSQFLLPRGASVSTHRTTSSFSLDPCHCA

SEQ ID NO: 8972 - protein, 153 aa, Homo sapiens
MAELPHRIIKETQRLLAEPVPGIKAEPDESNARYFHVVIAGESKDSPFEGGTFKRELLLAEEYPMAAPKVRFMTKIYHPNVDKLERISLDILKDKWSPALQIRTVLLSIQALLNAPNPDDPLANDVVEQWKTNEAQAIETARAWTRLYAMNSI

SEQ ID NO: 8973 - protein, 290 aa, Homo sapiens
MSNKEGSGGFRKRKHDNFPHNQRREGKDVNSSSPVMLAFKSFQQELDARHDKYERLVKLSRDITVESKRTIFLLHRITSAPDMEDILTESEIKLDGVRQKIFQVAQELSGEDMHQFHRAITTGLQEYVEAVSFQHFIKTRSLISMDEINKQLIFTTEDNGKENKTPSSDAQDKQFGTWRLRVTPVDYLLGVADLTGELMRMCINSVGNGDIDTPFEVSQFLRQVYDGFSFIGNTGPYEVSKKLYTLKQSLAKVENACYALKVRGSEIPKHMLADVFSVKTEMIDQEEGIS

SEQ ID NO: 8974 - protein, 313 aa, Homo sapiens
MPVAGSELPRRPLPPAAQERDAEPRPPHGELQYLGQIQHILRCGVRKDDRTGTGTLSVFGMQARYSLRDEFPLLTTKRVFWKGVLEELLWFIKGSTNAKELSSKGVKIWDANGSRDFLDSLGFSTREEGDLGPVYGFQWRHFGAEYRDMESDYSGQGVDQLQRVIDTIKTNPDDRRIIMCAWNPRDLPLMALPPCHALCQFYVVNSELSCQLYQRSGDMGLGVPFNIASYALLTYMIAHITGLKPGDFIHTLGDAHIYLNHIEPLKIQLQREPRPFPKLRILRKVEKIDDFKAEDFQIEGYNPHPTIKMEMAV

SEQ ID NO: 8975 - protein, 279 aa, Homo sapiens
MPVAGSELPRRPLPPAAQERDAEPRPPHGELQYLGQIQHILRCGVRKDDRTGTGTLSVFGMQARYSLRDEFPLLTTKRVFWKGVLEELLWFIKGSTNAKELSSKGVKIWDANGSRDFLDSLGFSTREEGDLGPVYGFQWRHFGAEYRDMESDLPLMALPPCHALCQFYVVNSELSCQLYQRSGDMGLGVPFNIASYALLTYMIAHITGLKPGDFIHTLGDAHIYLNHIEPLKIQLQREPRPFPKLRILRKVEKIDDFKAEDFQIEGYNPHPTIKMEMAV

SEQ ID NO: 8976 - protein, 230 aa, Homo sapiens
MPVAGSELPRRPLPPAAQERDAEPRPPHGELQYLGQIQHILRCGVRKDDRTGTGTLSVFGMQARYSLRDYSGQGVDQLQRVIDTIKTNPDDRRIIMCAWNPRDLPLMALPPCHALCQFYVVNSELSCQLYQRSGDMGLGVPFNIASYALLTYMIAHITGLKPGDFIHTLGDAHIYLNHIEPLKIQLQREPRPFPKLRILRKVEKIDDFKAEDFQIEGYNPHPTIKMEMAV

SEQ ID NO: 8977 - protein, 350 aa, Homo sapiens
MSHQTGIQASEDVKEIFARARNGKYRLLKISIENEQLVIGSYSQPSDSWDKDYDSFVLPLLEDKQPCYILFRLDSQNAQGYEWIFIAWSPDHSHVRQKMLYAATRATLKKEFGGGHIKDEVFGTVKEDVSLHGYKKYLLSQSSPAPLTAAEEELRQIKINEVQTDVGVDTKHQTLQGVAFPISREAFQALEKLNNRQLNYVQLEIDIKNEIIILANTTNTELKDLPKRIPKDSARYHFFLYKHSHEGDYLESIVFIYSMPGYTCSIRERMLYSSCKSRLLEIVERQLQMDVIRKIEIDNGDELTADFLYEEVHPKQHAHKQSFAKPKGPAGKRGIRRLIRGPAETEATTD

SEQ ID NO: 8978 - protein, 357 aa, Homo sapiens
MSHQTGIQASEDVKEIFARARNGKYRLLKISIENEQLVIGSYSQPSDSWDKDYDSFVLPLLEDKQPCYILFRLDSQNAQGYEWIFIAWSPDHSHVRQKMLYAATRATLKKEFGGGHIKDEVFGTVKEDVSLHGYKKYLLSQSSPAPLTAAEEELRQIKINESPEDHIGVQTDVGVDTKHQTLQGVAFPISREAFQALEKLNNRQLNYVQLEIDIKNEIIILANTTNTELKDLPKRIPKDSARYHFFLYKHSHEGDYLESIVFIYSMPGYTCSIRERMLYSSCKSRLLEIVERQLQMDVIRKIEIDNGDELTADFLYEEVHPKQHAHKQSFAKPKGPAGKRGIRRLIRGPAETEATTD

SEQ ID NO: 8979 - protein, 252 aa, Homo sapiens
MLYAATRATLKKEFGGGHIKDEVFGTVKEDVSLHGYKKYLLSQSSPAPLTAAEEELRQIKINEVQTDVGVDTKHQTLQGVAFPISREAFQALEKLNNRQLNYVQLEIDIKNEIIILANTTNTELKDLPKRIPKDSARYHFFLYKHSHEGDYLESIVFIYSMPGYTCSIRERMLYSSCKSRLLEIVERQLQMDVIRKIEIDNGDELTADFLYEEVHPKQHAHKQSFAKPKGPAGKRGIRRLIRGPAETEATTD

SEQ ID NO: 8980 - protein, 530 aa, Homo sapiens
MEDDSLYLGGEWQFNHFSKLTSPRPDAAFAEIQRTSLPEKSPLSSETRVDLCDDLAPVARQLAPREKLPLSSRRPAAVGAGLQNMGNTCYLNASLQCLTYTPPLANYMLSREHSQTCQRPKCCMLCTMQAHITWALHSPGHVIQPSQALAAGFHRGKQEDAHEFLMFTVDAMKKACLPGHKQVDHHSKDTTLIHQIFGGCWRSQIKCLHCHGISDTFDPYLDIALDIQAAQSVKQALEQLVKPEELNGENAYPCGLCLQRAPASNTLTLHTSAKVLILVLKRFCDVTGNKLAKNVQYPECLDMQPYMSQQNTGPLVYVLYAVLVHAGWSCHNGYYFSYVKAQEGQWYKMDDAEVTACSITSVLSQQAYVLFYIQKSEWERHSESVSRGREPRALGAEDTDRPATQGELKRDHPCLQVPELDEHLVERATEESTLDHWKFPQEQNKMKPEFNVRKVEGTLPPNVLVIHQSKYKCGMKNHHPEQQSSLLNLSSMNSTDQESMNTGTLASLQGRTRRSKGKNKHSKRSLLVCQ

SEQ ID NO: 8981 - protein, 170 aa, Homo sapiens
MTELQSALLLRRQLAELNKNPVEGFSAGLIDDNDLYRWEVLIIGPPDTLYEGGVFKAHLTFPKDYPLRPPKMKFITEIWHPNVDKNGDVCISILHEPGEDKYGYEKPEERWLPIHTVETIMISVISMLADPNGDSPANVDAAKEWREDRNGEFKRKVARCVRKSQETAFE

SEQ ID NO: 8982 - protein, 953 aa, Homo sapiens
MGRAAATAGGGGGARRWLPWLGLCFWAAGTAAARGTDNGEALPESIPSAPGTLPHFIEEPDDAYIIKSNPIALRCKARPAMQIFFKCNGEWVHQNEHVSEETLDESSGLKVREVFINVTRQQVEDFHGPEDYWCQCVAWSHLGTSKSRKASVRIAYLRKNFEQDPQGREVPIEGMIVLHCRPPEGVPAAEVEWLKNEEPIDSEQDENIDTRADHNLIIRQARLSDSGNYTCMAANIVAKRRSLSATVVVYVNGGWSSWTEWSACNVRCGRGWQKRSRTCTNPAPLNGGAFCEGMSVQKITCTSLCPVDGSWEVWSEWSVCSPECEHLRIRECTAPPPRNGGKFCEGLSQESENCTDGLCILDKKPLHEIKPQSIENASDIALYSGLGAAVVAVAVLVIGVTLYRRSQSDYGVDVIDSSALTGGFQTFNFKTVRQGNSLLLNSAMQPDLTVSRTYSGPICLQDPLDKELMTESSLFNPLSDIKVKVQSSFMVSLGVSERAEYHGKNHSRTFPHGNNHSFSTMHPRNKMPYIQNLSSLPTRTELRTTGVFGHLGGRLVMPNTGVSLLIPHGAIPEENSWEIYMSINQGEPSLQSDGSEVLLSPEVTCGPPDMIVTTPFALTIPHCADVSSEHWNIHLKKRTQQGKWEEVMSVEDESTSCYCLLDPFACHVLLDSFGTYALTGEPITDCAVKQLKVAVFGCMSCNSLDYNLRVYCVDNTPCAFQEVVSDERHQGGQLLEEPKLLHFKGNTFSLQISVLDIPPFLWRIKPFTACQEVPFSRVWCSNRQPLHCAFSLERYTPTTTQLSCKICIRQLKGHEQILQVQTSILESERETITFFAQEDSTFPAQTGPKAFKIPYSIRQRICATFDTPNAKGKDWQMLAQKNSINRNLSYFATQSSPSAVILNLWEARHQHDGDLDSLACALEEIGRTHTKLSNISESQLDEADFNYSRQNGL

SEQ ID NO: 8983 - protein, 948 aa, Homo sapiens
MILVLVKALSDVCAGTSGFLLDFSSQTSPGTDNGEALPESIPSAPGTLPHFIEEPDDAYIIKSNPIALRCKARPAMQIFFKCNGEWVHQNEHVSEETLDESSGLKVREVFINVTRQQVEDFHGPEDYWCQCVAWSHLGTSKSRKASVRIAYLRKNFEQDPQGREVPIEGMIVLHCRPPEGVPAAEVEWLKNEEPIDSEQDENIDTRADHNLIIRQARLSDSGNYTCMAANIVAKRRSLSATVVVYVNGGWSSWTEWSACNVRCGRGWQKRSRTCTNPAPLNGGAFCEGMSVQKITCTSLCPVDGSWEVWSEWSVCSPECEHLRIRECTAPPPRNGGKFCEGLSQESENCTDGLCILDKKPLHEIKPQSIENASDIALYSGLGAAVVAVAVLVIGVTLYRRSQSDYGVDVIDSSALTGGFQTFNFKTVRQGNSLLLNSAMQPDLTVSRTYSGPICLQDPLDKELMTESSLFNPLSDIKVKVQSSFMVSLGVSERAEYHGKNHSRTFPHGNNHSFSTMHPRNKMPYIQNLSSLPTRTELRTTGVFGHLGGRLVMPNTGVSLLIPHGAIPEENSWEIYMSINQGEPSLQSDGSEVLLSPEVTCGPPDMIVTTPFALTIPHCADVSSEHWNIHLKKRTQQGKWEEVMSVEDESTSCYCLLDPFACHVLLDSFGTYALTGEPITDCAVKQLKVAVFGCMSCNSLDYNLRVYCVDNTPCAFQEVVSDERHQGGQLLEEPKLLHFKGNTFSLQISVLDIPPFLWRIKPFTACQEVPFSRVWCSNRQPLHCAFSLERYTPTTTQLSCKICIRQLKGHEQILQVQTSILESERETITFFAQEDSTFPAQTGPKAFKIPYSIRQRICATFDTPNAKGKDWQMLAQKNSINRNLSYFATQSSPSAVILNLWEARHQHDGDLDSLACALEEIGRTHTKLSNISESQLDEADFNYSRQNGL

SEQ ID NO: 8984 - protein, 381 aa, Homo sapiens
MNALDGVPFKLPKGFVIGTEPLPGPELSVPACGEVLLGSMHDFSLERTALFWVEAAGQGPSPYQCGDPGTASAPPAWLLLVSPEHGLAPAPTTIRDPEAGHQERPEEEGEDEAEASSGSEEEPAPSSLQPGSPASPGPGRRLCSLDVLRGVRLELAGARRRLSEGKLVSRPRALLHGLRGHRALSLCPSPAQSPRSASPPGPAPQHPAAPASPPRPSTAGAIPPLRSHKPTVASLSPYTCLPPLGGAPQPLNPHKSHPDTAADLLSALSQEEQDLIGPVVALGYPLRRAIIALQKTGRQSLSQFLSYLSACDRLLRQGYEEGLVDEAMEMFQFSESQAGEFLRLWEQFSDMGFQQDRIKEVLLVHGNRREQALEELVACAQ

SEQ ID NO: 8985 - protein, 1012 aa, Homo sapiens
MDALDASKLLDEELYSRQLYVLGSPAMQRIQGARVLVSGLQGLGAEVAKNLVLMGVGSLTLHDPHPTCWSDLAAQFLLSEQDLERSRAEASQELLAQLNRAVQVVVHTGDITEDLLLDFQVVVLTAAKLEEQLKVGTLCHKHGVCFLAADTRGLVGQLFCDFGEDFTVQDPTEAEPLTAAIQHISQGSPGILTLRKGANTHYFRDGDLVTFSGIEGMVELNDCDPRSIHVREDGSLEIGDTTTFSRYLRGGAITEVKRPKTVRHKSLDTALLQPHVVAQSSQEVHHAHCLHQAFCALHKFQHLHGRPPQPWDPVDAETVVGLARDLEPLKRTEEEPLEEPLDEALVRTVALSSAGVLSPMVAMLGAVAAQEVLKAISRKFMPLDQWLYFDALDCLPEDGELLPSPEDCALRGSRYDGQIAVFGAGFQEKLRRQHYLLVGAGAIGCELLKVFALVGLGAGNSGGLTVVDMDHIERSNLSRQFLFRSQDVGRPKAEVAAAAARGLNPDLQVIPLTYPLDPTTEHIYGDNFFSRVDGVAAALDSFQARRYVAARCTHYLKPLLEAGTSGTWGSATVFMPHVTEAYRAPASAAASEDAPYPVCTVRYFPSTAEHTLQWARHEFEELFRLSAETINHHQQAHTSLADMDEPQTLTLLKPVLGVLRVRPQNWQDCVAWALGHWKLCFHYGIKQLLRHFPPNKVLEDGTPFWSGPKQCPQPLEFDTNQDTHLLYVLAAANLYAQMHGLPGSQDWTALRELLKLLPQPDPQQMAPIFASNLELASASAEFGPEQQKELNKALEVWSVGPPLKPLMFEKDDDSNFHVDFVVAAASLRCQNYGIPPVNRAQSKRIVGQIIPAIATTTAAVAGLLGLELYKVVSGPRPRSAFRHSYLHLAENYLIRYMPFAPAIQTFHHLKWTSWDRLKVPAGQPERTLESLLAHLQEQHGLRVRILLHGSALLYAAGWSPEKQAQHLPLRVTELVQQLTGQAPAPGQRVLVLELSCEGDDEDTAFPPLHYEL

SEQ ID NO: 8986 - protein, 276 aa, Homo sapiens
MLQQDSNDDTEDVSLFDAEEETTNRPRKAKIRHPVASFFHLFFRVSAIIVCLLCELLSSSFITCMVTIILLLSCDFWAVKNVTGRLMVGLRWWNHIDEDGKSHWVFESRKESSQENKTVSEAESRIFWLGLIACSVLWVIFAFSALFSFTVKWLRRSRHIAQTGLKVLGSRDPPASAFQSAGITGVSRCPGHPSRKFHQVDINSFTRITDRALYWKPAPRLSSPPLRAAPGNCQQMAPARLFLSLRLWAWRGGGESPNSRGTGEPGPKFHLASGMH

SEQ ID NO: 8987 - protein, 164 aa, Homo sapiens
MLQQDSNDDTEDVSLFDAEEETTNRPRKAKIRHPVASFFHLFFRVSAIIVCLLCELLSSSFITCMVTIILLLSCDFWAVKNVTGRLMVGLRWWNHIDEDGKSHWVFESRKESSQENKTVSEAESRIFWLGLIACSVLWVIFAFSALFSFTVKWLESEPVMLRNQ

SEQ ID NO: 8988 - protein, 203 aa, Homo sapiens
MLQQDSNDDTEDVSLFDAEEETTNRPRKAKIRHPVASFFHLFFRVSAIIVCLLCELLSSSFITCMVTIILLLSCDFWAVKNVTGRLMVGLRWWNHIDEDGKSHWVFESRKESSQENKTVSEAESRIFWLGLIACSVLWVIFAFSALFSFTVKWLAVVIMGVVLQGANLYGYIRCKVRSRKHLTSMATSYFGKQFLRQVSVFWM

SEQ ID NO: 8989 - protein, 425 aa, Homo sapiens
MAGAEGAAGRQSELEPVVSLVDVLEEDEELENEACAVLGGSDSEKCSYSQGSVKRQALYACSTCTPEGEEPAGICLACSYECHGSHKLFELYTKRNFRCDCGNSKFKNLECKLLPDKAKVNSGNKYNDNFFGLYCICKRPYPDPEDEIPDEMIQCVVCEDWFHGRHLGAIPPESGDFQEMVCQACMKRCSFLWAYAAQLAVTKISTEDDGLVRNIDGIGDQEVIKPENGEHQDSTLKEDVPEQGKDDVREVKVEQNSEPCAGSSSESDLQTVFKNESLNAESKSGCKLQELKAKQLIKKDTATYWPLNWRSKLCTCQDCMKMYGDLDVLFLTDEYDTVLAYENKGKIAQATDRSDPLMDTLSSMNRVQQVELICEYNDLKTELKDYLKRFADEGTVVKREDIQQFFEEFQSKKRRRVDGMQYYCS

SEQ ID NO: 8990 - protein, 409 aa, Homo sapiens
MALRPEDPSSGFRHSNVVAFINEKMARHTKGPEFYLENISLSWEKVEDKLRAILEDSEVPSEVKEACTWGSLALGVRFAHRQAQLQRHRVRWLHGFAKLHKSAAQALASDLKKLREQQETERKEAASRLRMAQTSLVEVQKERDKELVSPHEWEQGAGWPGLATAGGVCTEGAAEEEEEAAVAAAGAAGGKGAEEEQRDVEVVAAPVEAMAPPVEAGAAPMETQFPHVEARAASMETTEKLERILLQLLGDADQEKYTYWGQKEGDLRSVETATSYFSGTTNPWSRASSEPLPVQLPASYSYSYSSPFSSFSDIPTISPPQATVTAPVPPQLPSDWEAFDTSLWSDGGPHRIDHQEHPRDRRYSEPHQQRPPVYRRPGDWDCPWCNAVNFSRRDTCFDCGKGIWLQKPH

SEQ ID NO: 8991 - protein, 346 aa, Homo sapiens
MDMLDPGLDPAASATAAAAASHDKGPEAEEGVELQEGGDGPGAEEQTAVAITSVQQAAFGDHNIQYQFRTETNGGQVTYRVVQVTDGQLDGQGDTAGAVSVVSTAAFAGGQQAVTQVGVDGAAQRPGPAAASVPPGPAAPFPLAVIQNPFSNGGSPAAEAVSGEARFAYFPASSVGDTTAVSVQTTDQSLQAGGQFYVMMTPQDVLQTGTQRTIAPRTHPYSPKIDGTRTPRDERRRAQHNEVERRRRDKINNWIVQLSKIIPDCNADNSKTGASKGGILSKACDYIRELRQTNQRMQETFKEAERLQMDNELLRQQIEELKNENALLRAQLQQHNLEMVGEGTRQ

SEQ ID NO: 8992 - protein, 338 aa, Homo sapiens
MDMLDPGLDPAASATAAAAASHDKGPEAEEGVELQEGGDGPGAEEQTAVAITSVQQAAFGDHNIQYQFRTETNGGQVTYRVVQVTDGQLDGQGDTAGAVSVVSTAAFAGGQQAVTQVGVDGAAQRPGPAAASVPPGPAAPFPLAVIQNPFSNGGSPAAEAVSGEARFAYFPASSVGDTTAVSVQTTDQSLQAGGQFYVMMTPQDVLQTGTQRTIAPRTHPYSPKIDGTRTPRDERRRAQHNEVERRRRDKINNWIVQLSKIIPDCNADNSKTGAACDYIRELRQTNQRMQETFKEAERLQMDNELLRQQIEELKNENALLRAQLQQHNLEMVGEGTRQ

SEQ ID NO: 8993 - protein, 279 aa, Homo sapiens
MDMLDPGLDPAASATAAAAASHDKGPEAEEGVELQEGGDGPGAEEQTAVAITSVQQAAFGDHNIQYQFRTETNGGQAVIQNPFSNGGSPAAEAVSGEARFAYFPASSVGDTTAVSVQTTDQSLQAGGQFYVMMTPQDVLQTGTQRTIAPRTHPYSPKIDGTRTPRDERRRAQHNEVERRRRDKINNWIVQLSKIIPDCNADNSKTGASKGGILSKACDYIRELRQTNQRMQETFKEAERLQMDNELLRQQIEELKNENALLRAQLQQHNLEMVGEGTRQ

SEQ ID NO: 8994 - protein, 215 aa, Homo sapiens
MDMLDPGLDPAASATAAAAASHDKGPEAEEGVELQEGGDGPGAEEQTAVAITSVQQAAFGDHNIQYQFRTETNGGQTGTQRTIAPRTHPYSPKIDGTRTPRDERRRAQHNEVERRRRDKINNWIVQLSKIIPDCNADNSKTGASKGGILSKACDYIRELRQTNQRMQETFKEAERLQMDNELLRQQIEELKNENALLRAQLQQHNLEMVGEGTRQ

SEQ ID NO: 8995 - protein, 2555 aa, Homo sapiens
MTAITHGSPVGGNDSQGQVLDGQSQHLFQQNQTSSPDSSNENSVATPPPEEQGQGDAPPQHEDEEPAFPHTELANLDDMINRPRWVVPVLPKGELEVLLEAAIDLSVKGLDVKSEACQRFFRDGLTISFTKILMDEAVSGWKFEIHRCIINNTHRLVELCVAKLSQDWFPLLELLAMALNPHCKFHIYNGTRPCELISSNAQLPEDELFARSSDPRSPKGWLVDLINKFGTLNGFQILHDRFFNGSALNIQIIAALIKPFGQCYEFLSQHTLKKYFIPVIEIVPHLLENLTDEELKKEAKNEAKNDALSMIIKSLKNLASRISGQDETIKNLEIFRLKMILRLLQISSFNGKMNALNEINKVISSVSYYTHRHSNPEEEEWLTAERMAEWIQQNNILSIVLQDSLHQPQYVEKLEKILRFVIKEKALTLQDLDNIWAAQAGKHEAIVKNVHDLLAKLAWDFSPGQLDHLFDCFKASWTNASKKQREKLLELIRRLAEDDKDGVMAHKVLNLLWNLAQSDDVPVDIMDLALSAHIKILDYSCSQDRDAQKIQWIDHFIEELRTNDKWVIPALKQIREICSLFGEASQNLSQTQRSPHIFYRHDLINQLQQNHALVTLVAENLATYMNSIRLYAGDHEDYDPQTVRLGSRYSHVQEVQERLNFLRFLLKDGQLWLCAPQAKQIWKCLAENAVYLCDREACFKWYSKLMGDEPDLDPDINKDFFESNVLQLDPSLLTENGMKCFERFFKAVNCRERKLIAKRRSYMMDDLELIGLDYLWRVVIQSSDEIANRAIDLLKEIYTNLGPRLKANQVVIHEDFIQSCFDRLKASYDTLCVFDGDKNSINCARQEAIRMVRVLTVIKEYINECDSDYHKERMILPMSRAFRGKHLSLIVRFPNQGRQVDELDIWSHTNDTIGSVRRCIVNRIKANVAHKKIELFVGGELIDSEDDRKLIGQLNLKDKSLITAKLTQINFNMPSSPDSSSDSSTASPGNHRNHYNDGPNLEVESCLPGVIMSVHPRYISFLWQVADLGSNLNMPPLRDGARVLMKLMPPDRTAVEKLRAVCLDHAKLGEGKLSPPLDSLFFGPSASQVLYLTEVVYALLMPAGVPLTDGSSDFQVHFLKSGGLPLVLSMLIRNNFLPNTDMETRRGAYLNALKIAKLLLTAIGYGHVRAVAEACQPVVDGTDPITQINQVTHDQAVVLQSALQSIPNPSSECVLRNESILLAQEISNEASRYMPDICVIRAIQKIIWASACGALGLVFSPNEEITKIYQMTTNGSNKLEVEDEQVCCEALEVMTLCFALLPTALDALSKEKAWQTFIIDLLLHCPSKTVRQLAQEQFFLMCTRCCMGHRPLLFFITLLFTILGSTAREKGKYSGDYFTLLRHLLNYAYNGNINIPNAEVLLVSEIDWLKRIRDNVKNTGETGVEEPILEGHLGVTKELLAFQTSEKKYHFGCEKGGANLIKELIDDFIFPASKVYLQYLRSGELPAEQAIPVCSSPVTINAGFELLVALAIGCVRNLKQIVDCLTEMYYMGTAITTCEALTEWEYLPPVGPRPPKGFVGLKNAGATCYMNSVIQQLYMIPSIRNSILAIEGTGSDLHDDMFGDEKQDSESNVDPRDDVFGYPHQFEDKPALSKTEDRKEYNIGVLRHLQVIFGHLAASQLQYYVPRGFWKQFRLWGEPVNLREQHDALEFFNSLVDSLDEALKALGHPAILSKVLGGSFADQKICQGCPHRYECEESFTTLNVDIRNHQNLLDSLEQYIKGDLLEGANAYHCEKCDKKVDTVKRLLIKKLPRVLAIQLKRFDYDWERECAIKFNDYFEFPRELDMGPYTVAGVANLERDNVNSENELIEQKEQSDNETAGGTKYRLVGVLVHSGQASGGHYYSYIIQRNGKDDQTDHWYKFDDGDVTECKMDDDEEMKNQCFGGEYMGEVFDHMMKRMSYRRQKRWWNAYILFYEQMDMIDEDDEMIRYISELTIARPHQIIMSPAIERSVRKQNVKFMHNRLQYSLEYFQFVKKLLTCNGVYLNPAPGQDYLLPEAEEITMISIQLAARFLFTTGFHTKKIVRGPASDWYDALCVLLRHSKNVRFWFTHNVLFNVSNRFSEYLLECPSAEVRGAFAKLIVFIAHFSLQDGSCPSPFASPGPSSQACDNLSLSDHLLRATLNLLRREVSEHGHHLQQYFNLFVMYANLGVAEKTQLLKLNVPATFMLVSLDEGPGPPIKYQYAELGKLYSVVSQLIRCCNVSSTMQSSINGNPPLPNPFGDLNLSQPIMPIQQNVLDILFVRTSYVKKIIEDCSNSEDTIKLLRFCSWENPQFSSTVLSELLWQVAYSYTYELRPYLDLLFQILLIEDSWQTHRIHNALKGIPDDRDGLFDTIQRSKNHYQKRAYQCIKCMVALFSSCPVAYQILQGNGDLKRKWTWAVEWLGDELERRPYTGNPQYSYNNWSPPVQSNETANGYFLERSHSARMTLAKACELCPEEEPDDQDAPDEHEPSPSEDAPLYPHSPASQYQQNNHVHGQPYTGPAAHHLNNPQKTGQRTQENYEGNEEVSSPQMKDQ

SEQ ID NO: 8996 - protein, 2070 aa, Homo sapiens
MTAITHGSPVGGNDSQGQVLDGQSQHLFQQNQTSSPDSSNENSVATPPPEEQGQGDAPPQHEDEEPAFPHTELANLDDMINRPRWVVPVLPKGELEVLLEAAIDLSVKGLDVKSEACQRFFRDGLTISFTKILMDEAVSGWKFEIHRCIINNTHRLVELCVAKLSQDWFPLLELLAMALNPHCKFHIYNGTRPCELISSNAQLPEDELFARSSDPRSPKGWLVDLINKFGTLNGFQILHDRFFNGSALNIQIIAALIKPFGQCYEFLSQHTLKKYFIPVIEIVPHLLENLTDEELKKEAKNEAKNDALSMIIKSLKNLASRISGQDETIKNLEIFRLKMILRLLQISSFNGKMNALNEINKVISSVSYYTHRHSNPEEEEWLTAERMAEWIQQNNILSIVLQDSLHQPQYVEKLEKILRFVIKEKALTLQDLDNIWAAQAGKHEAIVKNVHDLLAKLAWDFSPGQLDHLFDCFKASWTNASKKQREKLLELIRRLAEDDKDGVMAHKVLNLLWNLAQSDDVPVDIMDLALSAHIKILDYSCSQDRDAQKIQWIDHFIEELRTNDKWVIPALKQIREICSLFGEASQNLSQTQRSPHIFYRHDLINQLQQNHALVTLVAENLATYMNSIRLYAGDHEDYDPQTVRLGSRYSHVQEVQERLNFLRFLLKDGQLWLCAPQAKQIWKCLAENAVYLCDREACFKWYSKLMGDEPDLDPDINKDFFESNVLQLDPSLLTENGMKCFERFFKAVNCRERKLIAKRRSYMMDDLELIGLDYLWRVVIQSSDEIANRAIDLLKEIYTNLGPRLKANQVVIHEDFIQSCFDRLKASYDTLCVFDGDKNSINCARQEAIRMVRVLTVIKEYINECDSDYHKERMILPMSRAFRGKHLSLIVRFPNQGRQVDELDIWSHTNDTIGSVRRCIVNRIKANVAHKKIELFVGGELIDSEDDRKLIGQLNLKDKSLITAKLTQINFNMPSSPDSSSDSSTASPGNHRNHYNDGPNLEVESCLPGVIMSVHPRYISFLWQVADLGSNLNMPPLRDGARVLMKLMPPDRTAVEKLRAVCLDHAKLGEGKLSPPLDSLFFGPSASQVLYLTEVVYALLMPAGVPLTDGSSDFQVHFLKSGGLPLVLSMLIRNNFLPNTDMETRRGAYLNALKIAKLLLTAIGYGHVRAVAEACQPVVDGTDPITQINQVTHDQAVVLQSALQSIPNPSSECVLRNESILLAQEISNEASRYMPDICVIRAIQKIIWASACGALGLVFSPNEEITKIYQMTTNGSNKLEVEDEQVCCEALEVMTLCFALLPTALDALSKEKAWQTFIIDLLLHCPSKTVRQLAQEQFFLMCTRCCMGHRPLLFFITLLFTILGSTAREKGKYSGDYFTLLRHLLNYAYNGNINIPNAEVLLVSEIDWLKRIRDNVKNTGETGVEEPILEGHLGVTKELLAFQTSEKKYHFGCEKGGANLIKELIDDFIFPASKVYLQYLRSGELPAEQAIPVCSSPVTINAGFELLVALAIGCVRNLKQIVDCLTEMYYMGTAITTCEALTEWEYLPPVGPRPPKGFVGLKNAGATCYMNSVIQQLYMIPSIRNSILAIEGTGSDLHDDMFGDEKQDSESNVDPRDDVFGYPHQFEDKPALSKTEDRKEYNIGVLRHLQVIFGHLAASQLQYYVPRGFWKQFRLWGEPVNLREQHDALEFFNSLVDSLDEALKALGHPAILSKVLGGSFADQKICQGCPHRYECEESFTTLNVDIRNHQNLLDSLEQYIKGDLLEGANAYHCEKCDKKVDTVKRLLIKKLPRVLAIQLKRFDYDWERECAIKFNDYFEFPRELDMGPYTVAGVANLERDNVNSENELIEQKEQSDNETAGGTKYRLVGVLVHSGQASGGHYYSYIIQRNGKDDQTDHWYKFDDGDVTECKMDDDEEMKNQCFGGEYMGEVFDHMMKRMSYRRQKRWWNAYILFYEQMDMIDEDDEMIRYISELTIARPHQIIMSPAIERSVRKQNVKFMHNRLQYSLEYFQFVKKLLTCNGVYLNPAPGQDYLLPEAEEITMISIQLAARFLFTTGFHTKKIVRGPASD

SEQ ID NO: 8997 - protein, 771 aa, Homo sapiens
MTANRLAESLLALSQQEELADLPKDYLLSESEDEGDNDGERKHQKLLEAISSLDGKNRRKLAERSEASLKVSEFNVSSEGSGEKLVLADLLEPVKTSSSLATVKKQLSRVKSKKTVELPLNKEEIERIHREVAFNKTAQVLSKWDPVVLKNRQAEQLVFPLEKEEPAIAPIEHVLSGWKARTPLEQEIFNLLHKNKQPVTDPLLTPVEKASLRAMSLEEAKMRRAELQRARALQSYYEAKARREKKIKSKKYHKVVKKGKAKKALKEFEQLRKVNPAAALEELEKIEKARMMERMSLKHQNSGKWAKSKAIMAKYDLEARQAMQEQLSKNKELTQKLQVASESEEEEGGTEDVEELLVPDVVNEVQMNADGPNPWMLRSCTSDTKEAATQEDPEQLPELEAHGVSESEGEERPVAEEEILLREFEERRSLRKRSELSQDAEPAGSQETKDSGSQEVLSELRVLSQKLKENHQSRKQKASSEGTIPQVQREEPAPEEEEPLLLQRPERVQTLEELEELGKEECFQNKELPRPVLEGQQSERTPNNRPDAPKEKKKKEQMIDLQNLLTTQSPSVKSLAVPTIEELEDEEERNHRQMIKEAFAGDDVIRDFLKEKREAVEASKPKDVDLTLPGWGEWGGVGLKPSAKKRRRFLIKAPEGPPRKDKNLPNVIINEKRNIHAAAHQVRVLPYPFTHHWQFERTIQTPIGSTWNTQRAFQKLTTPKVVTKPGHIINPIKAEDVGYRSSSRSDLSVIQRNPKRITTRHKKQLKKCSVD

SEQ ID NO: 8998 - protein, 603 aa, Homo sapiens
MKGDFRKKKSEARTPLEQEIFNLLHKNKQPVTDPLLTPVEKASLRAMSLEEAKMRRAELQRARALQSYYEAKARREKKIKSKKYHKVVKKGKAKKALKEFEQLRKVNPAAALEELEKIEKARMMERMSLKHQNSGKWAKSKAIMAKYDLEARQAMQEQLSKNKELTQKLQVASESEEEEGGTEDVEELLVPDVVNEVQMNADGPNPWMLRSCTSDTKEAATQEDPEQLPELEAHGVSESEGEERPVAEEEILLREFEERRSLRKRSELSQDAEPAGSQETKDSGSQEVLSELRVLSQKLKENHQSRKQKASSEGTIPQVQREEPAPEEEEPLLLQRPERVQTLEELEELGKEECFQNKELPRPVLEGQQSERTPNNRPDAPKEKKKKEQMIDLQNLLTTQSPSVKSLAVPTIEELEDEEERNHRQMIKEAFAGDDVIRDFLKEKREAVEASKPKDVDLTLPGWGEWGGVGLKPSAKKRRRFLIKAPEGPPRKDKNLPNVIINEKRNIHAAAHQVRVLPYPFTHHWQFERTIQTPIGSTWNTQRAFQKLTTPKVVTKPGHIINPIKAEDVGYRSSSRSDLSVIQRNPKRITTRHKKQLKKCSVD

SEQ ID NO: 8999 - protein, 719 aa, Homo sapiens
MTANRLAESLLALSQQEELADLPKDYLLSESEDEGDNDGERKHQKLLEAISSLDGKNRRKLAERSEASLKVSEFNVSSEGSGEKLVLADLLEPVKTSSSLATVKKQLSRVKSKKTVELPLNKEEIERARTPLEQEIFNLLHKNKQPVTDPLLTPVEKASLRAMSLEEAKMRRAELQRARALQSYYEAKARREKKIKSKKYHKVVKKGKAKKALKEFEQLRKVNPAAALEELEKIEKARMMERMSLKHQNSGKWAKSKAIMAKYDLEARQAMQEQLSKNKELTQKLQVASESEEEEGGTEDVEELLVPDVVNEVQMNADGPNPWMLRSCTSDTKEAATQEDPEQLPELEAHGVSESEGEERPVAEEEILLREFEERRSLRKRSELSQDAEPAGSQETKDSGSQEVLSELRVLSQKLKENHQSRKQKASSEGTIPQVQREEPAPEEEEPLLLQRPERVQTLEELEELGKEECFQNKELPRPVLEGQQSERTPNNRPDAPKEKKKKEQMIDLQNLLTTQSPSVKSLAVPTIEELEDEEERNHRQMIKEAFAGDDVIRDFLKEKREAVEASKPKDVDLTLPGWGEWGGVGLKPSAKKRRRFLIKAPEGPPRKDKNLPNVIINEKRNIHAAAHQVRVLPYPFTHHWQFERTIQTPIGSTWNTQRAFQKLTTPKVVTKPGHIINPIKAEDVGYRSSSRSDLSVIQRNPKRITTRHKKQLKKCSVD

SEQ ID NO: 9000 - protein, 886 aa, Homo sapiens
MHDAFEPVPILEKLPLQIDCLAAWEEWLLVGTKQGHLLLYRIRKDVVPADVASPESGSCNRFEVTLEKSNKNFSKKIQQIHVVSQFKILVSLLENNIYVHDLLTFQQITTVSKAKGASLFTCDLQHTETGEEVLRMCVAVKKKLQLYFWKDREFHELQGDFSVPDVPKSMAWCENSICVGFKRDYYLIRVDGKGSIKELFPTGKQLEPLVAPLADGKVAVGQDDLTVVLNEEGICTQKCALNWTDIPVAMEHQPPYIIAVLPRYVEIRTFEPRLLVQSIELQRPRFITSGGSNIIYVASNHFVWRLIPVPMATQIQQLLQDKQFELALQLAEMKDDSDSEKQQQIHHIKNLYAFNLFCQKRFDESMQVFAKLGTDPTHVMGLYPDLLPTDYRKQLQYPNPLPVLSGAELEKAHLALIDYLTQKRSQLVKKLNDSDHQSSTSPLMEGTPTIKSKKKLLQIIDTTLLKCYLHTNVALVAPLLRLENNHCHIEESEHVLKKAHKYSELIILYEKKGLHEKALQVLVDQSKKANSPLKGHERTVQYLQHLGTENLHLIFSYSVWVLRDFPEDGLKIFTEDLPEVESLPRDRVLGFLIENFKGLAIPYLEHIIHVWEETGSRFHNCLIQLYCEKVQGLMKEYLLSFPAGKTPVPAGEEEGELGEYRQKLLMFLEISSYYDPGRLICDFPFDGLLEERALLLGRMGKHEQALFIYVHILKDTRMAEEYCHKHYDRNKDGNKDVYLSLLRMYLSPPSIHCLGPIKLELLEPKANLQAALQVLELHHSKLDTTKALNLLPANTQINDIRIFLEKVLEENAQKKRFNQVLKNLLHAEFLRVQEERILHQQVKCIITEEKVCMVCKKKIGNSAFARYPNGVVVHYFCSKEVNPADT

SEQ ID NO: 9001 - protein, 875 aa, Homo sapiens
MHDAFEPVPILEKLPLQIDCLAAWEEWLLVGTKQGHLLLYRIRKDVGCNRFEVTLEKSNKNFSKKIQQIHVVSQFKILVSLLENNIYVHDLLTFQQITTVSKAKGASLFTCDLQHTETGEEVLRMCVAVKKKLQLYFWKDREFHELQGDFSVPDVPKSMAWCENSICVGFKRDYYLIRVDGKGSIKELFPTGKQLEPLVAPLADGKVAVGQDDLTVVLNEEGICTQKCALNWTDIPVAMEHQPPYIIAVLPRYVEIRTFEPRLLVQSIELQRPRFITSGGSNIIYVASNHFVWRLIPVPMATQIQQLLQDKQFELALQLAEMKDDSDSEKQQQIHHIKNLYAFNLFCQKRFDESMQVFAKLGTDPTHVMGLYPDLLPTDYRKQLQYPNPLPVLSGAELEKAHLALIDYLTQKRSQLVKKLNDSDHQSSTSPLMEGTPTIKSKKKLLQIIDTTLLKCYLHTNVALVAPLLRLENNHCHIEESEHVLKKAHKYSELIILYEKKGLHEKALQVLVDQSKKANSPLKGHERTVQYLQHLGTENLHLIFSYSVWVLRDFPEDGLKIFTEDLPEVESLPRDRVLGFLIENFKGLAIPYLEHIIHVWEETGSRFHNCLIQLYCEKVQGLMKEYLLSFPAGKTPVPAGEEEGELGEYRQKLLMFLEISSYYDPGRLICDFPFDGLLEERALLLGRMGKHEQALFIYVHILKDTRMAEEYCHKHYDRNKDGNKDVYLSLLRMYLSPPSIHCLGPIKLELLEPKANLQAALQVLELHHSKLDTTKALNLLPANTQINDIRIFLEKVLEENAQKKRFNQVLKNLLHAEFLRVQEERILHQQVKCIITEEKVCMVCKKKIGNSAFARYPNGVVVHYFCSKEVNPADT

SEQ ID NO: 9002 - protein, 943 aa, Homo sapiens
MGLTKQYLRYVASAVFGVIGSQKGNIVFVTLRGEKGRYVAVPACEHVFIWDLRKGEKILILQGLKQEVTCLCPSPDGLHLAVGYEDGSIRIFSLLSGEGNVTFNGHKAAITTLKYDQLGGRLASGSKDTDIIVWDVINESGLYRLKGHKDAITQALFLREKNLLVTSGKDTMVKWWDLDTQHCFKTMVGHRTEVWGLVLLSEEKRLITGASDSELRVWDIAYLQEIEDPEEPDPKKIKGSSPGIQDTLEAEDGAFETDEAPEDRILSCRKAGSIMREGRDRVVNLAVDKTGRILACHGTDSVLELFCILSKKEIQKKMDKKMKKARKKAKLHSSKGEEEDPEVNVEMSLQDEIQRVTNIKTSAKIKSFDLIHSPHGELKAVFLLQNNLVELYSLNPSLPTPQPVRTSRITIGGHRSDVRTLSFSSDNIAVLSAAADSIKIWNRSTLQCIRTMTCEYALCSFFVPGDRQVVIGTKTGKLQLYDLASGNLLETIDAHDGALWSMSLSPDQRGFVTGGADKSVKFWDFELVKDENSTQKRLSVKQTRTLQLDEDVLCVSYSPNQKLLAVSLLDCTVKIFYVDTLKFFLSLYGHKLPVICMDISHDGALIATGSADRNVKIWGLDFGDCHKSLFAHDDSVMYLQFVPKSHLFFTAGKDHKIKQWDADKFEHIQTLEGHHQEIWCLAVSPSGDYVVSSSHDKSLRLWERTREPLILEEEREMEREAEYEESVAKEDQPAVPGETQGDSYFTGKKTIETVKAAERIMEAIELYREETAKMKEHKAICKAAGKEVPLPSNPILMAYGSISPSAYVLEIFKGIKSSELEESLLVLPFSYVPDILKLFNEFIQLGSDVELICRCLFFLLRIHFGQITSNQMLVPVIEKLRETTISKVSQVRDVIGFNMAGLDYLKRECEAKSEVMFFADATSHLEEKKRKRKKREKLILTLT

SEQ ID NO: 9003 - protein, 477 aa, Homo sapiens
MSGVMCLKASDTWASGIRSQPQGCLGKWRSMRCKHTRMHLAHLGNSRQLISLGPPRTREDGSRISQQVEQSRSQVQAIGEKVSLAQAKIEKIKGSKKAIKVFSSAKYPAPERLQEYGSIFTDAQDPGLQRRPRHRIQSKQRPLDERALQEKLKDFPVCVSTKPEPEDDAEEGLGGLPSNISSVSSLLLFNTTENLYKKYVFLDPLAGAVTKTHVMLGAETEEKLFDAPLSISKREQLEQQVPENYFYVPDLGQVPEIDVPSYLPDLPGIANDLMYIADLGPGIAPSAPGTIPELPTFHTEVAEPLKVDLQDGVLTPPPPPPPPPPAPEVLASAPPLPPSTAAPVGQGARQDDSSSSASPSVQGAPREVVDPSGGWATLLESIRQAGGIGKAKLRSMKERKLEKQQQKEQEQVRATSQGGHLMSDLFNKLVMRRKGISGKGPGAGDGPGGAFARVSDSIPPLPPPQQPQAEDEDDWES

SEQ ID NO: 9004 - protein, 721 aa, Homo sapiens
MELGKGKLLRTGLNALHQAVHPIHGLAWTDGNQVVLTDLRLHSGEVKFGDSKVIGQFECVCGLSWAPPVADDTPVLLAVQHEKHVTVWQLCPSPMESSKWLTSQTCEIRGSLPILPQGCVWHPKCAILTVLTAQDVSIFPNVHSDDSQVKADINTQGRIHCACWTQDGLRLVVAVGSSLHSYIWDSAQKTLHRCSSCLVFDVDSHVCSITATVDSQVAIATELPLDKICGLNASETFNIPPNSKDMTPYALPVIGEVRSMDKEATDSETNSEVSVSSSYLEPLDLTHIHFNQHKSEGNSLICLRKKDYLTGTGQDSSHLVLVTFKKAVTMTRKVTIPGILVPDLIAFNLKAHVVAVASNTCNIILIYSVIPSSVPNIQQIRLENTERPKGICFLTDQLLLILVGKQKLTDTTFLPSSKSDQYAISLIVREIMLEEEPSITSGESQTTYSTFSAPLNKANRKKLIESLSPDFCHQNKGLLLTVNTSSQNGRPGRTLIKEIQSPLSSICDGSIALDAEPVTQPASLPRHSSTPDHTSTLEPPRLPQRKNLQSEKETYQLSKEVEILSRNLVEMQRCLSELTNRLHNGKKSSSVYPLSQDLPYVHIIYQKPYYLGPVVEKRAVLLCDGKLRLSTVQQTFGLSLIEMLHDSHWILLSADSEGFIPLTFTATQEIIIRDGSLSRSDVFRDSFSHSPGAVSSLKVFTGLAAPSLDTTGCCNHVDGMA

SEQ ID NO: 9005 - protein, 622 aa, Homo sapiens
MELGKGKLLRTGLNALHQAVHPIHGLAWTDGNQVVLTDLRLHSGEVKFGDSKVIGQFECVCGLSWAPPVADDTPVLLAVQHEKHVTVWQLCPSPMESSKWLTSQTCEIRGSLPILPQGCVWHPKCAILTVLTAQDVSIFPNVHSDDSQVKADINTQGRIHCACWTQDGLRLVVAVGSSLHSYIWDSAQKTLHRCSSCLVFDVDSHVCSITATVDSQVAIATELPLDKICGLNASETFNIPPNSKDMTPYALPVIGEVRSMDKEATDSETNSEVSVSSSYLEPLDLTHIHFNQHKSEGNSLICLRKKDYLTGTGQDSSHLVLVTFKKAVTMTRKVTIPGILVPDLIAFNLKAHVVAVASNTCNIILIYSVIPSSVPNIQQIRLENTERPKGICFLTDQLLLILVGKQKLTDTTFLPSSKSDQYAISLIVREIMLEEEPSITSGESQTTYSTFSAPLNKANRKKLIESLSPDFCHQNKGLLLTVNTSSQNGRPGRTLIKEIQSPLSSICDGSIALDAEPVTQPASLPRHSSTPDHTSTLEPPRLPQRKNLQSEKETYQLSKEVEILSRNLVEMQRCLSELTNRLHNGKKSSSVYPLSQDLPYVHIIYQIPTGFFSLLTVRALSR

SEQ ID NO: 9006 - protein, 234 aa, Homo sapiens
MGRPGRTLIKEIQSPLSSICDGSIALDAEPVTQPASLPRHSSTPDHTSTLEPPRLPQRKNLQSEKETYQLSKEVEILSRNLVEMQRCLSELTNRLHNGKKSSSVYPLSQDLPYVHIIYQKPYYLGPVVEKRAVLLCDGKLRLSTVQQTFGLSLIEMLHDSHWILLSADSEGFIPLTFTATQEIIIRDGSLSRSDVFRDSFSHSPGAVSSLKVFTGLAAPSLDTTGCCNHVDGMA

SEQ ID NO: 9007 - protein, 123 aa, Homo sapiens
MPLPGTPGPVTTSPQTPTPRPLTTDWRILSGKGSGGSARAVSKLRSSSSGNSLLRIRDLGVRKSQEEAAPPSPRPQSRAHAQTTNPYWADTNTRPGAHPPEHGGVAALPAQVVGQCHQEATED

SEQ ID NO: 9008 - protein, 187 aa, Homo sapiens
MRAVSANYSTGSPAVKSRIELDRIQTIMESMGSKLSPGAQQLINMVRFQQWNCIPIEEQLQLVLGNAGYKQMTGLQCSSALGALDKLSSTPFPFRTGLTSGNVTENLQAYIDKSTQASSGENSTKLDECKIVPQNHSLLENDLKNATSPFLPKKANDNSNIPNSELLPFLQNLCSQVNYLLVGRKAE

SEQ ID NO: 9009 - protein, 452 aa, Homo sapiens
MTAVSSNRNPEDDGCLLEQEPRGRRLSPRTGTPRTTAVSSNRDPKNDGCLLKQEPRGRRLSPRTGAPGTTAVSSNRNPEDDGCLLKQEPRGRRLSPQTGTPRTTAVSSNRNPGDDGCLLKQGPRGRRLSPQTGTPGTTAVSSNRNPEDDGCLLKQEPRGRRLSPQTGTPGTTAVSSNRDHEDDGCLLKQESRGRRLSPQTGTPGTTAVSSNRNPEDDGCLLKQESRGRRLSPQTGTPGTTAVSSNRDPEDDGCLLKQGPRGRRLSPQTGTPRTTAVSSNRNPEDDGCLLKQGPRGRRLSPQTGIPRTTAVSSNRDPGEDGCLLKQESRGRRLSPQTGTTRTTAVSSKRNPEDDGCLLKQEPRGRRLSSLTGAPGTTAVSSNRDPRTTAVSSNRNPGDDGCLLKQGPRGRRLSPQTGTPGTTAVSSNRDPEDDGCLLKQEPQELRKPEADTAL

SEQ ID NO: 9010 - protein, 316 aa, Homo sapiens
MASADELTFHEFEEATNLLADTPDAATTSRSDQLTPQGHVAVAVGSGGSYGAEDEVEEESDKAALLQEQQQQQQPGFWTFSYYQSFFDVDTSQVLDRIKGSLLPRPGHNFVRHHLRNRPDLYGPFWICATLAFVLAVTGNLTLVLAQRRDPSIHYSPQFHKVTVAGISIYCYAWLVPLALWGFLRWRKGVQERMGPYTFLETVCIYGYSLFVFIPMVVLWLIPVPWLQWLFGALALGLSAAGLVFTLWPVVREDTRLVATVLLSVVVLLHALLAMGCKLYFFQSLPPENVAPPPQITSLPSNIALSPTLPQSLAPS

SEQ ID NO: 9011 - protein, 67 aa, Homo sapiens
MNNHRANDKFFLYVCMYVCIREKILLYKTHWMTPIFLKVVINTRRIKHHFKIHVPSQFFILITITKY

SEQ ID NO: 9012 - protein, 503 aa, Homo sapiens
MEKGGNIQLEIPDFSNSVLSHLNQLRMQGRLCDIVVNVQGQAFRAHKVVLAASSPYFRDHMSLNEMSTVSISVIKNPTVFEQLLSFCYTGRICLQLADIISYLTAASFLQMQHIIDKCTQILEGIHFKINVAEVEAELSQTRTKHQERPPESHRVTPNLNRSLSPRHNTPKGNRRGQVSAVLDIRELSPPEESTSPQIIEPSSDVESREPILRINRAGQWYVETGVADRGGRSDDEVRVLGAVHIKTENLEEWLGPENQPSGEDGSSAEEVTAMVIDTTGHGSVGQENYTLGSSGAKVARPTSSEVDRFSPSGSVVPLTERHRARSESPGRMDEPKQPSSQVEESAMMGVSGYVEYLREQEVSERWFRYNPRLTCIYCAKSFNQKGSLDRHMRLHMGITPFVCRMCGKKYTRKDQLEYHIRKHTGNKPFHCHVCGKSFPFQAILNQHFRKNHPGCIPLEGPHSISPETTVTSRGQAEEESPSQEETVAPGEAVQGSVSTTGPD

SEQ ID NO: 9013 - protein, 361 aa, Homo sapiens
MEKGGNIQLEIPDFSNSVLSHLNQLRMQGRLCDIVVNVQGQAFRAHKVVLAASSPYFRDHMSLNEMSTVSISVIKNPTVFEQLLSFCYTGRICLQLADIISYLTAASFLQMQHIIDKCTQILEGIHFKINVAEVEAELSQTRTKHQERPPESHRVTPNLNRSLSPRHNTPKGNRRGQVSAVLDIRELSPPEESTSPQIIEPSSDVESREPILRINRAGQWYVETGVADRGGRSDDEVRVLGAVHIKTENLEEWLGPENQPSGEDGSSAEEVTAMVIDTTGHGSVGQENYTLGSSGAKVARPTSSEVDRFSPSGSVVPLTERHRARSESPGRMDEPKQPSSQVWSCGFRTALVVGGIATVYE

SEQ ID NO: 9014 - protein, 308 aa, Homo sapiens
MEKGGNIQLEIPDFSNSVLSHLNQLRMQGRLCDIVVNVQGQAFRAHKVVLAASSPYFRDHMSLNEMSTVSISVIKNPTVFEQLLSFCYTGRICLQLADIISYLTAASFLQMQHIIDKCTQILEGIHFKINVAEVEAELSQTRTKHQERPPESHRVTPNLNRSLSPRHNTPKGNRRGQVSAVLDIRELSPPEESTSPQIIEPSSDVESREPILRINRAGQWYVETGVADRGGRSDDEVRVLGAVHIKTENLEEWLGPENQPSGEDGSSAEEVTAMVIDTTGHGSVGQENYTLGSSGAKVARPTSSEVDR

SEQ ID NO: 9015 - protein, 561 aa, Homo sapiens
MITSQGSVSFRDVTVGFTQEEWQHLDPAQRTLYRDVMLENYSHLVSVGYCIPKPEVILKLEKGEEPWILEEKFPSQSHLELINTSRNYSIMKFNEFNKGGKCFCDEKHEIIHSEEEPSEYNKNGNSFWLNEDLIWHQKIKNWEQSFEYNECGKAFPENSLFLVHKRGYTGQKTCKYTEHGKTCDMSFFITHQQTHPRENHYGNECGENIFEESILLEHQSVYPFSQKLNLTPIQRTHSINNIIEYNECGTFFSEKLVLHLQQRTHTGEKPYECHECGKTFTQKSAHTRHQRTHTGGKPYECHECGKTFYKNSDLIKHQRIHTGERPYGCHECGKSFSEKSTLTQHQRTHTGEKPYECHECGKTFSFKSVLTVHQKTHTGEKPYECYACGKAFLRKSDLIKHQRIHTGEKPYECNECGKSFSEKSTLTKHLRTHTGEKPYECIQCGKFFCYYSGFTEHLRRHTGEKPFGCNECGKTFRQKSALIVHQRTHIRQKPYGCNQCGKSFCVKSKLIAHHRTHTGEKPYECNVCGKSFYVKSKLTVHQRIHLGRNPINVVNEGNYSG

SEQ ID NO: 9016 - protein, 276 aa, Homo sapiens
MAPPPAPLLAPRPGETRPGCRKPGTVSFADVAVYFSPEEWGCLRPAQRALYRDVMQETYGHLGALGFPGPKPALISWMEQESEAWSPAAQDPEKGERLGGARRGDVPNRKEEEPEEVPRAKGPRKAPVKESPEVLVERNPDPAISVAPARAQPPKNAAWDPTTGAQPPAPIPSMDAQAGQRRHVCTDCGRRFTYPSLLVSHRRMHSGERPFPCPECGMRFKRKFAVEAHQWIHRSCSGGRRGRRPGIRAVPRAPVRGDRDPPVLFRHYPDIFEECG

SEQ ID NO: 9017 - protein, 262 aa, Homo sapiens
MPRSPLRSSLSTEASGPRGPFKCPASPRPITAQLLPGSSPIIGRCVLRVQRGFPGPKPALISWMEQESEAWSPAAQDPEKGERLGGARRGDVPNRKEEEPEEVPRAKGPRKAPVKESPEVLVERNPDPAISVAPARAQPPKNAAWDPTTGAQPPAPIPSMDAQAGQRRHVCTDCGRRFTYPSLLVSHRRMHSGERPFPCPECGMRFKRKFAVEAHQWIHRSCSGGRRGRRPGIRAVPRAPVRGDRDPPVLFRHYPDIFEECG

SEQ ID NO: 9018 - protein, 300 aa, Homo sapiens
MHSLKKVTFEDVAIDFTQEEWAMMDTSKRKLYRDVMLENISHLVSLGYQISKSYIILQLEQGKELWQEGREFLQDQNPDRESALKKTHMISMHPIIRKDAPTSMTMENSLILEDPFECNDSGEDCTHSSTIIQCLLTHSGKKPYVSKQCGKSLSNLLSPKPHKQIHTKGKSYQCNLCEKAYTNCFHLRRPKMTHTGERPYTCHLCRKAFTQCSHLRRHEKTHTGERPYKCHQCGKAFIQSFNLRRHERTHLGEKWYECDNSGKAFSQSSGFRGNKIIHTGEKPHACLLCGKAFSLSSDLR

SEQ ID NO: 9019 - protein, 1346 aa, Homo sapiens
MDQYSLGDEGALPSEMHLPSFSESQGLNCSDTLNRDLGPNTRGFLYAGLSGLDPDPSLPTPDMSSEVLEDNLDTLSLYSGKDSDSVKLLEEYADSESQASLQDLGLGVLKAKEADEGGRATSGSARKGKRQHSSPQNPLLDCSLCGKVFSSASSLSKHYLTHSQERKHVCKICSKAFKRQDHLTGHMLTHQKTKPFVCIEQGCSKSYCDYRSLRRHYEVHHGLCILKEAPPEEEACGDSPHAHESAGQPPPSSLRSLVPPEARSPGSLLPHRDLLRRIVSSIVHQKTPSPGPAPAGASDSEGRNTACPCPASSGSSSCTPAGPHAAPAALDTELPEEPCLPQKEPATDVFTAPNSRAAENGAPDPPEPEPDTALLQARSTAECWPEGGSVPACLPLFRGQTVPASSQPSSHSFQWLRNLPGCPKSKGNNVFVVHKPSAVPSREGSESGPGPSSGSPSEESPPGPGGGLEDALPFPAALLRVPAEAPSDPRSASGEDDPCAPKKVKVDCDSFLCQNPGEPGLQEAQKAGGLPADASPLFRQLFLKSQEPLVSHEQMQVFQMITKSQRIFSHAQVAAVSSQLPAPEGKPAALRPLQGPWPQQPPPLAPAVDSLHAGPGNPEAEGSPARRRKTTPGVPREASPGSTRRDAKGGLKVAAVPTPLAAPSLDPSRNPDISSLAKQLRSSKGTLDLEDIFPSTGQRQTQLGGEEPPGASLPGKQAPAENGAASRITKGEKGPACSRGGGYRLLGNPRAPRFSGFRKEKAKMDMCCAASPSQVAMASFSSAGPPADPSKSKLTIFSRIQGGNIYRLPHPVKEENVAGRGNQQNGSPTDWTKPRSTFVCKNCSQMFYTEKGLSSHMCFHSDQWPSPRGKQEPQVFGTEFCKPLRQVLRPEGDRHSPPGTKKPLDPTAAAPLVVPQSIPVVPVTRHIGSMAMGQEKDGEERDSKESSQQRKRKKRPPPSTAGEPGPAGCHQSRLRSPMFLVDCLLKGLFQCSPYTPPPMLSPIREGSGVYFNTLCSTSTQASPDQLISSMLDQVDGSFGICVVKDDTKISIEPHINIGSRFQAEIPELQERSLAGTDEHVASLVWKPWGDMMISSETQDRVTELCNVACSSVMPGGGTNLELALHCLHEAQGNVQVALETLLLRGPHKPRTHLLADYRYTGSDVWTPIEKRLFKKAFYAHKKDFYLIHKMIQTKTVAQCVEYYYIWKKMIKFDCGRAPGLEKRVKREPEEVERTEEKVPCSPRERPSHHPTPKLKTKSYRRESILSSSPNAGSKRTPELLGSAESQGIFPCRECERVFDKIKSRNAHMKRHRLQDHVEPIIRVKWPVKPFQLKEEELGADIGPLQW

SEQ ID NO: 9020 - protein, 1088 aa, Homo sapiens
MDQYSLGDEGALPSEMHLPSFSESQGLNCSDTLNRDLGPNTRGFLYAGLSGLDPDPSLPTPDMSSEVLEDNLDTLSLYSGKDSDSVKLLEEYADSESQASLQDLGLGVLKAKEADEGGRATSGSARKGKRQHSSPQNPLLDCSLCGKVFSSASSLSKHYLTHSQERKHVCKICSKAFKRQDHLTGHMLTHQKTKPFVCIEQGCSKSYCDYRSLRRHYEVHHGLCILKEAPPEEEACGDSPHAHESAGQPPPSSLRSLVPPEARSPGSLLPHRDLLRRIVSSIVHQKTPSPGPAPAGASDSEGRNTACPCPASSGSSSCTPAGPHAAPAALDTELPEEPCLPQKEPATDVFTAPNSRAAENGAPDPPEPEPDTALLQARSTAECWPEGGSVPACLPLFRGQTVPASSQPSSHSFQWLRNLPGCPKSKGNNVFVVHKPSAVPSREGSESGPGPSSGSPSEESPPGPGGGLEDALPFPAALLRVPAEAPSDPRSASGEDDPCAPKKVKVDCDSFLCQNPGEPGLQEAQKAGGLPADASPLFRQLFLKSQEPLVSHEQMQVFQMITKSQRIFSHAQVAAVSSQLPAPEGKPAALRPLQGPWPQQPPPLAPAVDSLHAGPGNPEAEGSPARRRKTTPGVPREASPGSTRRDAKGGLKVAAVPTPLAAPSLDPSRNPDISSLAKQLRSSKGTLDLEDIFPSTGQRQTQLGGEEPPGASLPGKQAPAENGAASRITKGEKGPACSRGGGYRLLGNPRAPRFSGFRKEKAKMDMCCAASPSQVAMASFSSAGPPADPSKSKLTIFSRIQGGNIYRLPHPVKEENVAGRGNQQNGSPTDWTKPRSTFVCKNCSQMFYTEKGLSSHMCFHSDQWPSPRGKQEPQVFGTEFCKPLRQVLRPEGDRHSPPGTKKPLDPTAAAPLVVPQSIPVVPVTRHIGSMAMIQTKTVAQCVEYYYIWKKMIKFDCGRAPGLEKRVKREPEEVERTEEKVPCSPRERPSHHPTPKLKTKSYRRESILSSSPNAGSKRTPELLGSAESQGIFPCRECERVFDKIKSRNAHMKRHRLQDHVEPIIRVKWPVKPFQLKEEELGADIGPLQW

SEQ ID NO: 9021 - protein, 566 aa, Homo sapiens
MPCCSHRRCREDPGTSESQEMDPVAFDDVAVNFTQEEWALLDISQRKLYKEVMLETFRNLTSVGKSWKDQNIEYEYQNPRRNFRSLIEKKVNEIKDDSHCGETFTQVPDDRLNFQEKKASPEIKSCDSFVCGEVGLGNSSFNMNIRGDIGHKAYEYQEYGPKPCKCQQPKKAFRYHPSFRTPQRDHTGEKPYACKECGKTFISHSSIQRHVVMHSGDGPYKCKFCGKAFHCLSLYLIHERIHTGEKPYECKQCGKSFSYSATLRIHERTHTGEKPYECQQCGKAFHSPRCYRRHERIHTGEKAYQCKECGKAFTCPQYVRIHERTHSRKKPYECTQCGKALSSLTSFQTHIRMHSGERPYECKICGKGFCSANSFQRHEKTHSGEKPYKCKQCGKAFIHSSSLRYHERIHTGEKPYECKQCGKAFRSSSHLQLHGRTHTGEKPYECQECGKAFRSMKNLQSHERTQTHVRIHSGERPYKCKLCGKGFYCPKSLQRHEKTHTGEKLYECKQCGEAFSSSSSFRYHERTHTGEKPYKCKQCGKAFRAASVLRMHGRTHPEDKPYECKQ

SEQ ID NO: 9022 - protein, 149 aa, Homo sapiens
MPCCSHRRCREDPGTSESQEMEEWALLDISQRKLYKEVMLETFRNLTSVGKSWKDQNIEYEYQNPRRNFRSLIEKKVNEIKDDSHCGETFTQVPDDRLNFQEKKASPEIKSCDSFVCGEVGLGNSSFNMNIRGDIGHKAYEYQEYGPKP

SEQ ID NO: 9023 - protein, 686 aa, Homo sapiens
MTESQGTVTFKDVAIDFTQEEWKRLDPAQRKLYRNVMLENYNNLITVGYPFTKPDVIFKLEQEEEPWVMEEEVLRRHWQGEIWGVDEHQKNQDRLLRQVEVKFQKTLTEEKGNECQKKFANVFPLNSDFFPSRHNLYEYDLFGKCLEHNFDCHNNVKCLMRKEHCEYNEPVKSYGNSSSHFVITPFKCNHCGKGFNQTLDLIRHLRIHTGEKPYECSNCRKAFSHKEKLIKHYKIHSREQSYKCNECGKAFIKMSNLIRHQRIHTGEKPYACKECEKSFSQKSNLIDHEKIHTGEKPYECNECGKAFSQKQSLIAHQKVHTGEKPYACNECGKAFPRIASLALHMRSHTGEKPYKCDKCGKAFSQFSMLIIHVRIHTGEKPYECNECGKAFSQSSALTVHMRSHTGEKPYECKECRKAFSHKKNFITHQKIHTREKPYECNECGKAFIQMSNLVRHQRIHTGEKPYICKECGKAFSQKSNLIAHEKIHSGEKPYECNECGKAFSQKQNFITHQKVHTGEKPYDCNECGKAFSQIASLTLHLRSHTGEKPYECDKCGKAFSQCSLLNLHMRSHTGEKPYVCNECGKAFSQRTSLIVHMRGHTGEKPYECNKCGKAFSQSSSLTIHIRGHTGEKPFDCSKCGKAFSQISSLTLHMRKHTGEKPYHCIECGKAFSQKSHLVRHQRIHTH

SEQ ID NO: 9024 - protein, 527 aa, Homo sapiens
MRKEHCEYNEPVKSYGNSSSHFVITPFKCNHCGKGFNQTLDLIRHLRIHTGEKPYECSNCRKAFSHKEKLIKHYKIHSREQSYKCNECGKAFIKMSNLIRHQRIHTGEKPYACKECEKSFSQKSNLIDHEKIHTGEKPYECNECGKAFSQKQSLIAHQKVHTGEKPYACNECGKAFPRIASLALHMRSHTGEKPYKCDKCGKAFSQFSMLIIHVRIHTGEKPYECNECGKAFSQSSALTVHMRSHTGEKPYECKECRKAFSHKKNFITHQKIHTREKPYECNECGKAFIQMSNLVRHQRIHTGEKPYICKECGKAFSQKSNLIAHEKIHSGEKPYECNECGKAFSQKQNFITHQKVHTGEKPYDCNECGKAFSQIASLTLHLRSHTGEKPYECDKCGKAFSQCSLLNLHMRSHTGEKPYVCNECGKAFSQRTSLIVHMRGHTGEKPYECNKCGKAFSQSSSLTIHIRGHTGEKPFDCSKCGKAFSQISSLTLHMRKHTGEKPYHCIECGKAFSQKSHLVRHQRIHTH

SEQ ID NO: 9025 - protein, 1833 aa, Homo sapiens
MREKEQEREEQLMEDKKRKKEDKKKKEATQKVTEQKTKVPEVTKPSLSQPTAASPIGSSPSPPVNGGNNAKRVAVPNGQPPSAARYMPREVPPRFRCQQDHKVLLKRGQPPPPSCMLLGGGAGPPPCTAPGANPNNAQVTGALLQSESGTAPDSTLGGAAASNYANSTWGSGASSNNGTSPNPIHIWDKVIVDGSDMEEWPCIASKDTESSSENTTDNNSASNPGSEKSTLPGSTTSNKGKGSQCQSASSGNECNLGVWKSDPKAKSVQSSNSTTENNNGLGNWRNVSGQDRIGPGSGFSNFNPNSNPSAWPALVQEGTSRKGALETDNSNSSAQVSTVGQTSREQQSKMENAGVNFVVSGREQAQIHNTDGPKNGNTNSLNLSSPNPMENKGMPFGMGLGNTSRSTDAPSQSTGDRKTGSVGSWGAARGPSGTDTVSGQSNSGNNGNNGKEREDSWKGASVQKSTGSKNDSWDNNNRSTGGSWNFGPQDSNDNKWGEGNKMTSGVSQGEWKQPTGSDELKIGEWSGPNQPNSSTGAWDNQKGHPLPENQGNAQAPCWGRSSSSTGSEVGGQSTGSNHKAGSSDSHNSGRRSYRPTHPDCQAVLQTLLSRTDLDPRVLSNTGWGQTQIKQDTVWDIEEVPRPEGKSDKGTEGWESAATQTKNSGGWGDAPSQSNQMKSGWGELSASTEWKDPKNTGGWNDYKNNNSSNWGGGRPDEKTPSSWNENPSKDQGWGGGRQPNQGWSSGKNGWGEEVDQTKNSNWESSASKPVSGWGEGGQNEIGTWGNGGNASLASKGGWEDCKRSPAWNETGRQPNSWNKQHQQQQPPQQPPPPQPEASGSWGGPPPPPPGNVRPSNSSWSSGPQPATPKDEEPSGWEEPSPQSISRKMDIDDGTSAWGDPNSYNYKNVNLWDKNSQGGPAPREPNLPTPMTSKSASVWSKSTPPAPDNGTSAWGEPNESSPGWGEMDDTGASTTGWGNTPANAPNAMKPNSKSMQDGWGESDGPVTGARHPSWEEEEDGGVWNTTGSQGSASSHNSASWGQGGKKQMKCSLKGGNNDSWMNPLAKQFSNMGLLSQTEDNPSSKMDLSVGSLSDKKFDVDKRAMNLGDFNDIMRKDRSGFRPPNSKDMGTTDSGPYFEKLTLPFSNQDGCLGDEAPCSPFSPSPSYKLSPSGSTLPNVSLGAIGTGLNPQNFAARQGGSHGLFGNSTAQSRGLHTPVQPLNSSPSLRAQVPPQFISPQVSASMLKQFPNSGLSPGLFNVGPQLSPQQIAMLSQLPQIPQFQLACQLLLQQQQQQQLLQNQRKISQAVRQQQEQQLARMVSALQQQQQQQQRQPGMKHSPSHPVGPKPHLDNMVPNALNVGLPDLQTKGPIPGYGSGFSSGGMDYGMVGGKEAGTESRFKQWTSMMEGLPSVATQEANMHKNGAIVAPGKTRGGSPYNQFDIIPGDTLGGHTGPAGDSWLPAKSPPTNKIGSKSSNASWPPEFQPGVPWKGIQNIDPESDPYVTPGSVLGGTATSPIVDTDHQLLRDNTTGSNSSLNTSLPSPGAWPYSASDNSFTNVHSTSAKFPDYKSTWSPDPIGHNPTHLSNKMWKNHISSRNTTPLPRPPPGLTNPKPSSPWSSTAPRSVRGWGTQDSRLASASTWSDGGSVRPSYWLVLHNLTPQIDGSTLRTICMQHGPLLTFHLNLTQGTALIRYSTKQEAAKAQTALHMCVLGNTTILAEFATDDEVSRFLAQAQPPTPAATPSAPAAGWQSLETGQNQSDPVGPALNLFGGSTGLGQWSSSAGGSSGADLAGASLWGPPNYSSSLWGVPTVEDPHRMGSPAPLLPGDLLGGGSDSI

SEQ ID NO: 9026 - protein, 1723 aa, Homo sapiens
MREKEQEREEQLMEDKKRKKEDKKKKEATQKVTEQKTKVPEVTKPSLSQPTAASPIGSSPSPPVNGGNNAKRVAVPNGQPPSAARYMPREVPPRFRCQQDHKVLLKRGQPPPPSCMLLGGGAGPPPCTAPGANPNNAQVTGALLQSESGTAPDSTLGGAAASNYANSTWGSGASSNNGTSPNPIHIWDKVIVDGSDMEEWPCIASKDTESSSENTTDNNSASNPGSEKSTLPGSTTSNKGKGSQCQSASSGNECNLGVWKSDPKAKSVQSSNSTTENNNGLGNWRNVSGQDRIGPGSGFSNFNPNSNPSAWPALVQEGTSRKGALETDNSNSSAQVSTVGQTSREQQSKMENAGVNFVVSGREQAQIHNTDGPKNGNTNSLNLSSPNPMENKGMPFGMGLGNTSRSTDAPSQSTGDRKTGSVGSWGAARGPSGTDTVSGQSNSGNNGNNGKEREDSWKGASVQKSTGSKNDSWDNNNRSTGGSWNFGPQDSNDNKWGEGNKMTSGVSQGEWKQPTGSDELKIGEWSGPNQPNSSTGAWDNQKGHPLPENQGNAQAPCWGRSSSSTGSEVGGQSTGSNHKAGSSDSHNSGRRSYRPTHPDCQAVLQTLLSRTDLDPRVLSNTGWGQTQIKQDTVWDIEEVPRPEGKSDKGTEGWESAATQTKNSGGWGDAPSQSNQMKSGWGELSASTEWKDPKNTGGWNDYKNNNSSNWGGGRPDEKTPSSWNENPSKDQGWGGGRQPNQGWSSGKNGWGEEVDQTKNSNWESSASKPVSGWGEGGQNEIGTWGNGGNASLASKGGWEDCKRSPAWNETGRQPNSWNKQHQQQQPPQQPPPPQPEASGSWGGPPPPPPGNVRPSNSSWSSGPQPATPKDEEPSGWEEPSPQSISRKMDIDDGTSAWGDPNSYNYKNVNLWDKNSQGGPAPREPNLPTPMTSKSASDSKSMQDGWGESDGPVTGARHPSWEEEEDGGVWNTTGSQGSASSHNSASWGQGGKKQMKCSLKGGNNDSWMNPLAKQFSNMGLLSQTEDNPSSKMDLSVGSLSDKKFDVDKRAMNLGDFNDIMRKDRSGFRPPNSKDMGTTDSGPYFEKGGSHGLFGNSTAQSRGLHTPVQPLNSSPSLRAQVPPQFISPQVSASMLKQFPNSGLSPGLFNVGPQLSPQQIAMLSQLPQIPQFQLACQLLLQQQQQQQLLQNQRKISQAVRQQQEQQLARMVSALQQQQQQQQRQPGMKHSPSHPVGPKPHLDNMVPNALNVGLPDLQTKGPIPGYGSGFSSGGMDYGMVGGKEAGTESRFKQWTSMMEGLPSVATQEANMHKNGAIVAPGKTRGGSPYNQFDIIPGDTLGGHTGPAGDSWLPAKSPPTNKIGSKSSNASWPPEFQPGVPWKGIQNIDPESDPYVTPGSVLGGTATSPIVDTDHQLLRDNTTGSNSSLNTSLPSPGAWPYSASDNSFTNVHSTSAKFPDYKSTWSPDPIGHNPTHLSNKMWKNHISSRNTTPLPRPPPGLTNPKPSSPWSSTAPRSVRGWGTQDSRLASASTWSDGGSVRPSYWLVLHNLTPQIDGSTLRTICMQHGPLLTFHLNLTQGTALIRYSTKQEAAKAQTALHMCVLGNTTILAEFATDDEVSRFLAQAQPPTPAATPSAPAAGWQSLETGQNQSDPVGPALNLFGGSTGLGQWSSSAGGSSGADLAGASLWGPPNYSSSLWGVPTVEDPHRMGSPAPLLPGDLLGGGSDSI

SEQ ID NO: 9027 - protein, 1029 aa, Homo sapiens
MQTNEGEVSEESSSKVEQEDFVMEGHGKTPPPGEESKQEKEQEREEQLMEDKKRKKEDKKKKEATQKVTEQKTKVPEVTKPSLSQPTAASPIGSSPSPPVNGGNNAKRVAVPNGQPPSAARYMPREVPPRFRCQQDHKVLLKRGQPPPPSCMLLGGGAGPPPCTAPGANPNNAQVTGALLQSESGTAPVWSKSTPPAPDNGTSAWGEPNESSPGWGEMDDTGASTTGWGNTPANAPNAMKPNSKSMQDGWGESDGPVTGARHPSWEEEEDGGVWNTTGSQGSASSHNSASWGQGGKKQMKCSLKGGNNDSWMNPLAKQFSNMGLLSQTEDNPSSKMDLSVGSLSDKKFDVDKRAMNLGDFNDIMRKDRSGFRPPNSKDMGTTDSGPYFEKGGSHGLFGNSTAQSRGLHTPVQPLNSSPSLRAQVPPQFISPQVSASMLKQFPNSGLSPGLFNVGPQLSPQQIAMLSQLPQIPQFQLACQLLLQQQQQQQLLQNQRKISQAVRQQQEQQLARMVSALQQQQQQQQRQPGMKHSPSHPVGPKPHLDNMVPNALNVGLPDLQTKGPIPGYGSGFSSGGMDYGMVGGKEAGTESRFKQWTSMMEGLPSVATQEANMHKNGAIVAPGKTRGGSPYNQFDIIPGDTLGGHTGPAGDSWLPAKSPPTNKIGSKSSNASWPPEFQPGVPWKGIQNIDPESDPYVTPGSVLGGTATSPIVDTDHQLLRDNTTGSNSSLNTSLPSPGAWPYSASDNSFTNVHSTSAKFPDYKSTWSPDPIGHNPTHLSNKMWKNHISSRNTTPLPRPPPGLTNPKPSSPWSSTAPRSVRGWGTQDSRLASASTWSDGGSVRPSYWLVLHNLTPQIDGSTLRTICMQHGPLLTFHLNLTQGTALIRYSTKQEAAKAQTALHMCVLGNTTILAEFATDDEVSRFLAQAQPPTPAATPSAPAAGWQSLETGQNQSDPVGPALNLFGGSTGLGQWSSSAGGSSGADLAGASLWGPPNYSSSLWGVPTVEDPHRMGSPAPLLPGDLLGGGSDSI

SEQ ID NO: 9028 - protein, 178 aa, Homo sapiens
MCTSGQIIGSLLVLSVLEIGLGVSSVAVGAVSFSLALREHKPQLGDSSPVWSGVCFLLCGICGILCAKKKSGLVMILFSACCICGLIGGILNFQFLRAVTKKTSSLYPLHLASMSLACIGIGGCTLSSWLTCRLASYEQRRMFSEREHSLHHSHEMAEKEITDNMSNGGPQLIFNGRV

SEQ ID NO: 9029 - protein, 104 aa, Homo sapiens
MILFSACCICGLIGGILNFQFLRAVTKKTSSLYPLHLASMSLACIGIGGCTLSSWLTCRLASYEQRRMFSEREHSLHHSHEMAEKEITDNMSNGGPQLIFNGRV

SEQ ID NO: 9030 - protein, 89 aa, Homo sapiens
MILFSACCICGLIGGILNFQFLRAVTKKTSSLYPLHLASMSLACIGIGGCTLSSWLTCRLASYEQRRMFSEREHSLHHSHEMAEKIEGY

SEQ ID NO: 9031 - protein, 172 aa, Homo sapiens
MCTSGQIIGSLLVLSVLEIGLGVSSVAVGAVSFSLALREHKPQLGDSSPFLLCGICGILCAKKKSGLVMILFSACCICGLIGGILNFQFLRAVTKKTSSLYPLHLASMSLACIGIGGCTLSSWLTCRLASYEQRRMFSEREHSLHHSHEMAEKEITDNMSNGGPQLIFNGRV

SEQ ID NO: 9032 - protein, 923 aa, Homo sapiens
MEGAKPTLQLVYQAVQALYHDPDPSGKERASFWLGELQRSVHAWEISDQLLQIRQDVESCYFAAQTMKMKIQTSFYELPTDSHASLRDSLLTHIQNLKDLSPVIVTQLALAIADLALQMPSWKGCVQTLVEKYSNDVTSLPFLLEILTVLPEEVHSRSLRIGANRRTEIIEDLAFYSSTVVSLLMTCVEKAGTDEKMLMKVFRCLGSWFNLGVLDSNFMANNKLLALLFEVLQQDKTSSNLHEAASDCVCSALYAIENVETNLPLAMQLFQGVLTLETAYHMAVAREDLDKVLNYCRIFTELCETFLEKIVCTPGQGLGDLRTLELLLICAGHPQYEVVEISFNFWYRLGEHLYKTNDEVIHGIFKAYIQRLLHALARHCQLEPDHEGVPEETDDFGEFRMRVSDLVKDLIFLIGSMECFAQLYSTLKEGNPPWEVTEAVLFIMAAIAKSVDPENNPTLVEVLEGVVRLPETVHTAVRYTSIELVGEMSEVVDRNPQFLDPVLGYLMKGLCEKPLASAAAKAIHNICSVCRDHMAQHFNGLLEIARSLDSFLLSPEAAVGLLKGTALVLARLPLDKITECLSELCSVQVMALKKLLSQEPSNGISSDPTVFLDRLAVIFRHTNPIVENGQTHPCQKVIQEIWPVLSETLNKHRADNRIVERCCRCLRFAVRCVGKGSAALLQPLVTQMVNVYHVHQHSCFLYLGSILVDEYGMEEGCRQGLLDMLQALCIPTFQLLEQQNGLQNHPDTVDDLFRLATRFIQRSPVTLLRSQVVIPILQWAIASTTLDHRDANCSVMRFLRDLIHTGVANDHEEDFELRKELIGQVMNQLGQQLVSQLLHTCCFCLPPYTLPDVAEVLWEIMQVDRPTFCRWLENSLKGLPKETTVGAVTVTHKQLTDFHKQVTSAEECKQVCWALRDFTRLFR

SEQ ID NO: 9033 - protein, 957 aa, Homo sapiens
MEGAKPTLQLVYQAVQALYHDPDPSGKERASFWLGELQRSVHAWEISDQLLQIRQDVESCYFAAQTMKMKIQTSFYELPTDSHASLRDSLLTHIQNLKDLSPVIVTQLALAIADLALQMPSWKGCVQTLVEKYSNDVTSLPFLLEILTVLPEEVHSRSLRIGANRRTEIIEDLAFYSSTVVSLLMTCVEKAGTDEKMLMKVFRCLGSWFNLGVLDSNFMANNKLLALLFEVLQQDKTSSNLHEAASDCVCSALYAIENVETNLPLAMQLFQGVLTLETAYHMAVAREDLDKVLNYCRIFTELCETFLEKIVCTPGQGLGDLRTLELLLICAGHPQYEVVEISFNFWYRLGEHLYKTNDEVIHGIFKAYIQRLLHALARHCQLEPDHEGVPEETDDFGEFRMRVSDLVKDLIFLIGSMECFAQLYSTLKEGNPPWEVTEAVLFIMAAIAKSVDPKKPFSNAACHHSLLFGQNITSEISNCEYLPPVLRENNPTLVEVLEGVVRLPETVHTAVRYTSIELVGEMSEVVDRNPQFLDPVLGYLMKGLCEKPLASAAAKAIHNICSVCRDHMAQHFNGLLEIARSLDSFLLSPEAAVGLLKGTALVLARLPLDKITECLSELCSVQVMALKKLLSQEPSNGISSDPTVFLDRLAVIFRHTNPIVENGQTHPCQKVIQEIWPVLSETLNKHRADNRIVERCCRCLRFAVRCVGKGSAALLQPLVTQMVNVYHVHQHSCFLYLGSILVDEYGMEEGCRQGLLDMLQALCIPTFQLLEQQNGLQNHPDTVDDLFRLATRFIQRSPVTLLRSQVVIPILQWAIASTTLDHRDANCSVMRFLRDLIHTGVANDHEEDFELRKELIGQVMNQLGQQLVSQLLHTCCFCLPPYTLPDVAEVLWEIMQVDRPTFCRWLENSLKGLPKETTVGAVTVTHKQLTDFHKQVTSAEECKQVCWALRDFTRLFR

SEQ ID NO: 9034 - protein, 909 aa, Homo sapiens
MEGAKPTLQLVYQAVQALYHDPDPSGKERASFWLGELQRSVHAWEISDQLLQIRQDVESCYFAAQTMKMKIQTSFYELPTDSHASLRDSLLTHIQNLKDLSPVIVTQLALAIADLALQMPSWKGCVQTLVEKYSNDVTSLPFLLEILTVLPEEVHSRSLRIGANRRTEIIEDLAFYSSTVVSLLMTCVEKAGTDEKMLMKVFRCLGSWFNLGVLDSNFMANNKLLALLFEVLQQDKTSSNLHEAASDCVCSALYAIENVETNLPLAMQLFQGVLTLETAYHMAVAREDLDKVLNYCRIFTELCETFLEKIVCTPGQGLGDLRTLELLLICAGHPQYEVVEISFNFWYRLGEHLYKTNDEVIHGIFKAYIQRLLHALARHCQLEPDHEGVPEETDDFGEFRMRVSDLVKDLIFLIGSMECFAQLYSTLKEGNPPWEVTEAVLFIMAAIAKSVDPENNPTLVEVLEGVVRLPETVHTAVRYTSIELVGEMSEVVDRNPQFLDPVLGYLMKGLCEKPLASAAAKAIHNICSVCRDHMAQHFNGLLEIARSLDSFLLSPEAAVGLLKGTALVLARLPLDKITECLSELCSVQVMALKKLLSQEPSNGISSDPTVFLDRLAVIFRHTNPIVENGQTHPCQKVIQEIWPVLSETLNKHRADNRIVERCCRCLRFAVRCVGKGSAALLQPLVTQMVNVYHVHQHSCFLYLGSILVDEYGMEEGCRQGLLDMLQALCIPTFQLLEQQNGLQNHPDTVDDLFRLATRFIQRSPVTLLRSQVVIPILQWAIASTTLDHRDANCSVMRFLRDLIHTGVANDHEEDFELRKELIGQVMNQLGQQLVSQLLHTCCFCLPPYTLPDVAEVLWEIMQVDRPTFCRWLENSLKGLPKETTVGAVTVTHKQLTDFHKQVTRNVFFN

SEQ ID NO: 9035 - protein, 859 aa, Homo sapiens
MEGAKPTLQLVYQAVQALYHDPDPSGKERASFWLGELQRSVHAWEISDQLLQIRQDVESCYFAAQTMKMKIQTSFYELPTDSHASLRDSLLTHIQNLKDLSPVIVTQLALAIADLALQMPSWKGCVQTLVEKYSNDVTSLPFLLEILTVLPEEVHSRSLRIGANRRTEIIEDLAFYSSTVVSLLMTCVEKAGTDEKMLMKVFRCLGSWFNLGVLDSNFMANNKLLALLFEVLQQDKTSSNLHEAASDCVCSALYAIENVETNLPLAMQLFQGVLTLETAYHMAVAREDLDKVLNYCRIFTELCETFLEKIVCTPGQGLGDLRTLELLLICAGHPQYEVVEISFNFWYRLGEHLYKTNDEVIHGIFKAYIQRLLHALARHCQLEPDHEGVPEETDDFGEFRMRVSDLVKDLIFLIGSMECFAQLYSTLKEGNPPWEVTEAVLFIMAAIAKSVDPENNPTLVEVLEGVVRLPETVHTAVRYTSIELVGEMSEVVDRNPQFLGTALVLARLPLDKITECLSELCSVQVMALKKLLSQEPSNGISSDPTVFLDRLAVIFRHTNPIVENGQTHPCQKVIQEIWPVLSETLNKHRADNRIVERCCRCLRFAVRCVGKGSAALLQPLVTQMVNVYHVHQHSCFLYLGSILVDEYGMEEGCRQGLLDMLQALCIPTFQLLEQQNGLQNHPDTVDDLFRLATRFIQRSPVTLLRSQVVIPILQWAIASTTLDHRDANCSVMRFLRDLIHTGVANDHEEDFELRKELIGQVMNQLGQQLVSQLLHTCCFCLPPYTLPDVAEVLWEIMQVDRPTFCRWLENSLKGLPKETTVGAVTVTHKQLTDFHKQVTSAEECKQVCWALRDFTRLFR

SEQ ID NO: 9036 - protein, 1992 aa, Homo sapiens
MSNRPNNNPGGSLRRSQRNTAGAQPQDDSIGGRSCSSSSAVIVPQPEDPDRANTSERQKTGQVPKKDNSRGVKRSASPDYNRTNSPSSAKKPKALQHTESPSETNKPHSKSKKRHLDQEQQLKSAQSPSTSKAHTRKSGATGGSRSQKRKRTESSCVKSGSGSESTGAEERSAKPTKLASKSATSAKAGCSTITDSSSAASTSSSSSAVASASSTVPPGARVKQGKDQNKARRSRSASSPSPRRSSREKEQSKTGGSSKFDWAARFSPKVSLPKTKLSLPGSSKSETSKPGPSGLQAKLASLRKSTKKRSESPPAELPSLRRSTRQKTTGSCASTSRRGSGLGKRGAAEARRQEKMADPESNQEAVNSSAARTDEAPQGAAGAVGMTTSGESESDDSEMGRLQALLEARGLPPHLFGPLGPRMSQLFHRTIGSGASSKAQQLLQGLQASDESQQLQAVIEMCQLLVMGNEETLGGFPVKSVVPALITLLQMEHNFDIMNHACRALTYMMEALPRSSAVVVDAIPVFLEKLQVIQCIDVAEQALTALEMLSRRHSKAILQAGGLADCLLYLEFFSINAQRNALAIAANCCQSITPDEFHFVADSLPLLTQRLTHQDKKSVESTCLCFARLVDNFQHEENLLQQVASKDLLTNVQQLLVVTPPILSSGMFIMVVRMFSLMCSNCPTLAVQLMKQNIAETLHFLLCGASNGSCQEQIDLVPRSPQELYELTSLICELMPCLPKEGIFAVDTMLKKGNAQNTDGAIWQWRDDRGLWHPYNRIDSRIIEQINEDTGTARAIQRKPNPLANSNTSGYSESKKDDARAQLMKEDPELAKSFIKTLFGVLYEVYSSSAGPAVRHKCLRAILRIIYFADAELLKDVLKNHAVSSHIASMLSSQDLKIVVGALQMAEILMQKLPDIFSVYFRREGVMHQVKHLAESESLLTSPPKACTNGSGSMGSTTSVSSGTATAATHAAADLGSPSLQHSRDDSLDLSPQGRLSDVLKRKRLPKRGPRRPKYSPPRDDDKVDNQAKSPTTTQSPKSSFLASLNPKTWGRLSTQSNSNNIEPARTAGGSGLARAASKDTISNNREKIKGWIKEQAHKFVERYFSSENMDGSNPALNVLQRLCAATEQLNLQVDGGAECLVEIRSIVSESDVSSFEIQHSGFVKQLLLYLTSKSEKDAVSREIRLKRFLHVFFSSPLPGEEPIGRVEPVGNAPLLALVHKMNNCLSQMEQFPVKVHDFPSGNGTGGSFSLNRGSQALKFFNTHQLKCQLQRHPDCANVKQWKGGPVKIDPLALVQAIERYLVVRGYGRVREDDEDSDDDGSDEEIDESLAAQFLNSGNVRHRLQFYIGEHLLPYNMTVYQAVRQFSIQAEDERESTDDESNPLGRAGIWTKTHTIWYKPVREDEESNKDCVGGKRGRAQTAPTKTSPRNAKKHDELWHDGVCPSVSNPLEVYLIPTPPENITFEDPSLDVILLLRVLHAISRYWYYLYDNAMCKEIIPTSEFINSKLTAKANRQLQDPLVIMTGNIPTWLTELGKTCPFFFPFDTRQMLFYVTAFDRDRAMQRLLDTNPEINQSDSQDSRVAPRLDRKKRTVNREELLKQAESVMQDLGSSRAMLEIQYENEVGTGLGPTLEFYALVSQELQRADLGLWRGEEVTLSNPKGSQEGTKYIQNLQGLFALPFGRTAKPAHIAKVKMKFRFLGKLMAKAIMDFRLVDLPLGLPFYKWMLRQETSLTSHDLFDIDPVVARSVYHLEDIVRQKKRLEQDKSQTKESLQYALETLTMNGCSVEDLGLDFTLPGFPNIELKKGGKDIPVTIHNLEEYLRLVIFWALNEGVSRQFDSFRDGFESVFPLSHLQYFYPEELDQLLCGSKADTWDAKTLMECCRPDHGYTHDSRAVKFLFEILSSFDNEQQRLFLQFVTGSPRLPVGGFRSLNPPLTIVRKTFESTENPDDFLPSVMTCVNYLKLPDYSSIEIMREKLLIAAREGQQSFHLS

SEQ ID NO: 9037 - protein, 2025 aa, Homo sapiens
MSNRPNNNPGGSLRRSQRNTAGAQPQDDSIGGRSCSSSSAVIVPQPEDPDRANTSERQKTGQVPKKDNSRGVKRSASPDYNRTNSPSSAKKPKALQHTESPSETNKPHSKSKKRHLDQEQQLKSAQSPSTSKAHTRKSGATGGSRSQKRKRTESSCVKSGSGSESTGAEERSAKPTKLASKSATSAKAGCSTITDSSSAASTSSSSSAVASASSTVPPGARVKQGKDQNKARRSRSASSPSPRRSSREKEQSKTGGSSKFDWAARFSPKVSLPKTKLSLPGSSKSETSKPGPSGLQAKLASLRKSTKKRSESPPAELPSLRRSTRQKTTGSCASTSRRGSGLGKRGAAEARRQEKMADPESNQEAVNSSAARTDEAPQGAAASSSVAGAVGMTTSGESESDDSEMGRLQALLEARGLPPHLFGPLGPRMSQLFHRTIGSGASSKAQQLLQGLQASDESQQLQAVIEMCQLLVMGNEETLGGFPVKSVVPALITLLQMEHNFDIMNHACRALTYMMEALPRSSAVVVDAIPVFLEKLQVIQCIDVAEQALTALEMLSRRHSKAILQAGGLADCLLYLEFFSINAQRNALAIAANCCQSITPDEFHFVADSLPLLTQRLTHQDKKSVESTCLCFARLVDNFQHEENLLQQVASKDLLTNVQQLLVVTPPILSSGMFIMVVRMFSLMCSNCPTLAVQLMKQNIAETLHFLLCGASNGSCQEQIDLVPRSPQELYELTSLICELMPCLPKEGIFAVDTMLKKGNAQNTDGAIWQWRDDRGLWHPYNRIDSRIIEAAHQVGEDEISLSTLGRVYTIDFNSMQQINEDTGTARAIQRKPNPLANSNTSGYSESKKDDARAQLMKEDPELAKSFIKTLFGVLYEVYSSSAGPAVRHKCLRAILRIIYFADAELLKDVLKNHAVSSHIASMLSSQDLKIVVGALQMAEILMQKLPDIFSVYFRREGVMHQVKHLAESESLLTSPPKACTNGSGSMGSTTSVSSGTATAATHAAADLGSPSLQHSRDDSLDLSPQGRLSDVLKRKRLPKRGPRRPKYSPPRDDDKVDNQAKSPTTTQSPKSSFLASLNPKTWGRLSTQSNSNNIEPARTAGGSGLARAASKDTISNNREKIKGWIKEQAHKFVERYFSSENMDGSNPALNVLQRLCAATEQLNLQVDGGAECLVEIRSIVSESDVSSFEIQHSGFVKQLLLYLTSKSEKDAVSREIRLKRFLHVFFSSPLPGEEPIGRVEPVGNAPLLALVHKMNNCLSQMEQFPVKVHDFPSGNGTGGSFSLNRGSQALKFFNTHQLKCQLQRHPDCANVKQWKGGPVKIDPLALVQAIERYLVVRGYGRVREDDEDSDDDGSDEEIDESLAAQFLNSGNVRHRLQFYIGEHLLPYNMTVYQAVRQFSIQAEDERESTDDESNPLGRAGIWTKTHTIWYKPVREDEESNKDCVGGKRGRAQTAPTKTSPRNAKKHDELWHDGVCPSVSNPLEVYLIPTPPENITFEDPSLDVILLLRVLHAISRYWYYLYDNAMCKEIIPTSEFINSKLTAKANRQLQDPLVIMTGNIPTWLTELGKTCPFFFPFDTRQMLFYVTAFDRDRAMQRLLDTNPEINQSDSQDSRVAPRLDRKKRTVNREELLKQAESVMQDLGSSRAMLEIQYENEVGTGLGPTLEFYALVSQELQRADLGLWRGEEVTLSNPKGSQEGTKYIQNLQGLFALPFGRTAKPAHIAKVKMKFRFLGKLMAKAIMDFRLVDLPLGLPFYKWMLRQETSLTSHDLFDIDPVVARSVYHLEDIVRQKKRLEQDKSQTKESLQYALETLTMNGCSVEDLGLDFTLPGFPNIELKKGGKDIPVTIHNLEEYLRLVIFWALNEGVSRQFDSFRDGFESVFPLSHLQYFYPEELDQLLCGSKADTWDAKTLMECCRPDHGYTHDSRAVKFLFEILSSFDNEQQRLFLQFVTGSPRLPVGGFRSLNPPLTIVRKTFESTENPDDFLPSVMTCVNYLKLPDYSSIEIMREKLLIAAREGQQSFHLS

SEQ ID NO: 9038 - protein, 2040 aa, Homo sapiens
MSNRPNNNPGGSLRRSQRNTAGAQPQDDSIGGRSHLGQAKHKGYSPPESRKSNSKAPKVQSNTTSELSRGHLSKRSCSSSSAVIVPQPEDPDRANTSERQKTGQVPKKDNSRGVKRSASPDYNRTNSPSSAKKPKALQHTESPSETNKPHSKSKKRHLDQEQQLKSAQSPSTSKAHTRKSGATGGSRSQKRKRTESSCVKSGSGSESTGAEERSAKPTKLASKSATSAKAGCSTITDSSSAASTSSSSSAVASASSTVPPGARVKQGKDQNKARRSRSASSPSPRRSSREKEQSKTGGSSKFDWAARFSPKVSLPKTKLSLPGSSKSETSKPGPSGLQAKLASLRKSTKKRSESPPAELPSLRRSTRQKTTGSCASTSRRGSGLGKRGAAEARRQEKMADPESNQEAVNSSAARTDEAPQGAAASSSVAGAVGMTTSGESESDDSEMGRLQALLEARGLPPHLFGPLGPRMSQLFHRTIGSGASSKAQQLLQGLQASDESQQLQAVIEMCQLLVMGNEETLGGFPVKSVVPALITLLQMEHNFDIMNHACRALTYMMEALPRSSAVVVDAIPVFLEKLQVIQCIDVAEQALTALEMLSRRHSKAILQAGGLADCLLYLEFFSINAQRNALAIAANCCQSITPDEFHFVADSLPLLTQRLTHQDKKSVESTCLCFARLVDNFQHEENLLQQVASKDLLTNVQQLLVVTPPILSSGMFIMVVRMFSLMCSNCPTLAVQLMKQNIAETLHFLLCGASNGSCQEQIDLVPRSPQELYELTSLICELMPCLPKEGIFAVDTMLKKGNAQNTDGAIWQWRDDRGLWHPYNRIDSRIIEQINEDTGTARAIQRKPNPLANSNTSGYSESKKDDARAQLMKEDPELAKSFIKTLFGVLYEVYSSSAGPAVRHKCLRAILRIIYFADAELLKDVLKNHAVSSHIASMLSSQDLKIVVGALQMAEILMQKLPDIFSVYFRREGVMHQVKHLAESESLLTSPPKACTNGSGSMGSTTSVSSGTATAATHAAADLGSPSLQHSRDDSLDLSPQGRLSDVLKRKRLPKRGPRRPKYSPPRDDDKVDNQAKSPTTTQSPKSSFLASLNPKTWGRLSTQSNSNNIEPARTAGGSGLARAASKDTISNNREKIKGWIKEQAHKFVERYFSSENMDGSNPALNVLQRLCAATEQLNLQVDGGAECLVEIRSIVSESDVSSFEIQHSGFVKQLLLYLTSKSEKDAVSREIRLKRFLHVFFSSPLPGEEPIGRVEPVGNAPLLALVHKMNNCLSQMEQFPVKVHDFPSGNGTGGSFSLNRGSQALKFFNTHQLKCQLQRHPDCANVKQWKGGPVKIDPLALVQAIERYLVVRGYGRVREDDEDSDDDGSDEEIDESLAAQFLNSGNVRHRLQFYIGEHLLPYNMTVYQAVRQFSIQAEDERESTDDESNPLGRAGIWTKTHTIWYKPVREDEESNKDCVGGKRGRAQTAPTKTSPRNAKKHDELWHDGVCPSVSNPLEVYLIPTPPENITFEDPSLDVILLLRVLHAISRYWYYLYDNAMCKEIIPTSEFINSKLTAKANRQLQDPLVIMTGNIPTWLTELGKTCPFFFPFDTRQMLFYVTAFDRDRAMQRLLDTNPEINQSDSQDSRVAPRLDRKKRTVNREELLKQAESVMQDLGSSRAMLEIQYENEVGTGLGPTLEFYALVSQELQRADLGLWRGEEVTLSNPKGSQEGTKYIQNLQGLFALPFGRTAKPAHIAKVKMKFRFLGKLMAKAIMDFRLVDLPLGLPFYKWMLRQETSLTSHDLFDIDPVVARSVYHLEDIVRQKKRLEQDKSQTKESLQYALETLTMNGCSVEDLGLDFTLPGFPNIELKKGGKDIPVTIHNLEEYLRLVIFWALNEGVSRQFDSFRDGFESVFPLSHLQYFYPEELDQLLCGSKADTWDAKTLMECCRPDHGYTHDSRAVKFLFEILSSFDNEQQRLFLQFVTGSPRLPVGGFRSLNPPLTIVRKTFESTENPDDFLPSVMTCVNYLKLPDYSSIEIMREKLLIAAREGQQSFHLS

SEQ ID NO: 9039 - protein, 1722 aa, Homo sapiens
MSNRPNNNPGGSLRRSQRNTAGAQPQDDSIGGSRRGSGLGKRGAAEARRQEKMADPESNQEAVNSSAARTDEAPQGAAASSSVAGAVGMTTSGESESDDSEMGRLQALLEARGLPPHLFGPLGPRMSQLFHRTIGSGASSKAQQLLQGLQASDESQQLQAVIEMCQLLVMGNEETLGGFPVKSVVPALITLLQMEHNFDIMNHACRALTYMMEALPRSSAVVVDAIPVFLEKLQVIQCIDVAEQALTALEMLSRRHSKAILQAGGLADCLLYLEFFSINAQRNALAIAANCCQSITPDEFHFVADSLPLLTQRLTHQDKKSVESTCLCFARLVDNFQHEENLLQQVASKDLLTNVQQLLVVTPPILSSGMFIMVVRMFSLMCSNCPTLAVQLMKQNIAETLHFLLCGASNGSCQEQIDLVPRSPQELYELTSLICELMPCLPKEGIFAVDTMLKKGNAQNTDGAIWQWRDDRGLWHPYNRIDSRIIEAAHQVGEDEISLSTLGRVYTIDFNSMQQINEDTGTARAIQRKPNPLANSNTSGYSESKKDDARAQLMKEDPELAKSFIKTLFGVLYEVYSSSAGPAVRHKCLRAILRIIYFADAELLKDVLKNHAVSSHIASMLSSQDLKIVVGALQMAEILMQKLPDIFSVYFRREGVMHQVKHLAESESLLTSPPKACTNGSGSMGSTTSVSSGTATAATHAAADLGSPSLQHSRDDSLDLSPQGRLSDVLKRKRLPKRGPRRPKYSPPRDDDKVDNQAKSPTTTQSPKSSFLASLNPKTWGRLSTQSNSNNIEPARTAGGSGLARAASKDTISNNREKIKGWIKEQAHKFVERYFSSENMDGSNPALNVLQRLCAATEQLNLQVDGGAECLVEIRSIVSESDVSSFEIQHSGFVKQLLLYLTSKSEKDAVSREIRLKRFLHVFFSSPLPGEEPIGRVEPVGNAPLLALVHKMNNCLSQMEQFPVKVHDFPSGNGTGGSFSLNRGSQALKFFNTHQLKCQLQRHPDCANVKQWKGGPVKIDPLALVQAIERYLVVRGYGRVREDDEDSDDDGSDEEIDESLAAQFLNSGNVRHRLQFYIGEHLLPYNMTVYQAVRQFSIQAEDERESTDDESNPLGRAGIWTKTHTIWYKPVREDEESNKDCVGGKRGRAQTAPTKTSPRNAKKHDELWHDGVCPSVSNPLEVYLIPTPPENITFEDPSLDVILLLRVLHAISRYWYYLYDNAMCKEIIPTSEFINSKLTAKANRQLQDPLVIMTGNIPTWLTELGKTCPFFFPFDTRQMLFYVTAFDRDRAMQRLLDTNPEINQSDSQDSRVAPRLDRKKRTVNREELLKQAESVMQDLGSSRAMLEIQYENEVGTGLGPTLEFYALVSQELQRADLGLWRGEEVTLSNPKGSQEGTKYIQNLQGLFALPFGRTAKPAHIAKVKMKFRFLGKLMAKAIMDFRLVDLPLGLPFYKWMLRQETSLTSHDLFDIDPVVARSVYHLEDIVRQKKRLEQDKSQTKESLQYALETLTMNGCSVEDLGLDFTLPGFPNIELKKGGKDIPVTIHNLEEYLRLVIFWALNEGVSRQFDSFRDGFESVFPLSHLQYFYPEELDQLLCGSKADTWDAKTLMECCRPDHGYTHDSRAVKFLFEILSSFDNEQQRLFLQFVTGSPRLPVGGFRSLNPPLTIVRKTFESTENPDDFLPSVMTCVNYLKLPDYSSIEIMREKLLIAAREGQQSFHLS

SEQ ID NO: 9040 - protein, 366 aa, Homo sapiens
MSEEEQGSGTTTGCGLPSIEQMLAANPGKTPISLLQEYGTRIGKTPVYDLLKAEGQAHQPNFTFRVTVGDTSCTGQGPSKKAAKHKAAEVALKHLKGGSMLEPALEDSSSFSPLDSSLPEDIPVFTAAAAATPVPSVVLTRSPPMELQPPVSPQQSECNPVGALQELVVQKGWRLPEYTVTQESGPAHRKEFTMTCRVERFIEIGSGTSKKLAKRNAAAKMLLRVHTVPLDARDGNEVEPDDDHFSIGVGSRLDGLRNRGPGCTWDSLRNSVGEKILSLRSCSLGSLGALGPACCRVLSELSEEQAFHVSYLDIEELSLSGLCQCLVELSTQPATVCHGSATTREAARGEAARRALQYLKIMAGSK

SEQ ID NO: 9041 - protein, 345 aa, Homo sapiens
MLAANPGKTPISLLQEYGTRIGKTPVYDLLKAEGQAHQPNFTFRVTVGDTSCTGQGPSKKAAKHKAAEVALKHLKGGSMLEPALEDSSSFSPLDSSLPEDIPVFTAAAAATPVPSVVLTRSPPMELQPPVSPQQSECNPVGALQELVVQKGWRLPEYTVTQESGPAHRKEFTMTCRVERFIEIGSGTSKKLAKRNAAAKMLLRVHTVPLDARDGNEVEPDDDHFSIGVGSRLDGLRNRGPGCTWDSLRNSVGEKILSLRSCSLGSLGALGPACCRVLSELSEEQAFHVSYLDIEELSLSGLCQCLVELSTQPATVCHGSATTREAARGEAARRALQYLKIMAGSK

SEQ ID NO: 9042 - protein, 289 aa, Homo sapiens
MPVVRKIFRRRRGDSESEEDEQDSEEVRLKLEETREVQNLRKRPNGVSAVALLVGEKVQEETTLVDDPFQMKTGGMVDMKKLKERGKDKISEEEDLHLGTSFSAETNRRDEDADMMKYIETELKKRKGIVEHEEQKVKPKNAEDCLYELPENIRVSSAKKTEEMLSNQMLSGIPEVDLGIDAKIKNIISTEDAKARLLAEQQNKKKDSETSFVPTNMAVNYVQHNRFYHEELNAPIRRNKEEPKARPLRVGDTEKPEPERSPPNRKRPANEKATDDYHYEKFKKMNRRY

SEQ ID NO: 9043 - protein, 784 aa, Homo sapiens
MPHTLWMVWVLGVIISLSKEESSNQASLSCDRNGICKGSSGSLNSIPSGLTEAVKSLDLSNNRITYISNSDLQRCVNLQALVLTSNGINTIEEDSFSSLGSLEHLDLSYNYLSNLSSSWFKPLSSLTFLNLLGNPYKTLGETSLFSHLTKLQILRVGNMDTFTKIQRKDFAGLTFLEELEIDASDLQSYEPKSLKSIQNVSHLILHMKQHILLLEIFVDVTSSVECLELRDTDLDTFHFSELSTGETNSLIKKFTFRNVKITDESLFQVMKLLNQISGLLELEFDDCTLNGVGNFRASDNDRVIDPGKVETLTIRRLHIPRFYLFYDLSTLYSLTERVKRITVENSKVFLVPCLLSQHLKSLEYLDLSENLMVEEYLKNSACEDAWPSLQTLILRQNHLASLEKTGETLLTLKNLTNIDISKNSFHSMPETCQWPEKMKYLNLSSTRIHSVTGCIPKTLEILDVSNNNLNLFSLNLPQLKELYISRNKLMTLPDASLLPMLLVLKISRNAITTFSKEQLDSFHTLKTLEAGGNNFICSCEFLSFTQEQQALAKVLIDWPANYLCDSPSHVRGQQVQDVRLSVSECHRTALVSGMCCALFLLILLTGVLCHRFHGLWYMKMMWAWLQAKRKPRKAPSRNICYDAFVSYSERDAYWVENLMVQELENFNPPFKLCLHKRDFIPGKWIIDNIIDSIEKSHKTVFVLSENFVKSEWCKYELDFSHFRLFDENNDAAILILLEPIEKKAIPQRFCKLRKIMNTKTYLEWPMDEAQREGFWVNLRAAIKS

SEQ ID NO: 9044 - protein, 377 aa, Homo sapiens
MDIPPLAGKIAALSLSALPVSYALNHVSALSHPLWVALMSALILGLLFVAVYSLSHGEVSYDPLYAVFAVFAFTSVVDLIIALQEDSYVVGFMEFYTKEGEPYLRTAHGVFICYWDGTVHYLLYLAMAGAICRRKRYRNFGLYWLGSFAMSILVFLTGNILGKYSSEIRPAFFLTIPYLLVPCWAGMKVFSQPRALTRCTANMVQEEQRKGLLQRPADLALVIYLILAGFFTLFRGLVVLDCPTDACFVYIYQYEPYLRDPVAYPKVQMLMYMFYVLPFCGLAAYALTFPGCSWLPDWALVFAGGIGQAQFSHMGASMHLRTPFTYRVPEDTWGCFFVCNLLYALGPHLLAYRCLQWPAFFHQPPPSDPLALHKKQH

SEQ ID NO: 9045 - protein, 350 aa, Homo sapiens
MDIPPLAGKIAALSLSALPVSYALNHVSALSHPLWVALMSALILGLLFVAVYSLSHGEVSYDPLYAVFAVFAFTSVVDLIIALQEDSYVVGFMEFYTKEGEPYLRTAHGVFICYWDGTVHYLLYLAMAGAICRRKRYRNFGLYWLGSFAMSILVFLTGNILGKYSSEIRPAFFLTIPYLLVPCWAGMKVFSQPRALTRCTANMVQEEQRKGLLQRPADLALVIYLILAGFFTLFRGLVVLDCPTDACFVYIYQYEPYLRDPVAYPKVQMLMYMFYVLPFCGLAAYALTFPGCSWLPDWALVFAGGIGQAQFSHMGASMHLRTPFTYCLQWPAFFHQPPPSDPLALHKKQH

SEQ ID NO: 9046 - protein, 514 aa, Homo sapiens
MGKDFRYYFQHPWSRMIVAYLVIFFNFLIFAEDPVSHSQTEANVIVVGNCFSFVTNKYPRGVGWRILKVLLWLLAILTGLIAGKFLFHQRLFGQLLRLKMFREDHGSWMTMFFSTILFLFIFSHIYNTILLMDGNMGAYIITDYMGIRNESFMKLAAVGTWMGDFVTAWMVTDMMLQDKPYPDWGKSARAFWKKGNVRITLFWTVLFTLTSVVVLVITTDWISWDKLNRGFLPSDEVSRAFLASFILVFDLLIVMQDWEFPHFMGDVDVNLPGLHTPHMQFKIPFFQKIFKEEYRIHITGKWFNYGIIFLVLILDLNMWKNQIFYKPHEYGQYIGPGQKIYTVKDSESLKDLNRTKLSWEWRSNHTNPRTNKTYVEGDMFLHSRFIGASLDVKCLAFVPSLIAFVWFGFFIWFFGRFLKNEPRMENQDKTYTRMKRKSPSEHSKDMGITRENTQASVEDPLNDPSLVCIRSDFNEIVYKSSHLTSENLSSQLNESTSATEADQDPTTSKSTPTN

SEQ ID NO: 9047 - protein, 504 aa, Homo sapiens
MAGLKRRVPLHSLRYFISMVGLFSKPGLLPWYARNPPGWSQLFLGTVCKGDFTRVIATKCQKGQKSQKKPSHLGPLDGSWQERLADVVTPLWRLSYEEQLKVKFAAQKKILQRLESYIQMLNGVSVTTAVPKSERLSCLLHPIIPSPVINGYRNKSTFSVNRGPDGNPKTVGFYLGTWRDGNVVCVQSNHLKNIPEKHSQVAQYYEVFLRQSPLEPCLVFHEGGYWRELTVRTNSQGHTMAIITFHPQKLSQEELHVQKEIVKEFFIRGPGAACGLTSLYFQESTMTRCSHQQSPYQLLFGEPYIFEELLSLKIRISPDAFFQINTAGAEMLYRTVGELTGVNSDTILLDICCGTGVIGLSLAQHTSRVLGIELLEQAVEDARWTAAFNGITNSEFHTGQAEKILPGLLKSKEDGQSIVAVVNPARAGLHYKVIQAIRNFRAIHTLVFVSCKLHGESTRNVIELCCPPDPAKKLLGEPFVLQQAVPVDLFPHTPHCELVLLFTR

SEQ ID NO: 9048 - protein, 494 aa, Homo sapiens
MAGLKRRVPLHSLRYFISMVGLFSKPGLLPWYARNPPGWSQLFLGTVCKGDFTRVIATKCQKGQKSQKKPSHLGPLDGSWQERLADVVTPLWRLSYEEQLKVKFAAQKKILQRLESYIQMLNGVSVTTAVPKSERLSCLLHPIIPSPVINGYRNKSTFSVNRGPDGNPKTVGFYLGTWRDGNVVCVQSNHLKNIPEKHSQVAQYYEVFLRQSPLEPCLVFHEGGYWRELTVRTNSQGHTMAIITFHPQKLSQEELHVQKEIVKEFFIRGPGAACGLTSLYFQESTMTRCSHQQSPYQLLFGEPYIFEELLSLKIRISPDAFFQINTAGAEMLYRTVGELTGVNSDTILLDICCGTGVIGLSLAQHTSRVLGIELLEQAVEDARWTAAFNGITNSEFHTGQAEKILPGLLKSKEDGQSIVAVVNPARAGLHYKVIQAIRNFRAIHTLVFVSCKLHGESTRNVIERSLILLECSGMVSAHCSLHLPGSSDSPASAS

SEQ ID NO: 9049 - protein, 459 aa, Homo sapiens
MAGLKRRVPLHSLRYFISMVGLFSKPGLLPWYARNPPGWSQLFLGTVCKGDFTRVIATKCQKGQKSQKKPSHLGPLDGSWQERLADVVTPLWRLSYEEQLKPVINGYRNKSTFSVNRGPDGNPKTVGFYLGTWRDGNVVCVQSNHLKNIPEKHSQVAQYYEVFLRQSPLEPCLVFHEGGYWRELTVRTNSQGHTMAIITFHPQKLSQEELHVQKEIVKEFFIRGPGAACGLTSLYFQESTMTRCSHQQSPYQLLFGEPYIFEELLSLKIRISPDAFFQINTAGAEMLYRTVGELTGVNSDTILLDICCGTGVIGLSLAQHTSRVLGIELLEQAVEDARWTAAFNGITNSEFHTGQAEKILPGLLKSKEDGQSIVAVVNPARAGLHYKVIQAIRNFRAIHTLVFVSCKLHGESTRNVIELCCPPDPAKKLLGEPFVLQQAVPVDLFPHTPHCELVLLFTR

SEQ ID NO: 9050 - protein, 427 aa, Homo sapiens
MGAGATGRAMDGPRLLLLLLLGVSLGGAKEACPTGLYTHSGECCKACNLGEGVAQPCGANQTVCEPCLDSVTFSDVVSATEPCKPCTECVGLQSMSAPCVEADDAVCRCAYGYYQDETTGRCEACRVCEAGSGLVFSCQDKQNTVCEECPDGTYSDEANHVDPCLPCTVCEDTERQLRECTRWADAECEEIPGRWITRSTPPEGSDSTAPSTQEPEAPPEQDLIASTVAGVVTTVMGSSQPVVTRGTTDNLIPVYCSILAAVVVGLVAYIAFKRWNSCKQNKQGANSRPVNQTPPPEGEKLHSDSGISVDSQSLHDQQPHTQTASGQALKGDGGLYSSLPPAKREEVEKLLNGSAGDTWRHLAGELGYQPEHIDSFTHEACPVRALLASWATQDSATLDALLAALRRIQRADLVESLCSESTATSPV

SEQ ID NO: 9051 - protein, 333 aa, Homo sapiens
MSAPCVEADDAVCRCAYGYYQDETTGRCEACRVCEAGSGLVFSCQDKQNTVCEECPDGTYSDEANHVDPCLPCTVCEDTERQLRECTRWADAECEEIPGRWITRSTPPEGSDSTAPSTQEPEAPPEQDLIASTVAGVVTTVMGSSQPVVTRGTTDNLIPVYCSILAAVVVGLVAYIAFKRWNSCKQNKQGANSRPVNQTPPPEGEKLHSDSGISVDSQSLHDQQPHTQTASGQALKGDGGLYSSLPPAKREEVEKLLNGSAGDTWRHLAGELGYQPEHIDSFTHEACPVRALLASWATQDSATLDALLAALRRIQRADLVESLCSESTATSPV

SEQ ID NO: 9052 - protein, 377 aa, Homo sapiens
MRLSVRRVLLAAGCALVLVLAVQLGQQVLECRAVLAGLRSPRGAMRPEQEELVMVGTNHVEYRYGKAMPLIFVGGVPRSGTTLMRAMLDAHPEVRCGEETRIIPRVLAMRQAWSKSGREKLRLDEAGVTDEVLDAAMQAFILEVIAKHGEPARVLCNKDPFTLKSSVYLSRLFPNSKFLLMVRDGRASVHSMITRKVTIAGFDLSSYRDCLTKWNKAIEVMYAQCMEVGKEKCLPVYYEQLVLHPRRSLKLILDFLGIAWSDAVLHHEDLIGKPGGVSLSKIERSTDQVIKPVNLEALSKWTGHIPGDVVRDMAQIAPMLAQLGYDPYANPPNYGNPDPFVINNTQRVLKGDYKTPANLKGYFQVNQNSTSSHLGSS

SEQ ID NO: 9053 - protein, 508 aa, Homo sapiens
MASAVWGSAPWWGPPPPAPARPLTDIDFCSGAQLQELTQLIQELGVQESWSDGPKPGADLLRAKDFVFSLLGLVHRRDPRFPPQAELLLLRGGIREGSLDLGHAPLGPYARGPHYDAGFTLLVPMFSLDGTELQLDLESCYAQVCLPEMVCGTPIREMWQDCLGPPVPGARDSIHRTESEESSKDWQSSVDQPHSYVTEHEAPVSLEKSPSDVSASESPQHDVVDLGSTAPLKTMSSDVTKAAVESPVPKPSEAREAWPTLCSAQVAAWFFATLAAVAESLIPVPGAPRLVHAARHAGFTTVLLATPEPPRRLLLFDLIPVVSVAGWPEGARSHSWAGPLASESASFYLVPGGGTERPCASAWQLCFARQELALKARIPAPLLQAHAAAQALLRPLVAGTRAAAPYLLRTLLYWACERLPALYLARPENAGACCLGLLDELGRVLEAGTLPHYFLNGRQLRTGDDSAALLGELARLRGDPARALRAAVEEAKVARKGGGLAGVGGGAH

SEQ ID NO: 9054 - protein, 783 aa, Homo sapiens
MEEELKCPVCGSLFREPIILPCSHNVCLPCARTIAVQTPDGEQHLPQPLLLSRGSGLQAGAAAAASLEHDAAAGPACGGAGGSAAGGLGGGAGGGGDHADKLSLYSETDSGYGSYTPSLKSPNGVRVLPMVPAPPGSSAAAARGAACSSLSSSSSSITCPQCHRSASLDHRGLRGFQRNRLLEAIVQRYQQGRGAVPGTSAAAAVAICQLCDRTPPEPAATLCEQCDVLYCSACQLKCHPSRGPFAKHRLVQPPPPPPPPAEAASGPTGTAQGAPSGGGGCKSPGGAGAGATGGSTARKFPTCPEHEMENYSMYCVSCRTPVCYLCLEEGRHAKHEVKPLGAMWKQHKAQLSQALNGVSDKAKEAKEFLVQLKNILQQIQENGLDYEACLVAQCDALVDALTRQKAKLLTKVTKEREHKLKMVWDQINHCTLKLRQSTGLMEYCLEVIKENDPSGFLQISDALIKRVQVSQEQWVKGALEPKVSAEFDLTLDSEPLLQAIHQLDFIQMKCRVPPVPLLQLEKCCTRNNSVTLAWRMPPFTHSPVDGYILELDDGAGGQFREVYVGKETLCTIDGLHFNSTYNARVKAFNSSGVGPYSKTVVLQTSDVAWFTFDPNSGHRDIILSNDNQTATCSSYDDRVVLGTAAFSKGVHYWELHVDRYDNHPDPAFGVARASVVKDMMLGKDDKAWAMYVDNNRSWFMHCNSHTNRTEGGVCKGATVGVLLDLNKHTLTFFINGQQQGPTAFSHVDGVFMPALSLNRNVQVTLHTGLEVPTNLGRPKLSGN

SEQ ID NO: 9055 - protein, 721 aa, Homo sapiens
MEEELKCPVCGSLFREPIILPCSHNVCLPCARTIAVQTPDGGSAAGGLGGGAGGGGDHADKLSLYSETDSGYGSYTPSLKSPNGVRVLPMVPAPPGSSAAAARGAACSSLSSSSSSITCPQCHRSASLDHRGLRGFQRNRLLEAIVQRYQQGRGAVPGTSAAAAVAICQLCDRTPPEPAATLCEQCDVLYCSACQLKCHPSRGPFAKHRLGAPSGGGGCKSPGGAGAGATGGSTARKFPTCPEHEMENYSMYCVSCRTPVCYLCLEEGRHAKHEVKPLGAMWKQHKAQLSQALNGVSDKAKEAKEFLVQLKNILQQIQENGLDYEACLVAQCDALVDALTRQKAKLLTKVTKEREHKLKMVWDQINHCTLKLRQSTGLMEYCLEVIKENDPSGFLQISDALIKRVQVSQEQWVKGALEPKVSAEFDLTLDSEPLLQAIHQLDFIQMKCRVPPVPLLQLEKCCTRNNSVTLAWRMPPFTHSPVDGYILELDDGAGGQFREVYVGKETLCTIDGLHFNSTYNARVKAFNSSGVGPYSKTVVLQTSDVAWFTFDPNSGHRDIILSNDNQTATCSSYDDRVVLGTAAFSKGVHYWELHVDRYDNHPDPAFGVARASVVKDMMLGKDDKAWAMYVDNNRSWFMHCNSHTNRTEGGVCKGATVGVLLDLNKHTLTFFINGQQQGPTAFSHVDGVFMPALSLNRNVQVTLHTGLEVPTNLGRPKLSGN

SEQ ID NO: 9056 - protein, 510 aa, Homo sapiens
MAADSDDGAVSAPAASDGGVSKSTTSGEELVVQVPVVDVQSNNFKEMWPSLLLAIKTANFVAVDTELSGLGDRKSLLNQCIEERYKAVCHAARTRSILSLGLACFKRQPDKGEHSYLAQVFNLTLLCMEEYVIEPKSVQFLIQHGFNFNQQYAQGIPYHKGNDKGDESQSQSVRTLFLELIRARRPLVLHNGLIDLVFLYQNFYAHLPESLGTFTADLCEMFPAGIYDTKYAAEFHARFVASYLEYAFRKCERENGKQRAAGSPHLTLEFCNYPSSMRDHIDYRCCLPPATHRPHPTSICDNFSAYGWCPLGPQCPQSHDIDLIIDTDEAAAEDKRRRRRRREKRKRALLNLPGTQTSGEAKDGPPKKQVCGDSIKPEETEQEVAADETRNLPHSKQGNKNDLEMGIKAARPEIADRATSEVPGSQASPNPVPGDGLHRAGFDAFMTGYVMAYVEVSQGPQPCSSGPWLPECHNKVYLSGKAVPLTVAKSQFSRSSKAHNQKMKLTWGSS

SEQ ID NO: 9057 - protein, 430 aa, Homo sapiens
MAADSDDGAVSAPAASDGAEWAWGQEEFAEPGEHSYLAQVFNLTLLCMEEYVIEPKSVQFLIQHGFNFNQQYAQGIPYHKGNDKGDESQSQSVRTLFLELIRARRPLVLHNGLIDLVFLYQNFYAHLPESLGTFTADLCEMFPAGIYDTKYAAEFHARFVASYLEYAFRKCERENGKQRAAGSPHLTLEFCNYPSSMRDHIDYRCCLPPATHRPHPTSICDNFSAYGWCPLGPQCPQSHDIDLIIDTDEAAAEDKRRRRRRREKRKRALLNLPGTQTSGEAKDGPPKKQVCGDSIKPEETEQEVAADETRNLPHSKQGNKNDLEMGIKAARPEIADRATSEVPGSQASPNPVPGDGLHRAGFDAFMTGYVMAYVEVSQGPQPCSSGPWLPECHNKVYLSGKAVPLTVAKSQFSRSSKAHNQKMKLTWGSS

SEQ ID NO: 9058 - protein, 906 aa, Homo sapiens
MSHQVKGLKEEARGGVKGRVKSGSPHTGDRLGRRSSSKRALKAEGTPGRRGAQRSQKERAGGSPSPGSPRRKQTGRRRHREELGEQERGEAERTCEGRRKRDERASFQERTAAPKREKEIPRREEKSKRQKKPRSSSLASSASGGESLSEEELAQILEQVEEKKKLIATMRSKPWPMAKKLTELREAQEFVEKYEGALGKGKGKQLYAYKMLMAKKWVKFKRDFDNFKTQCIPWEMKIKDIESHFGSSVASYFIFLRWMYGVNLVLFGLIFGLVIIPEVLMGMPYGSIPRKTVPRAEEEKAMDFSVLWDFEGYIKYSALFYGYYNNQRTIGWLRYRLPMAYFMVGVSVFGYSLIIVIRSMASNTQGSTGEGESDNFTFSFKMFTSWDYLIGNSETADNKYASITTSFKESIVDEQESNKEENIHLTRFLRVLANFLIICCLCGSGYLIYFVVKRSQQFSKMQNVSWYERNEVEIVMSLLGMFCPPLFETIAALENYHPRTGLKWQLGRIFALFLGNLYTFLLALMDDVHLKLANEETIKNITHWTLFNYYNSSGWNESVPRPPLHPADVPRGSCWETAVGIEFMRLTVSDMLVTYITILLGDFLRACFVRFMNYCWCWDLEAGFPSYAEFDISGNVLGLIFNQGMIWMGSFYAPGLVGINVLRLLTSMYFQCWAVMSSNVPHERVFKASRSNNFYMGLLLLVLFLSLLPVAYTIMSLPPSFDCGPFSGKNRMYDVLQETIENDFPTFLGKIFAFLANPGLIIPAILLMFLAIYYLNSVSKSLSRANAQLRKKIQVLREVEKSHKSVKGKATARDSEDTPKSSSKNATQLQLTKEETTPPSASQSQAMDKKAQGPGTSNSASRTTLPASGHLPISRPPGIGPDSGHAPSQTHPWRSASGKSAQRPPH

SEQ ID NO: 9059 - protein, 665 aa, Homo sapiens
MSHQVKGLKEEARGGVKGRVKSGSPHTGDRLGRRSSSKRALKAEGTPGRRGAQRSQKERAGGSPSPGSPRRKQTGRRRHREELGEQERGEAERTCEGRRKRDERASFQERTAAPKREKEIPRREEKSKRQKKPRSSSLASSASGGESLSEEELAQILEQVEEKKKLIATMRSKPWPMAKKLTELREAQEFVEKYEGALGKGKGKQLYAYKMLMAKKWVKFKRDFDNFKTQCIPWEMKIKDIESHFGSSVASYFIFLRWMYGVNLVLFGLIFGLVIIPEVLMGMPYGSIPRKTVPRAEEEKAMDFSVLWDFEGYIKYSALFYGYYNNQRTIGWLRYRLPMAYFMVGVSVFGYSLIIVIRSMASNTQGSTGEGESDNFTFSFKMFTSWDYLIGNSETADNKYASITTSFKESIVDEQESNKEENIHLTRFLRVLANFLIICCLCGSGYLIYFVVKRSQQFSKMQNVSWYERNEVEIVMSLLGMFCPPLFETIAALENYHPRTGLKWQLGRIFALFLGNLYTFLLALMDDVHLKLANEETIKNITHWTLFNYYNSSGWNESVPRPPLHPADVPRGSCWETAVGIEFMRLTVSDMLVTYITILLGDFLRACFVRFMNYCWCWDLEAGFVGHHFMDIPHKGISTIFFDTYSQMHSWAFHFFGSLMTVSAL

SEQ ID NO: 9060 - protein, 162 aa, Homo sapiens
MIWMGSFYAPGLVGINVLRLLTSMYFQCWAVMSSNVPHERVFKASRSNNFYMGLLLLVLFLSLLPVAYTIMSLPPSFDCGPFRCRVSVAREHLPSRGSLLRGPRPRIPVLVSCQPVKGHGTLGESPMPFKRVFCQDGNVRSFCVCAVHFSSHQPPVAVECLK

SEQ ID NO: 9061 - protein, 240 aa, Homo sapiens
MSRLLPLLRSRTARSLRPGPAAAAAPRPPSWCCCGRGLLALAPPGGLPGGPRRLGTHPKKEPMEALNTAQGARDFIYSLHSTERSCLLKELHRFESIAIAQEKLEAPPPTPGQLRYVFIHNAIPFIGFGFLDNAIMIVAGTHIEMSIGIILGISTMAAAALGNLVSDLAGLGLAGYVEALASRLGLSIPDLTPKQVDMWQTRLSTHLGKAVGVTIGCILGMFPLIFFGGGEEDEKLETKS

SEQ ID NO: 9062 - protein, 726 aa, Homo sapiens
MLLPRSVSSERAPGVPEPEELWEAEMERLRGSGTPVRGLPYAMMDKRLIWQLREPAGVQTLRWQRWQRRRQTVERRLREAAQRLARGLGLWEGALYEIGGLFGTGIRSYFTFLRFLLLLNLLSLLLTASFVLLPLVWLRPPDPGPTLNLTLQCPGSRQSPPGVLRFHNQLWHVLTGRAFTNTYLFYGAYRVGPESSSVYSIRLAYLLSPLACLLLCFCGTLRRMVKGLPQKTLLGQGYQAPLSAKVFSSWDFCIRVQEAATIKKHEISNEFKVELEEGRRFQLMQQQTRAQTACRLLSYLRVNVLNGLLVVGAISAIFWATKYSQDNKEESLFLLLQYLPPGVIALVNFLGPLLFTFLVQLENYPPNTEVNLTLIWCVVLKLASLGMFSVSLGQTILCIGRDKSSCESYGYNVCDYQCWENSVGEELYKLSIFNFLLTVAFAFLVTLPRRLLVDRFSGRFWAWLEREEFLVPKNVLDIVAGQTVTWMGLFYCPLLPLLNSVFLFLTFYIKKYTLLKNSRASSRPFRASSSTFFFQLVLLLGLLLAAVPLGYVVSSIHSSWDCGLFTNYSAPWQVVPELVALGLPPIGQRALHYLGSHAFSFPLLIMLSLVLTVCVSQTQANARAIHRLRKQLVWQVQEKWHLVEDLSRLLPEPGPSDSPGPKYPASQASRPQSFCPGCPCPGSPGHQAPRPGPSVVDAAGLRSPCPGQHGAPASARRFRFPSGAEL

SEQ ID NO: 9063 - protein, 503 aa, Homo sapiens
MVKGLPQKTLLGQGYQAPLSAKVFSSWDFCIRVQEAATIKKHEISNEFKVELEEGRRFQLMQQQTRAQTACRLLSYLRVNVLNGLLVVGAISAIFWATKYSQDNKEESLFLLLQYLPPGVIALVNFLGPLLFTFLVQLENYPPNTEVNLTLIWCVVLKLASLGMFSVSLGQTILCIGRDKSSCESYGYNVCDYQCWENSVGEELYKLSIFNFLLTVAFAFLVTLPRRLLVDRFSGRFWAWLEREEFLVPKNVLDIVAGQTVTWMGLFYCPLLPLLNSVFLFLTFYIKKYTLLKNSRASSRPFRASSSTFFFQLVLLLGLLLAAVPLGYVVSSIHSSWDCGLFTNYSAPWQVVPELVALGLPPIGQRALHYLGSHAFSFPLLIMLSLVLTVCVSQTQANARAIHRLRKQLVWQVQEKWHLVEDLSRLLPEPGPSDSPGPKYPASQASRPQSFCPGCPCPGSPGHQAPRPGPSVVDAAGLRSPCPGQHGAPASARRFRFPSGAEL

SEQ ID NO: 9064 - protein, 448 aa, Homo sapiens
MKSLSLLLAVALGLATAVSAGPAVIECWFVEDASGKGLAKRPGALLLRQGPGEPPPRPDLDPELYLSVHDPAGALQAAFRRYPRGAPAPHCEMSRFVPLPASAKWASGLTPAQNCPRALDGAWLMVSISSPVLSLSSLLRPQPEPQQEPVLITMATVVLTVLTHTPAPRVRLGQDALLDLSFAYMPPTSEAASSLAPGPPPFGLEWRRQHLGKGHLLLAATPGLNGQMPAAQEGAVAFAAWDDDEPWGPWTGNGTFWLPRVQPFQEGTYLATIHLPYLQGQVTLELAVYKPPKVSLMPATLARAAPGEAPPELLCLVSHFYPSGGLEVEWELRGGPGGRSQKAEGQRWLSALRHHSDGSVSLSGHLQPPPVTTEQHGARYACRIHHPSLPASGRSAEVTLEVAGLSGPSLEDSVGLFLSAFLLLGLFKALGWAAVYLSTCKDSKKKAE

SEQ ID NO: 9065 - protein, 412 aa, Homo sapiens [sequence omitted]

SEQ ID NO: 9066 - protein, 504 aa, Homo sapiens [sequence omitted]

SEQ ID NO: 9067 - protein, 361 aa, Homo sapiens [sequence omitted]

SEQ ID NO: 9068 - protein, 295 aa, Homo sapiens
MYRISQLMSTPVASSSRLEREYAGELSPTCIFPSFTCDSLDGYHSFECGSIDPLTGSHYTCRRSPRLLTNGYYIWTEDSFLCDKDGNITLNPSQTSVMYKENLVRIFRKKKRICHSFSSLFNLSTSKSWLHGSIFGDINSSPSEDNWLKGTRRLDTDHCNGNADDLDCSSLTDDWESGKMNAESVITSSSSHIISQPPGGNSHSLSLQSQLTASERFQENSSDHSETRLLQEVFFQAILLAVCLIISACARWFMGEILASVFTCSLMITVAYVKSLFLSLASYFKTTACARFVKI

SEQ ID NO: 9069 - protein, 276 aa, Homo sapiens
MYRISQLMSTPVASSSRLEREYAGELSPTCIFPSFTCDSLDGYHSFECGSIDPLTGSHYTCRRSPRLLTNGYYIWTEDSFLCDKDGNITLNPSQTSVMYKENLVSTSKSWLHGSIFGDINSSPSEDNWLKGTRRLDTDHCNGNADDLDCSSLTDDWESGKMNAESVITSSSSHIISQPPGGNSHSLSLQSQLTASERFQENSSDHSETRLLQEVFFQAILLAVCLIISACARWFMGEILASVFTCSLMITVAYVKSLFLSLASYFKTTACARFVKI

SEQ ID NO: 9070 - protein, 232 aa, Homo sapiens
MYRISQLMSTPVASSSRLEREYAGELSPTCIFPSFTCDSLDGYHSFECGSIDPLTGSHYTCRRSPRLLTNGYYIWTEDSFLCDKDGNITLNPSQTSVMYKENLVRIFRKKKRICHSFSSLFNLSTSKSWLHGSIFGDINSSPSEDNWLKGTRRLDTDHCNGNETRLLQEVFFQAILLAVCLIISACARWFMGEILASVFTCSLMITVAYVKSLFLSLASYFKTTACARFVKI

SEQ ID NO: 9071 - protein, 344 aa, Homo sapiens
MASGVGAAFEELPHDGTCDECEPDEAPGAEEVCRECGFCYCRRHAEAHRQKFLSHHLAEYVHGSQAWTPPADGEGAGKEEAEVKVEQEREIESEAGEESESEEESESEEESETEEESEDESDEESEEDSEEEMEDEQESEAEEDNQEEGESEAEGETEAESEFDPEIEMEAERVAKRKCPDHGLDLSTYCQEDRQLICVLCPVIGAHQGHQLSTLDEAFEELRSKDSGGLKAAMIELVERLKFKSSDPKVTRDQMKMFIQQEFKKVQKVIADEEQKALHLVDIQEAMATAHVTEILADIQSHMDRLMTQMAQAKEQLDTSNESAEPKAEGDEEGPSGASEEEDT

SEQ ID NO: 9072 - protein, 324 aa, Homo sapiens
MIDKNQTCGVGQDSVPYMICLIHILEEWFGVEQLEDYLNFANYLLWVFTPLILLILPYFTIFLLYLTIIFLHIYKRKNVLKEAYSHNLWDGARKTVATLWDGHAAVWHGYEVHGMEKIPEDGPALIIFYHGAIPIDFYYFMAKIFIHKGRTCRVVADHFVFKIPGFSLLLDVFCALHGPREKCVEILRSGHLLAISPGGVREALISDETYNIVWGHRRGFAQVAIDAKVPIIPMFTQNIREGFRSLGGTRLFRWLYEKFRYPFAPMYGGFPVKLRTYLGDPIPYDPQITAEELAEKTKNAVQALIDKHQRIPGNIMSALLERFH

SEQ ID NO: 9073 - protein, 257 aa, Homo sapiens
MIDKNQTCGVGQDSVPYMICLIHILEEWFGVEQLEDYLNFANYLLWVFTPLILLILPYFTIFLLYLTIIFLHIYKRKNVLKEAYSHNLWDGARKTVATLWDGHAAVWHGYEVHGMEKIPEDGPALIIFYHGAIPIDFYYFMAKIFIHKGRTCRVVADHFVFKIPGFSLLLDVFCALHGPREKCVEILRSGHLLAISPGGVREALISDETYNIVWGHRRGFAQVAIDAKVTKNAVQALIDKHQRIPGNIMSALLERFH

SEQ ID NO: 9074 - protein, 135 aa, Homo sapiens
MIDKNQTCGVGQDSVPYMICLIHILEEWFGVEQLEDYLNFANYLLWVFTPLILLILPYFTIFLLYLTIIFLHIYKRKNVLKEAYSHNLWDGARKTVATLWDGHAAVWHGKQGYFHLCVAIHVCCIGTVLPFHFID

SEQ ID NO: 9075 - protein, 275 aa, Homo sapiens
MQLQVFWTGLEYTCRLLGITTAAVLIGVGTETFLQGQFKSLAFYLLFTGAAVSICEGAYFVAQLLAICFQCQPGSLADRVREKAHWLGCFQKFLAYLLLSVACFLHPVLVWHVTIPGSMLIITGLAYFLLSKRKKRKAAPEVLASPEQYTDPSSSAVSTTGSGDTEQTYTFHGALKEGPSSLFIHMKSILKGTKKPSALQPPNTLMELSLEPADSLAKKKQVHFEDNLVRIVPSLAEGLDDGDSEPEETTSDTTPIIPPPQAPLFLSSLTATGLF

SEQ ID NO: 9076 - protein, 157 aa, Homo sapiens
MLIITGLAYFLLSKRKKRKAAPEVLASPEQYTDPSSSAVSTTGSGDTEQTYTFHGALKEGPSSLFIHMKSILKGTKKPSALQPPNTLMELSLEPADSLAKKKQVHFEDNLVRIVPSLAEGLDDGDSEPEETTSDTTPIIPPPQAPLFLSSLTATGLF

SEQ ID NO: 9077 - protein, 580 aa, Homo sapiens
MESQCDYSMYFPAVPLPPRAELAGDPGRYRALPRRNHLYLGETVRFLLVLRCRGGAGSGTGGGPGLGSRGAWAELATALAALASVSAGGGMPGGGGAGDQDSEPPGGGDPGGGGLFRGCSPLLTHGPGPATSGGATTLPVEEPIVSTDEVIFPLTVSLDRLPPGTPKAKIVVTVWKREIEAPEVRDQGYLRLLQTRSPGETFRGEQSAFKAQVSTLLTLLPPPVLRCRQFTVAGKHLTVLKVLNSSSQEEISIWDIRILPNFNASYLPVMPDGSVLLVDNVCHQSGEVSMGSFCRLPGTSGCFPCPLNALEEHNFLFQLRGGEQPPPGAKEGLEVPLIAVVQWSTPKLPFTQSIYTHYRLPSVRLDRPCFVMTASCKSPVRTYERFTVTYTLLNNLQDFLAVRLVWTPEHAQAGKQLCEEERRAMQAALDSVVCHTPLNNLGFSRKGSALTFSVAFQALRTGLFELSQHMKLKLQFTASVSHPPPEARPLSRKSSPSSPAVRDLVERHQASLGRSQSFSHQQPSRSHLMRSGSVMERRAITPPVASPVGRPLYLPPDKAVLSLDKIAKRECKVLVVEPVK

SEQ ID NO: 9078 - protein, 199 aa, Homo sapiens
MHRLSGFENQMRLCWRRPCGNEERCSVCWSLFLPPGKQLCEEERRAMQAALDSVVCHTPLNNLGFSRKGSALTFSVAFQALRTGLFEHMKLKLQFTASVSHPPPEARPLSRKSSPSSPAVRDLVERHQASLGRSQSFSHQQPSRSHLMRSGSVMERRAITPPVASPVGRPLYLPPDKAVLSLDKIAKRECKVLVVEPVK

SEQ ID NO: 9079 - protein, 206 aa, Homo sapiens
MHRLFTPQSGFENQMRLCWRRPCGNEERCSVCWSLFLPPGKQLCEEERRAMQAALDSVVCHTPLNNLGFSRKGSALTFSVAFQALRTGLFELSQHMKLKLQFTASVSHPPPEARPLSRKSSPSSPAVRDLVERHQASLGRSQSFSHQQPSRSHLMRSGSVMERRAITPPVASPVGRPLYLPPDKAVLSLDKIAKRECKVLVVEPVK

SEQ ID NO: 9080 - protein, 351 aa, Homo sapiens
MALPFQKELEKYKNIDEDELLGKLSEEELKQLENVLDDLDPESAMLPAGFRQKDQTQKAATGPFDREHLLMYLEKEALEQKDREDFVPFTGEKKGRVFIPKEKPIETRKEEKVTLDPELEEALASASDTELYDLAAVLGVHNLLNNPKFDEETANNKGGKGPVRNVVKGEKVKPVFEEPPNPTNVEISLQQMKANDPSLQEVNLNNIKNIPIPTLREFAKALETNTHVKKFSLAATRSNDPVAIAFADMLKVNKTLTSLNIESNFITGTGILALVEALKENDTLTEIKIDNQRQQLGTAVEMEIAQMLEENSRILKFGYQFTKQGPRTRVAAAITKNNDLVRKKRVEADRR

SEQ ID NO: 9081 - protein, 315 aa, Homo sapiens
MALPFQKELEKYKNIDEDELLGKLSEEELKQLENVLDDLDPESAMLPAGFRQKDQTQKAATGPFDREHLLMYLEKEALEQKDREDFVPFTGEKKGRVFIPKEKPIETRKEEKVTLDPELEEALASASDTELYDLAAVLGVHNLLNNPKFDEETANNKGGKGPVRNVVKGEKVKPVFEEPPNPTNVEISLQQMKANDPSLQEVNLNNIKAFADMLKVNKTLTSLNIESNFITGTGILALVEALKENDTLTEIKIDNQRQQLGTAVEMEIAQMLEENSRILKFGYQFTKQGPRTRVAAAITKNNDLVRKKRVEADRR

SEQ ID NO: 9082 - protein, 862 aa, Homo sapiens
MKTVLMVAEKPSLAQSIAKILSRGSLSSHKGLNGACSVHEYTGTFAGQPVRFKMTSVCGHVMTLDFLGKYNKWDKVDPAELFSQAPTEKKEANPKLNMVKFLQVEGRGCDYIVLWLDCDKEGENICFEVLDAVLPVMNKAHGGEKTVFRARFSSITDTDICNAMACLGEPDHNEALSVDARQELDLRIGCAFTRFQTKYFQGKYGDLDSSLISFGPCQTPTLGFCVERHDKIQSFKPETYWVLQAKVNTDKDRSLLLDWDRVRVFDREIAQMFLNMTKLEKEAQVEATSRKEKAKQRPLALNTVEMLRVASSSLGMGPQHAMQTAERLYTQGYISYPRTETTHYPENFDLKGSLRQQANHPYWADTVKRLLAEGINRPRKGHDAGDHPPITPMKSATEAELGGDAWRLYEYITRHFIATVSHDCKYLQSTISFRIGPELFTCSGKTVLSPGFTEVMPWQSVPLEESLPTCQRGDAFPVGEVKMLEKQTNPPDYLTEAELITLMEKHGIGTDASIPVHINNICQRNYVTVESGRRLKPTNLGIVLVHGYYKIDAELVLPTIRSAVEKQLNLIAQGKADYRQVLGHTLDVFKRKFHYFVDSIAGMDELMEVSFSPLAATGKPLSRCGKCHRFMKYIQAKPSRLHCSHCDETYTLPQNGTIKLYKELRCPLDDFELVLWSSGSRGKSYPLCPYCYNHPPFRDMKKGMGCNECTHPSCQHSLSMLGIGQCVECESGVLVLDPTSGPKWKVACNKCNVVAHCFENAHRVRVSADTCSVCEAALLDVDFNKAKSPLPGDETQHMGCVFCDPVFQELVELKHAASCHPMHRGGPGRRQGRGRGRARRPPGKPNPRRPKDKMSALAAYFV

SEQ ID NO: 9083 - protein, 730 aa, Homo sapiens
MKTVLMVAEKPSLAQSIAKILSRGSLSSHKGLNGACSVHEYTGTFAGQPVRFKMTSVCGHVMTLDFLGKYNKWDKVDPAELFSQAPTEKKEANPKLNMVKFLQVEGRGCDYIVLWLDCDKEGENICFEVLDAVLPVMNKAHGGEKTVFRARFSSITDTDICNAMACLGEPDHNEALSVDARQELDLRIGCAFTRFQTKYFQGKYGDLDSSLISFGPCQTPTLGFCVERHDKIQSFKPETYWVLQAKVNTDKDRSLLLDWDRVRVFDREIAQMFLNMTKLEKEAQVEATSRKEKAKQRPLALNTVEMLRVASSSLGMGPQHAMQTAERLYTQGYISYPRTETTHYPENFDLKGSLRQQANHPYWADTVKRLLAEGINRPRKGHDAGDHPPITPMKSATEAELGGDAWRLYEYITRHFIATVSHDCKYLQSTISFRIGPELFTCSGKTVLSPGFTEVMPWQSVPLEESLPTCQRGDAFPVGEVKMLEKQTNPPDYLTEAELITLMEKHGIGTDASIPVHINNICQRNYVTVESGRRLKPTNLGIVLVHGYYKIDAELVLPTIRSAVEKQLNLIAQGKADYRQVLGHTLDVFKRKFHYFVDSIAGMDELMEVSFSPLAATGKPLSRCGKCHRFMKYIQAKPSRLHCSHCDETYTLPQNGTIKLYKELRCPLDDFELVLWSSGSRGKSYPLCPYCYNHPPFRDMKKGECSHSLLSTGSCSLFSVPTPALHQAGL

SEQ ID NO: 9084 - protein, 707 aa, Homo sapiens
MKTVLMVAEKPSLAQSIAKILSRGSLSSHKGLNGACSVHEYTGTFAGQPVRFKMTSVCGHVMTLDFLGKYNKWDKVDPAELFSQAPTEKKEANPKLNMVKFLQVEGRGCDYIVLWLDCDKEGENICFEVLDAVLPVMNKAHGGEKTVFRARFSSITDTDICNAMACLGEPDHNEALSVDARQELDLRIGCAFTRFQTKYFQGKYGDLDSSLISFGPCQTPTLGFCVERHDKIQSFKPETYWVLQAKVNTDKDRSLLLDWDRVRVFDREIAQMFLNMTKLEKEAQVEATSRKEKAKQRPLALNTVEMLRVASSSLGMGPQHAMQTAERLYTQGYISYPRTETTHYPENFDLKGSLRQQANHPYWADTVKRLLAEGINRPRKGHDAGDHPPITPMKSATEAELGGDAWRLYEYITRHFIATVSHDCKYLQSTISFRIGPELFTCSGKTVLSPGFTEVMPWQSVPLEESLPTCQRGDAFPVGEVKMLEKQTNPPDYLTEAELITLMEKHGIGTDASIPVHINNICQRNYVTVESGRRLKPTNLGIVLVHGYYKIDAELVLPTIRSAVEKQLNLIAQGKADYRQVLGHTLDVFKRKFHYFVDSIAGMDELMEVSFSPLAATGKPLSRCGKCHRFMKYIQAKPSRLHCSHCDETYTLPQNGTIKLYKELRCPLDDFELVLWSSGSRGKSYPLCPYCYNHPPFRDMKKVVPCV

SEQ ID NO: 9085 - protein, 140 aa, Homo sapiens
MPHARTETSVGTYESHSTSELEDLTEPEQRELKTKLTKLEAEIVTLRHVLAAKERRCGELKRKLGLTALVGLRQNLSKSWLDVQVSNTYVKQKTSAALSTMGTLICRKLGGVKKSATFRSFEGLMGTIKSKVSGGKRAWP

SEQ ID NO: 9086 - protein, 136 aa, Homo sapiens
MPHARTETSVGTYESHSTSELEDLTEPEQRELKTKLTKLEAEIVTLRHVLAAKERRCGELKRKLGLTALVGLRQNLSKSWLDVQVSNTYVKQKTSAALSTMGTLICRKLGGVKKSATFRSFEGLIFNKYTLNQGRN

SEQ ID NO: 9087 - protein, 132 aa, Homo sapiens
MPHARTETSVGTYESHSTSELEDLTEPEQRELKTKLTKLEAEIVTLRHVLAAKERRCGELKRKLGLTALVGLRQNLSKSWLDVQVSNTYVKQKTSAALSTMGTLICRKLGGVKKSATFRSFEGNPKGEGSRI

SEQ ID NO: 9088 - protein, 145 aa, Homo sapiens
MVGRNSAIAAGVCGALFIGYCIYFDRKRRSDPNFKNRLRERRKKQKLAKERAGLSKLPDLKDAEAVQKFFLEEIQLGEELLAQGEYEKGVDHLTNAIAVCGQPQQLLQVLQQTLPPPVFQMLLTKLPTISQRIVSAQSLAEDDVE

SEQ ID NO: 9089 - protein, 20 aa, Homo sapiens
YGGSQGNLIFGKGTKLSVKP

SEQ ID NO: 9090 - protein, 316 aa, Homo sapiens
MALYELFSHPVERSYRAGLCSKAALFLLLAAALTYIPPLLVAFRSHGFWLKRSSYEEQPTVRFQHQVLLVALLGPESDGFLAWSTFPAFNRLQGDRLRVPLVSTREEDRNQDGKTDMLHFKLELPLQSTEHVLGVQLILTFSYRLHRMATLVMQSMAFLQSSFPVPGSQLYVNGDLRLQQKQPLSCGGLDARYNISVINGTSPFAYDYDLTHIVAAYQERNVTTVLNDPNPIWLVGRAADAPFVINAIIRYPVEVISYQPGFWEMVKFAWVQYVSILLIFLWVFERIKIFVFQNQVVTTIPVTVTPRGDLCKEHLS

SEQ ID NO: 9091 - protein, 345 aa, Homo sapiens
MSSSLTRSSAVTARGSAPKPRCSCCWPLRSRTSRRCWWPSGATVSLPRPLCHEAPRARSARAGLPNRLPTALFNSGFWLKRSSYEEQPTVRFQHQVLLVALLGPESDGFLAWSTFPAFNRLQGDRLRVPLVSTREEDRNQDGKTDMLHFKLELPLQSTEHVLGVQLILTFSYRLHRMATLVMQSMAFLQSSFPVPGSQLYVNGDLRLQQKQPLSCGGLDARYNISVINGTSPFAYDYDLTHIVAAYQERNVTTVLNDPNPIWLVGRAADAPFVINAIIRYPVEVISYQPGFWEMVKFAWVQYVSILLIFLWVFERIKIFVFQNQVVTTIPVTVTPRGDLCKEHLS

SEQ ID NO: 9092 - protein, 200 aa, Homo sapiens
MLHFKLELPLQSTEHVLGVQLILTFSYRLHRMATLVMQSMAFLQSSFPVPGSQLYVNGDLRLQQKQPLSCGGLDARYNISVINGTSPFAYDYDLTHIVAAYQERNVTTVLNDPNPIWLVGRAADAPFVINAIIRYPVEVISYQPGFWEMVKFAWVQYVSILLIFLWVFERIKIFVFQNQVVTTIPVTVTPRGDLCKEHLS

SEQ ID NO: 9093 - protein, 129 aa, Homo sapiens
MKILVALAVFFLVSTQLFAEEIGANDDLNYWSDWYDSDQIKEELPEPFEHLLQRIARRPKPQQFFGLMGKRDADSSIEKQVALLKALYGHGQISHKRHKTDSFVGLMGKRALNSVAYERSAMQNYERRR

SEQ ID NO: 9094 - protein, 111 aa, Homo sapiens
MKILVALAVFFLVSTQLFAEEIGANDDLNYWSDWYDSDQIKEELPEPFEHLLQRIARRPKPQQFFGLMGKRDADSSIEKQVALLKALYGHGQISHKMAYERSAMQNYERRR

SEQ ID NO: 9095 - protein, 114 aa, Homo sapiens
MKILVALAVFFLVSTQLFAEEIGANDDLNYWSDWYDSDQIKEELPEPFEHLLQRIARRPKPQQFFGLMGKRDAGHGQISHKRHKTDSFVGLMGKRALNSVAYERSAMQNYERRR

SEQ ID NO: 9096 - protein, 96 aa, Homo sapiens
MKILVALAVFFLVSTQLFAEEIGANDDLNYWSDWYDSDQIKEELPEPFEHLLQRIARRPKPQQFFGLMGKRDAGHGQISHKMAYERSAMQNYERRR

SEQ ID NO: 9097 - protein, 348 aa, Homo sapiens
MRLGLLSVALLFVGSSHLYSDHYSPSGRHRLGPSPEPAASSQQAEAVRKRLRRRREGGAHAEDCGTAPLKDVLQGSRIIGGTEAQAGAWPWVVSLQIKYGRVLVHVCGGTLVRERWVLTAAHCTKDASDPLMWTAVIGTNNIHGRYPHTKKIKIKAIIIHPNFILESYVNDIALFHLKKAVRYNDYIQPICLPFDVFQILDGNTKCFISGWGRTKEEGNATNILQDAEVHYISREMCNSERSYGGIIPNTSFCAGDEDGAFDTCRGDSGGPLMCYLPEYKRFFVMGITSYGHGCGRRGFPGVYIGPSFYQKWLTEHFFHASTQGILTINILRGQILIALCFVILLATT

SEQ ID NO: 9098 - protein, 128 aa, Homo sapiens
MALQVRVAPSKVVLQKFLLCVILFYTVYYVSLSMGCVMFEVHELNVLAPFDFKTNPSWLNINYKVLLVSTEVTYFVCGLFFVPVVEEWVWDYAISVTILHVAITSTVMLEFPLTSHWWAALGISKLLV

SEQ ID NO: 9099 - protein, 490 aa, Homo sapiens
MQPAMMMFSSKYWARRGFSLDSAVPEEHQLLGSSTLNKPNSGKNDDKGNKGSSKREAATESGKTAVVFSLKNEVGGLVKALRLFQEKRVNMVHIESRKSRRRSSEVEIFVDCECGKTEFNELIQLLKFQTTIVTLNPPENIWTEEEELEDVPWFPRKISELDKCSHRVLMYGSELDADHPGFKDNVYRQRRKYFVDVAMGYKYGQPIPRVEYTEEETKTWGVVFRELSKLYPTHACREYLKNFPLLTKYCGYREDNVPQLEDVSMFLKERSGFTVRPVAGYLSPRDFLAGLAYRVFHCTQYIRHGSDPLYTPEPDTCHELLGHVPLLADPKFAQFSQEIGLASLGASDEDVQKLATCYFFTIEFGLCKQEGQLRAYGAGLLSSIGELKHALSDKACVKAFDPKTTCLQECLITTFQEAYFVSESFEEAKEKMRDFAKSITRPFSVYFNPYTQSIEILKDTRSIENVVQDLRSDLNTVCDALNKMNQYLGI

SEQ ID NO: 9100 - protein, 492 aa, Homo sapiens
MQPAMMMFSSKYWARRGFSLDSAVPEEHQLLGSSTLNKPNSGKNDDKGNKGSSKREAATESGKTAVVFSLKNEVGGLVKALRLFQEKRVNMVHIESRKSRRRSSEVEIFVDCECGKTEFNELIQLLKFQTTIVTLNPPENIWTEEEGKELEDVPWFPRKISELDKCSHRVLMYGSELDADHPGFKDNVYRQRRKYFVDVAMGYKYGQPIPRVEYTEEETKTWGVVFRELSKLYPTHACREYLKNFPLLTKYCGYREDNVPQLEDVSMFLKERSGFTVRPVAGYLSPRDFLAGLAYRVFHCTQYIRHGSDPLYTPEPDTCHELLGHVPLLADPKFAQFSQEIGLASLGASDEDVQKLATCYFFTIEFGLCKQEGQLRAYGAGLLSSIGELKHALSDKACVKAFDPKTTCLQECLITTFQEAYFVSESFEEAKEKMRDFAKSITRPFSVYFNPYTQSIEILKDTRSIENVVQDLRSDLNTVCDALNKMNQYLGI

SEQ ID NO: 9101 - protein, 123 aa, Homo sapiens
MATAAGATYFQRGSLFWFTVITLSFGYYTWVVFWPQSIPYQNLGPLGPFTQYLVDHHHTLLCNGYWLAWLIHVGESLYAIVLCKHKGITSGRAQLLWFLQTFFFGIASLTILIAYKRKRQKQT

SEQ ID NO: 9102 - protein, 84 aa, Homo sapiens
MATAAGATYFQRGSLFWFTVITLSFGYYTWVVFWPQSIPYQNLGPLGPFTQYLVDHHHTLLCNGYWLAWLIHVGESLYAIVLCK

SEQ ID NO: 9103 - protein, 103 aa, Homo sapiens
MATAAGATYFQRGSLFWFTVITLSFGYYTWVVFWPQSIPYQNLGPLGPFTQYLVDHHHTLLCNGYWLAWLIHVGESLYAIVLCKQNELRIRIKMRKLILRDSE

SEQ ID NO: 9104 - protein, 141 aa, Homo sapiens
METAGAATGQPASGLEAPGSTNDRLFLVKGGIFLGTVAAAGMLAGFITTLSLAKKKSPEWFNKGSMATAALPESGSSLALRALGWGSLYAWCGVGVISFAVWKALGVHSMNDFRSKMQSIFPTIPKNSESAVEWEETLKSK

SEQ ID NO: 9105 - protein, 74 aa, Homo sapiens
MASSTVPVSAAGSANETPEIPDNVGDWLRGVYRFATDRNDFRRNLILNLGLFAAGVWLARNLSDIDLMAPQPGV

SEQ ID NO: 9106 - protein, 296 aa, Homo sapiens
MCVRRSLVGLTFCTCYLASYLTNKYVLSVLKFTYPTLFQGWQTLIGGLLLHVSWKLGWVEINSSSRSHVLVWLPASVLFVGIIYAGSRALSRLAIPVFLTLHNVAEVIICGYQKCFQKEKTSPAKICSALLLLAAAGCLPFNDSQFNPDGYFWAIIHLLCVGAYKILQKSQKPSALSDIDQQYLNYIFSVVLLAFASHPTGDLFSVLDFPFLYFYRFHGSCCASGFLGFFLMFSTVKLKNLLAPGQCAAWIFFAKIITAGLSILLFDAILTSATTGCLLLGALGEALLVFSERKSS

SEQ ID NO: 9107 - protein, 159 aa, Homo sapiens
MCVRRSLVGLTFCTCYLASYLTNKYVLSVLKFTYPTLFQGWQTLIGGLLLHVSWKLGWVEINSSSRSHVLVWLPASVLFVGIIYAGSRALSRLAIPVFLTLHNVAEVIICGYQKCFQKEKTSPAKICSALLLLAAAGCLPFNDSQGLIKFYRSPRNPVH

SEQ ID NO: 9108 - protein, 123 aa, Homo sapiens
MCVRRSLVGLTFCTCYLASYLTNKYVLSVLKFTYPTLFQGSHVLVWLPASVLFVGIIYAGSRALSRLAIPVFLTLHNVAEVIICGYQKCFQKEKTSPAKICRLHLERTRQNQTSRLSSCLKGD

SEQ ID NO: 9109 - protein, 586 aa, Homo sapiens
MERDSHGNASPARTPSAGASPAQASPAGTPPGRASPAQASPAQASPAGTPPGRASPAQASPAGTPPGRASPGRASPAQASPAQASPARASPALASLSRSSSGRSSSARSASVTTSPTRVYLVRATPVGAVPIRSSPARSAPATRATRESPGTSLPKFTWREGQKQLPLIGCVLLLIALVVSLIILFQFWQGHTGIRYKEQRESCPKHAVRCDGVVDCKLKSDELGCVRFDWDKSLLKIYSGSSHQWLPICSSNWNDSYSEKTCQQLGFESAHRTTEVAHRDFANSFSILRYNSTIQESLHRSECPSQRYISLQCSHCGLRAMTGRIVGGALASDSKWPWQVSLHFGTTHICGGTLIDAQWVLTAAHCFFVTREKVLEGWKVYAGTSNLHQLPEAASIAEIIINSNYTDEEDDYDIALMRLSKPLTLSAHIHPACLPMHGQTFSLNETCWITGFGKTRETDDKTSPFLREVQVNLIDFKKCNDYLVYDSYLTPRMMCAGDLRGGRDSCQGDSGGPLVCEQNNRWYLAGVTSWGTGCGQRNKPGVYTKVTEVLPWIYSKMEVRSLQQDTAPSRLGTSSGGDPGGAPRL

SEQ ID NO: 9110 - protein, 563 aa, Homo sapiens
MERDSHGNASPARTPSAGASPAQASPAGTPPGRASPAQASPAQASPAGTPPGRASPAQASPAGTPPGRASPGRASPAQASPAQASPARASPALASLSRSSSGRSSSARSASVTTSPTRVYLVRATPVGAVPIRSSPARSAPATRATRESPGTSLPKFTWREGQKQLPLIGCVLLLIALVVSLIILFQFWQGHTGIRYKEQRESCPKHAVRCDGVVDCKLKSDELGCVRFDWDKSLLKIYSGSSHQWLPICSSNWNDSYSEKTCQQLGFESAHRTTEVAHRDFANSFSILRYNSTIQESLHRSECPSQRYISLQCSHCGLRAMTGRIVGGALASDSKWPWQVSLHFGTTHICGGTLIDAQWVLTAAHCFFVTREKVLEGWKVYAGTSNLHQLPEAASIAEIIINSNYTDEEDDYDIALMRLSKPLTLSAHIHPACLPMHGQTFSLNETCWITGFGKTRETDDKTSPFLREVQVNLIDFKKCNDYLVYDSYLTPRMMCAGDLRGGRDSCQGDSGGPLVCEQNNRWYLAGVTSWGTGCGQRNKPGVYTKVTEVLPWIYSKMESSAG

SEQ ID NO: 9111 - protein, 532 aa, Homo sapiens
MERDSHGNASPARTPSAGASPAQASPAGTPPGRASPAQASPAQASPAGTPPGRASPAQASPAGTPPGRASPGRASPAQASPAQASPARASPALASLSRSSSGRSSSARSASVTTSPTRVYLVRATPVGAVPIRSSPARSAPATRATRESPVQFWQGHTGIRYKEQRESCPKHAVRCDGVVDCKLKSDELGCVRFDWDKSLLKIYSGSSHQWLPICSSNWNDSYSEKTCQQLGFESAHRTTEVAHRDFANSFSILRYNSTIQESLHRSECPSQRYISLQCSHCGLRAMTGRIVGGALASDSKWPWQVSLHFGTTHICGGTLIDAQWVLTAAHCFFVTREKVLEGWKVYAGTSNLHQLPEAASIAEIIINSNYTDEEDDYDIALMRLSKPLTLSAHIHPACLPMHGQTFSLNETCWITGFGKTRETDDKTSPFLREVQVNLIDFKKCNDYLVYDSYLTPRMMCAGDLRGGRDSCQGDSGGPLVCEQNNRWYLAGVTSWGTGCGQRNKPGVYTKVTEVLPWIYSKMESEVRFRKS

SEQ ID NO: 9112 - protein, 491 aa, Homo sapiens
MERDSHGNASPARTPSAGASPAQASPAGTPPGRASPAQASPAQASPAGTPPGRASPAQASPAGTPPGRASPGRASPAQASPAQASPARASPALASLSRSSSGRSSSARSASVTTSPTRVYLVRATPVGAVPIRSSPARSAPATRATRESPGTSLPKFTWREGQKQLPLIGCVLLLIALVVSLIILFQFWQGHTGIRYKEQRESCPKHAVRCDGVVDCKLKSDELGCVRFDWDKSLLKIYSGSSHQWLPICSSNWNDSYSEKTCQQLGFESAHRTTEVAHRDFANSFSILRYNSTIQESLHRSECPSQRYISLQCSHCGLRAMTGRIVGGALASDSKWPWQVSLHFGTTHICGGTLIDAQWVLTAAHCFFVTREKVLEGWKVYAGTSNLHQLPEAASIAEIIINSNYTDEEDDYDIALMRLSKPLTLSGEGICTPRSPAPQPQHPLQPSHLSASVNSYPGPKASAGQKSKTLKDPYMEHFCFIIRETEAQGL

SEQ ID NO: 9113 - protein, 567 aa, Homo sapiens
MERDSHGNASPARTPSAGASPAQASPAGTPPGRASPAQASPAQASPAGTPPGRASPAQASPAGTPPGRASPGRASPAQASPAQASPARASPALASLSRSSSGRSSSARSASVTTSPTRVYLVRATPVGAVPIRSSPARSAPATRATRESPGTSLPKFTWREGQKQLPLIGCVLLLIALVVSLIILFQFWQGHTGIRYKEQRESCPKHAVRCDGVVDCKLKSDELGCVRFDWDKSLLKIYSGSSHQWLPICSSNWNDSYSEKTCQQLGFESAHRTTEVAHRDFANSFSILRYNSTIQESLHRSECPSQRYISLQCSHCGLRAMTGRIVGGALASDSKWPWQVSLHFGTTHICGGTLIDAQWVLTAAHCFFVTREKVLEGWKVYAGTSNLHQLPEAASIAEIIINSNYTDEEDDYDIALMRLSKPLTLSAHIHPACLPMHGQTFSLNETCWITGFGKTRETDDKTSPFLREVQVNLIDFKKCNDYLVYDSYLTPRMMCAGDLRGGRDSCQGDSGGPLVCEQNNRWYLAGVTSWGTGCGQRNKPGVYTKVTEVLPWIYSKMESEVRFRKS

SEQ ID NO: 9114 - protein, 526 aa, Homo sapiens; identical to SEQ ID NO: 190

SEQ ID NO: 9115 - protein, 531 aa, Homo sapiens
MAVAPSFNMTNPQPAIEGGISEVEIISQQVDEETKSIAPVQLVNFAYRDLPLAAVDLSTAGSQLLSNLDEDYQREGSNWLKPCCGKRAAVWQVFLLSASLNSFLVACVILVVILLTLELLIDIKLLQFSSAFQFAGVIHWISLVILSVFFSETVLRIVVLGIWDYIENKIEVFDGAVIILSLAPMVASTVANGPRSPWDAISLIIMLRIWRVKRVIDAYVLPVKLEMEMVIQQYEKAKVIQDEQLERLTQICQEQGFEIRQLRAHLAQQDLDLAAEREAALQAPHVLSQPRSRFKVLEAGTWDEETAAESVVEELQPSQEATMKDDMNSYISQYYNGPSSDSGVPEPAVCMVTTAAIDIHQPNISSDLFSLDMPLKLGGNGTSATSESASRSSVTRAQSDSSQTLGSSMDCSTAREEPSSEPGPSPPPLPSQQQVEEATVQDLLSSLSEDPCPSQKALDPAPLARPSPAGSAQTSPELEHRVSLFNQKNQEGFTVFQIRPVIHFQPTVPMLEDKFRSLESKEQKLHRVPEA

SEQ ID NO: 9116 - protein, 495 aa, Homo sapiens
MAVAPSFNMTNPQPAIEGGISEVEIISQQVDEETKSIAPVQLVNFAYRDLPLAAVDLSTAGSQLLSNLDEDYQREGSNWLKPCCGKRAAVWQSSAFQFAGVIHWISLVILSVFFSETVLRIVVLGIWDYIENKIEVFDGAVIILSLAPMVASTVANGPRSPWDAISLIIMLRIWRVKRVIDAYVLPVKLEMEMVIQQYEKAKVIQDEQLERLTQICQEQGFEIRQLRAHLAQQDLDLAAEREAALQAPHVLSQPRSRFKVLEAGTWDEETAAESVVEELQPSQEATMKDDMNSYISQYYNGPSSDSGVPEPAVCMVTTAAIDIHQPNISSDLFSLDMPLKLGGNGTSATSESASRSSVTRAQSDSSQTLGSSMDCSTAREEPSSEPGPSPPPLPSQQQVEEATVQDLLSSLSEDPCPSQKALDPAPLARPSPAGSAQTSPELEHRVSLFNQKNQEGFTVFQIRPVIHFQPTVPMLEDKFRSLESKEQKLHRVPEA

SEQ ID NO: 9117 - protein, 248 aa, Homo sapiens
MICTFLRAVQYTEKLHRSSAKRLLLPYIVLNKACLKTEPSLRCGLQYQKKTLRPRCILGVTQKTIWTQGPSPRKAKEDGSKQVSVHRSQRGGTAVPTSQKVKEAGRDFTYLIVVLFGISITGGLFYTIFKELFSSSSPSKIYGRALEKCRSHPEVIGVFGESVKGYGEVTRRGRRQHVRFTEYVKDGLKHTCVKFYIEGSEPGKQGTVYAQVKENPGSGEYDFRYIFVEIESYPRRTIIIEDNRSQDD

SEQ ID NO: 9118 - protein, 649 aa, Homo sapiens
  MOD_RES (648)..(648): Selenocysteine
MGCAEGKAVAAAAPTELQTKGKNGDGRRRSAKDHHPGKTLPENPAGFTSTATADSRALLQAYIDGHSVVIFSRSTCTRCTEVKKLFKSLCVPYFVLELDQTEDGRALEGTLSELAAETDLPVVFVKQRKIGGHGPTLKAYQEGRLQKLLKMNGPEDLPKSYDYDLIIIGGGSGGLAAAKEAAQYGKKVMVLDFVTPTPLGTRWGLGGTCVNVGCIPKKLMHQAALLGQALQDSRNYGWKVEETVKHDWDRMIEAVQNHIGSLNWGYRVALREKKVVYENAYGQFIGPHRIKATNNKGKEKIYSAERFLIATGERPRYLGIPGDKEYCISSDDLFSLPYCPGKTLVVGASYVALECAGFLAGIGLDVTVMVRSILLRGFDQDMANKIGEHMEEHGIKFIRQFVPIKVEQIEAGTPGRLRVVAQSTNSEEIIEGEYNTVMLAIGRDACTRKIGLETVGVKINEKTGKIPVTDEEQTNVPYIYAIGDILEDKVELTPVAIQAGRLLAQRLYAGSTVKCDYENVPTTVFTPLEYGACGLSEEKAVEKFGEENIEVYHSYFWPLEWTIPSRDNNKCYAKIICNTKDNERVVGFHVLGPNAGEVTQGFAAALKCGLTKKQLDSTIGIHPVCAEVFTTLSVTKRSGASILQAGCXG

SEQ ID NO: 9119 - protein, 543 aa, Homo sapiens
  MOD_RES (542)..(542): Selenocysteine
MLSRLVLNSWAQAIIRPRPPKVLGLQVTTFSEAYQEGRLQKLLKMNGPEDLPKSYDYDLIIIGGGSGGLAAAKEAAQYGKKVMVLDFVTPTPLGTRWGLGGTCVNVGCIPKKLMHQAALLGQALQDSRNYGWKVEETVKHDWDRMIEAVQNHIGSLNWGYRVALREKKVVYENAYGQFIGPHRIKATNNKGKEKIYSAERFLIATGERPRYLGIPGDKEYCISSDDLFSLPYCPGKTLVVGASYVALECAGFLAGIGLDVTVMVRSILLRGFDQDMANKIGEHMEEHGIKFIRQFVPIKVEQIEAGTPGRLRVVAQSTNSEEIIEGEYNTVMLAIGRDACTRKIGLETVGVKINEKTGKIPVTDEEQTNVPYIYAIGDILEDKVELTPVAIQAGRLLAQRLYAGSTVKCDYENVPTTVFTPLEYGACGLSEEKAVEKFGEENIEVYHSYFWPLEWTIPSRDNNKCYAKIICNTKDNERVVGFHVLGPNAGEVTQGFAAALKCGLTKKQLDSTIGIHPVCAEVFTTLSVTKRSGASILQAGCXG

SEQ ID NO: 9120 - protein, 598 aa, Homo sapiens
  MOD_RES (597)..(597): Selenocysteine
MQQVMLTCKGVNRGHAVPAGPGRKPRPRRSSRLLAGEKHLTRSALLLCHTEDGRALEGTLSELAAETDLPVVFVKQRKIGGHGPTLKAYQEGRLQKLLKMNGPEDLPKSYDYDLIIIGGGSGGLAAAKEAAQYGKKVMVLDFVTPTPLGTRWGLGGTCVNVGCIPKKLMHQAALLGQALQDSRNYGWKVEETVKHDWDRMIEAVQNHIGSLNWGYRVALREKKVVYENAYGQFIGPHRIKATNNKGKEKIYSAERFLIATGERPRYLGIPGDKEYCISSDDLFSLPYCPGKTLVVGASYVALECAGFLAGIGLDVTVMVRSILLRGFDQDMANKIGEHMEEHGIKFIRQFVPIKVEQIEAGTPGRLRVVAQSTNSEEIIEGEYNTVMLAIGRDACTRKIGLETVGVKINEKTGKIPVTDEEQTNVPYIYAIGDILEDKVELTPVAIQAGRLLAQRLYAGSTVKCDYENVPTTVFTPLEYGACGLSEEKAVEKFGEENIEVYHSYFWPLEWTIPSRDNNKCYAKIICNTKDNERVVGFHVLGPNAGEVTQGFAAALKCGLTKKQLDSTIGIHPVCAEVFTTLSVTKRSGASILQAGCXG

SEQ ID NO: 9121 - protein, 551 aa, Homo sapiens
  MOD_RES (550)..(550): Selenocysteine
MSCEDGRALEGTLSELAAETDLPVVFVKQRKIGGHGPTLKAYQEGRLQKLLKMNGPEDLPKSYDYDLIIIGGGSGGLAAAKEAAQYGKKVMVLDFVTPTPLGTRWGLGGTCVNVGCIPKKLMHQAALLGQALQDSRNYGWKVEETVKHDWDRMIEAVQNHIGSLNWGYRVALREKKVVYENAYGQFIGPHRIKATNNKGKEKIYSAERFLIATGERPRYLGIPGDKEYCISSDDLFSLPYCPGKTLVVGASYVALECAGFLAGIGLDVTVMVRSILLRGFDQDMANKIGEHMEEHGIKFIRQFVPIKVEQIEAGTPGRLRVVAQSTNSEEIIEGEYNTVMLAIGRDACTRKIGLETVGVKINEKTGKIPVTDEEQTNVPYIYAIGDILEDKVELTPVAIQAGRLLAQRLYAGSTVKCDYENVPTTVFTPLEYGACGLSEEKAVEKFGEENIEVYHSYFWPLEWTIPSRDNNKCYAKIICNTKDNERVVGFHVLGPNAGEVTQGFAAALKCGLTKKQLDSTIGIHPVCAEVFTTLSVTKRSGASILQAGCXG

SEQ ID NO: 9122 - protein, 499 aa, Homo sapiens
  MOD_RES (498)..(498): Selenocysteine
MNGPEDLPKSYDYDLIIIGGGSGGLAAAKEAAQYGKKVMVLDFVTPTPLGTRWGLGGTCVNVGCIPKKLMHQAALLGQALQDSRNYGWKVEETVKHDWDRMIEAVQNHIGSLNWGYRVALREKKVVYENAYGQFIGPHRIKATNNKGKEKIYSAERFLIATGERPRYLGIPGDKEYCISSDDLFSLPYCPGKTLVVGASYVALECAGFLAGIGLDVTVMVRSILLRGFDQDMANKIGEHMEEHGIKFIRQFVPIKVEQIEAGTPGRLRVVAQSTNSEEIIEGEYNTVMLAIGRDACTRKIGLETVGVKINEKTGKIPVTDEEQTNVPYIYAIGDILEDKVELTPVAIQAGRLLAQRLYAGSTVKCDYENVPTTVFTPLEYGACGLSEEKAVEKFGEENIEVYHSYFWPLEWTIPSRDNNKCYAKIICNTKDNERVVGFHVLGPNAGEVTQGFAAALKCGLTKKQLDSTIGIHPVCAEVFTTLSVTKRSGASILQAGCXG

SEQ ID NO: 9123 - protein, 614 aa, Homo sapiens
  MOD_RES (613)..(613): Selenocysteine
MPVDDYWLCLPASCARPFVQTVRVVQSCPHCCWFPGVLPSVPEPLRMPAMLPTGSHSAVLPPSHCSTAPPSTSQEPSSSADPKLCLSPPTSDSRQERNVQFGLAYQEGRLQKLLKMNGPEDLPKSYDYDLIIIGGGSGGLAAAKEAAQYGKKVMVLDFVTPTPLGTRWGLGGTCVNVGCIPKKLMHQAALLGQALQDSRNYGWKVEETVKHDWDRMIEAVQNHIGSLNWGYRVALREKKVVYENAYGQFIGPHRIKATNNKGKEKIYSAERFLIATGERPRYLGIPGDKEYCISSDDLFSLPYCPGKTLVVGASYVALECAGFLAGIGLDVTVMVRSILLRGFDQDMANKIGEHMEEHGIKFIRQFVPIKVEQIEAGTPGRLRVVAQSTNSEEIIEGEYNTVMLAIGRDACTRKIGLETVGVKINEKTGKIPVTDEEQTNVPYIYAIGDILEDKVELTPVAIQAGRLLAQRLYAGSTVKCDYENVPTTVFTPLEYGACGLSEEKAVEKFGEENIEVYHSYFWPLEWTIPSRDNNKCYAKIICNTKDNERVVGFHVLGPNAGEVTQGFAAALKCGLTKKQLDSTIGIHPVCAEVFTTLSVTKRSGASILQAGCXG

SEQ ID NO: 9124 - protein, 461 aa, Homo sapiens
  MOD_RES (460)..(460): Selenocysteine
MVLDFVTPTPLGTRWGLGGTCVNVGCIPKKLMHQAALLGQALQDSRNYGWKVEETVKHDWDRMIEAVQNHIGSLNWGYRVALREKKVVYENAYGQFIGPHRIKATNNKGKEKIYSAERFLIATGERPRYLGIPGDKEYCISSDDLFSLPYCPGKTLVVGASYVALECAGFLAGIGLDVTVMVRSILLRGFDQDMANKIGEHMEEHGIKFIRQFVPIKVEQIEAGTPGRLRVVAQSTNSEEIIEGEYNTVMLAIGRDACTRKIGLETVGVKINEKTGKIPVTDEEQTNVPYIYAIGDILEDKVELTPVAIQAGRLLAQRLYAGSTVKCDYENVPTTVFTPLEYGACGLSEEKAVEKFGEENIEVYHSYFWPLEWTIPSRDNNKCYAKIICNTKDNERVVGFHVLGPNAGEVTQGFAAALKCGLTKKQLDSTIGIHPVCAEVFTTLSVTKRSGASILQAGCXG

SEQ ID NO: 9125 - protein, 1318 aa, Homo sapiens
MSQKTNENVERYTQFLQKPQKPIQPYICSTLNDFQEERDFLANNIFPQLNELCNSWGTYFKAVDLSWSALKAPKSLPTHLFRQYSCLRSQRLKLCLDYVNSCFPFFICMLGQTYGDFLPDYSHFMTSKVTRLSSLSKVENLYVAAKNGYPWVLENPSCSLTEFEIIQAAFLNESQFQYFYFRTGTTLLKALDDEKKGERLPSSSSTNEEETLRIGKLKAKIISKGLPVRFYSDLHELGELVFKDWSVVIEKLHPATLMIENIDYKHSFERFYHEEFTEKCKQMCVISKESDRTFEILEKFALKDVELDFNNVAADSSLDSVPRFFRINPTPTYKSILLLSREHGCGKSTLIANWVNYFKKKHPSMLLIPHFVGSTCESSYIMSVIHYFITELQYRNYGTQLETDILNEDSDGLVFSFLVEVFIASISLKPCILVLDGIEELIGIYGISGQKVKDFSWLPHSLSPHCKFIMSTVSSSLSYKSLCARPDVRTVELISTGDEETKLNIFRKHLSIPMMDPFEQSTQALRKKPDLSPLKLTILANELKEYRINHNEFQCMKEYLEAVSVQELWELVLKRWIEDYSWTFQPKRANSDTVASGEGLDSWVADALCLLCLSHGGLAEDELLQLLDMLGYRNHYKVTALHWAAFRNATKQWVQEKPNGLLYFWHQSLSAVEHKLLGVITPVESSPCSFQTPMNHKKTHFHQVLIRYFQRQTSFWRVYQELPWHMKMSGCLRGLCGFLSSPTITDFISKIQSLGFWTRLHLIHFWNVLLEAGYDVSEAYLLSVAKIKADQCHTMRKSGTLSVLQCRLIELTVLDKCRLMFFIGSFLKFMGKTNEAEELFLSVEDMLVQSQSMTDMLLKVQNAIGELYLETGMTQEGFQYFQKAWSSMLRLSLSDLEDSRDLVKQKVRVLDNLAKSASEEYLKENHILEYATEISNLLDNNPRDQATMKYIEGVLMFVAGNTSLAKMKLRECLNIRKSLFGKKNMLVGEVMEFLADLLFFPQRDSKKSQRKQVLKYYKQVIKIKENAETLAKSSLLRKQLSISLSDTLCKLAGHLLASDSCHHVMIEAVGYLYRSVDLRVIHLGSSHSSIHGIHGILHLLREIEWIRSRRYWPQGMSQQHSEGSRNGFSLWEHLVKLNYHSAQSSNTVSSAMCMNADKLHRARRMDLAPQTISDKSKCAPGKGKKKPIICISAEEKIQRKTQNNAEIWNGSGKEASKKKTDYSSNILSLGKMNGLIKLSRQRILLAKSESGEGEITTIYHHPLPWPVSTKNPGESEFISEKWLFHSPDYISISQKSFLQRRLHIETKLLKTSNDINKE

SEQ ID NO: 9126 - protein, 1053 aa, Homo sapiens
MSQKTNENVERYTQFLQKPQKPIQPYICSTLNDFQEERDFLANNIFPQLNELCNSWGTYFKAVDLSWSALKAPKSLPTHLFRQYSCLRSQRLKLCLDYVNSCFPFFICMLGQTYGDFLPDYSHFMTSKVTRLSSLSKVENLYVAAKNGYPWVLENPSCSLTEFEIIQAAFLNESQFQYFYFRTGTTLLKALDDEKKGERLPSSSSTNEEETLRIGKLKAKIISKGLPVRFYSDLHELGELVFKDWSVVIEKLHPATLMIENIDYKHSFERFYHEEFTEKCKQMCVISKESDRTFEILEKFALKDVELDFNNVAADSSLDSVPRFFRINPTPTYKSILLLSREHGCGKSTLIANWVNYFKKKHPSMLLIPHFVGSTCESSYIMSVIHYFITELQYRNYGTQLETDILNEDSDGLVFSFLVEVFIASISLKPCILVLDGIEELIGIYGISGQKVKDFSWLPHSLSPHCKFIMSTVSSSLSYKSLCARPDVRTVELISTGDEETKLNIFRKHLSIPMMDPFEQSTQALRKKPDLSPLKLTILANELKEYRINHNEFQCMKEYLEAVSVQELWELVLKRWIEDYSWTFQPKRANSDTVASGEGLDSWVADALCLLCLSHGGLAEDELLQLLDMLGYRNHYKVTALHWAAFRNATKQWVQEKPNGLLYFWHQSLSAVEHKLLGVITPVESSPCSFQTPMNHKKTHFHQVLIRYFQRQTSFWRVYQELPWHMKMSGCLRGLCGFLSSPTITDFISKIQSLGFWTRLHLIHFWNVLLEAGYDVSEAYLLSVAKIKADQCHTMRKSGTLSVLQCRLIELTVLDKCRLMFFIGSFLKFMGKTNEAEELFLSVEDMLVQSQSMTDMLLKVQNAIGELYLETGMTQEGFQYFQKAWSSMLRLSLSDLEDSRDLVKQKVRVLDNLAKSASEEYLKENHILEYATEISNLLDNNPRDQATMKYIEGVLMFVAGNTSLAKMKLRECLNIRKSLFGKKNMLVGEVMEFLADLLFFPQRDSKKSQRKQVLKYYKQVIKIKENAETLAKSSLLRKQLSISLSDTLCKLAF

SEQ ID NO: 9127 - protein, 139 aa, Homo sapiens
MSQKTNENVERYTQFLQKPQKPIQPYICSTLNDFQEERDFLANNIFPQLNELCNSWGTYFKAVDLSWSALKAPKSLPTHLFRQYSCLRSQRLKLCLDYVNSCFPFFICMLGQTYGDFLPDYSHFMTSKVTRLSSLSKVE

SEQ ID NO: 9128 - protein, 268 aa, Homo sapiens
MEDFLLSNGYQLGKTIGEGTYSKVKEAFSKKHQRKVAIKVIDKMGGPEEFIQRFLPRELQIVRTLDHKNIIQVYEMLESADGKICLVMELAEGGDVFDCVLNGGPLPESRAKALFRQMVEAIRYCHGCGVAHRDLKCENALLQGFNLKLTDFGFAKVLPKSHRELSQTFCGSTAYAAPEVLQGIPHDSKKGDVWSMGVVLYVMLCASLPFDDTDIPKMLWQQQKGVSFPTHLSISADCQDLLKRLLEPDMILRPSIEEVSWHPWLAST

SEQ ID NO: 9129 - protein, 528 aa, Homo sapiens
MALKWTTVLLIQLSFYFSSGSCGKVLVWAAEYSLWMNMKTILKELVQRGHEVTVLASSASILFDPNDSSTLKLEVYPTSLTKTEFENIIMQLVKRLSEIQKDTFWLPFSQEQEILWAINDIIRNFCKDVVSNKKLMKKLQESRFDIVFADAYLPCGELLAELFNIPFVYSHSFSPGYSFERHSGGFIFPPSYVPVVMSKLSDQMTFMERVKNMLYVLYFDFWFQIFNMKKWDQFYSEVLGRPTTLSETMRKADIWLMRNSWNFKFPHPFLPNVDFVGGLHCKPAKPLPKEMEEFVQSSGENGVVVFSLGSMVSNMTEERANVIATALAKIPQKVLWRFDGNKPDALGLNTRLYKWIPQNDLLGHPKTRAFITHGGANGIYEAIYHGIPMVGIPLFFDQPDNIAHMKAKGAAVRVDFNTMSSTDLLNALKTVINDPSYKENIMKLSRIQHDQPVKPLDRAVFWIEFVMRHKGAKHLRVAAHNLTWFQYHSLDVIGFLLACVATVLFIITKCCLFCFWKFARKGKKGKRD

SEQ ID NO: 9130 - protein, 444 aa, Homo sapiens
MALKWTTVLLIQLSFYFSSGSCGKVLVWAAEYSLWMNMKTILKELVQRGHEVTVLASSASILFDPNDSSTLKLEVYPTSLTKTEFENIIMQLVKRLSEIQKDTFWLPFSQEQEILWAINDIIRNFCKDVVSNKKLMKKLQESRFDIVFADAYLPCGRPTTLSETMRKADIWLMRNSWNFKFPHPFLPNVDFVGGLHCKPAKPLPKEMEEFVQSSGENGVVVFSLGSMVSNMTEERANVIATALAKIPQKVLWRFDGNKPDALGLNTRLYKWIPQNDLLGHPKTRAFITHGGANGIYEAIYHGIPMVGIPLFFDQPDNIAHMKAKGAAVRVDFNTMSSTDLLNALKTVINDPSYKENIMKLSRIQHDQPVKPLDRAVFWIEFVMRHKGAKHLRVAAHNLTWFQYHSLDVIGFLLACVATVLFIITKCCLFCFWKFARKGKKGKRD

SEQ ID NO: 9131 - protein, 520 aa, Homo sapiens
MMKYYDLAKFTIYQIAEMDKGLSELSPMQQALIYSFCENHDKAIEVLDGISWNRAEMTMCALLAKVQMKAKRTKEAVEVLKKALDAISHSDKGPDATAISADCLYNLGLCYMEEGNLQMTYKLAITDLTTAISMDKNSYTAFYNRALCYTKIRELQMALTDYGIVLLLDATETVKLNTFLNRGLIYVELGQYGFALEDFKQAALISRTNGSLCHATAMCHHRINEFEEAVNFFTWALKINPCFLDAYVGRGNSYMEYGHDEATKQAQKDFLKALHINPAYIKARISFGYNLQAQGKFQKAWNHFTIAIDTDPKNYLAYEGRAVVCLQMGNNFAAMQDINAAMKISTTAEFLTNRGVIHEFMGHKQNAMKDYQDAITLNPKYSLAYFNAGNIYFHHRQFSQASDYFSKALKFDPENEYVLMNRAITNTILKKYEEAKEDFANVIESCPFWAAVYFNRAHFYYCLKQYELAEEDLNKALSLKPNDALVYNFRAKVRGKIGLIEEAMADYNQALDLEDYASVI

SEQ ID NO: 9132 - protein, 536 aa, Homo sapiens
MDKGLSELSPMQQALIYSFCENHDKAIEVLDGISWNRAEMTMCALLAKVQMKAKRTKEAVEVLKKALDAISHSDKGPDATAISADCLYNLGLCYMEEGNLQMAFDSFTKAVKANPDFAESFYQRGLCKVKLHKDSSILDFNRAITLNPKHYQAYLSRVAFYGLKGRYSKAILNCNKAIKIYPESVRAYLYRGVLKYYNKTYKLAITDLTTAISMDKNSYTAFYNRALCYTKIRELQMALTDYGIVLLLDATETVKLNTFLNRGLIYVELGQYGFALEDFKQAALISRTNGSLCHATAMCHHRINEFEEAVNFFTWALKINPCFLDAYVGRGNSYMEYGHDEATKQAQKDFLKALHINPAYIKARISFGYNLQAQGKFQKAWNHFTIAIDTDPKNYLAYEGRAVVCLQMGNNFAAMQDINAAMKISTTAEFLTNRGVIHEFMGHKQNAMKDYQDAITLNPKYSLAYFNAGNIYFHHRQFSQEESLGLAWSLSLDSFLRTGGATFSSGVNPLQTLHRRMSILSPLPPTCPRDEMDFTS

SEQ ID NO: 9133 - protein, 860 aa, Homo sapiens
MAPAGCCCCCCFWGGAVAAAGAARRVLLLLLLGVLSAGLRPGALATEHYSPLSLLKQELQHRQQQEAPAGGGGCSPQSGDWGDQYSAECGESSFLNFHDSDCEPKGSSPCDSLLSLNTEKILSQAKSIAEQKRFPFATDNDSTNEELAIAYVLIGSGLYDEAIRHFSTMLQEEPDLVSAIYGRGIAYGKKGLHDIKNAELALFELSRVITLEPDRPEVFEQRAEILSPLGRINEAVNDLTKAIQLQPSARLYRHRGTLYFISEDYATAHEDFQQSLELNKNQPIAMLYKGLTFFHRGLLKEAIESFKEALKQKVDFIDAYKSLGQAYRELGNFEAATESFQKALLLNQNHVQTLQLRGMMLYHHGSLQEALKNFKRCLQLEPYNEVCQYMKGLSHVAMGQFYEGIKAQTKVMLNDPLPGQKASPEYLKVKYLREYSRYLHAHLDTPLTEYNIDVDLPGSFKDHWAKNLPFLIEDYEEQPGLQPHIKDVLHQNFESYKPEVQELICVADRLGSLMQYETPGFLPNKRIHRAMGLAALEVMQAVQRTWTNSKVRMNGKTRLMQWRDMFDIAVKWRRIADPDQPVLWLDQMPARSLSRGFNNHINLIRGQVINMRYLEYFEKILHFIKDRILVYHGANNPKGLLEVREALEKVHKVEDLLPIMKQFNTKTKDGFTVNTKVPSLKDQGKEYDGFTITITGDKVGNILFSVETQTTEERTQLYHAEIDALYKDLTAKGKVLILSSEFGEADAVCNLILSLVYYFYNLMPLSRGSSVIAYSVIVGALMASGKEVAGKIPKGKLVDFEAMTAPGSEAFSKVAKSWMNLKSISPSYKTLPSVSETFPTLRSMIEVLNTDSSPRCLKKL

SEQ ID NO: 9134 - protein, 806 aa, Homo sapiens
MAPAGCCCCCCFWGGAVAAAGAARRVLLLLLLGVLSAGLRPGALATEHYSPLSLLKQELQHRQQQEAPAGGGGCSPQSGDWGDQYSAECGESSFLNFHDSDCEPKGSSPCDSLLSLNTEKILSQAKSIAEQKRFPFATDNDSTNEELAIAYVLIGSGLYDEAIRHFSTMLQILSPLGRINEAVNDLTKAIQLQPSARLYRHRGTLYFISEDYATAHEDFQQSLELNKNQPIAMLYKGLTFFHRGLLKEAIESFKEALKQKVDFIDAYKSLGQAYRELGNFEAATESFQKALLLNQNHVQTLQLRGMMLYHHGSLQEALKNFKRCLQLEPYNEVCQYMKGLSHVAMGQFYEGIKAQTKVMLNDPLPGQKASPEYLKVKYLREYSRYLHAHLDTPLTEYNIDVDLPGSFKDHWAKNLPFLIEDYEEQPGLQPHIKDVLHQNFESYKPEVQELICVADRLGSLMQYETPGFLPNKRIHRAMGLAALEVMQAVQRTWTNSKVRMNGKTRLMQWRDMFDIAVKWRRIADPDQPVLWLDQMPARSLSRGFNNHINLIRGQVINMRYLEYFEKILHFIKDRILVYHGANNPKGLLEVREALEKVHKVEDLLPIMKFNTKTKDGFTVNTKVPSLKDQGKEYDGFTITITGDKVGNILFSVETQTTEERTQLYHAEIDALYKDLTAKGKVLILSSEFGEADAVCNLILSLVYYFYNLMPLSRGSSVIAYSVIVGALMASGKEVAGKIPKGKLVDFEAMTAPGSEAFSKVAKSWMNLKSISPSYKTLPSVSETFPTLRSMIEVLNTDSSPRCLKKL

SEQ ID NO: 9135 - protein, 253 aa, Homo sapiens
MGQCGITSSKTVLVFLNLIFWGAAGILCYVGAYVFITYDDYDHFFEDVYTLIPAVVIIAVGALLFIIGLIGCCATIRESRCGLATFVIILLLVFVTEVVVVVLGYVYRAKVENEVDRSIQKVYKTYNGTNPDAASRAIDYVQRQLHCCGIHNYSDWENTDWFKETKNQSVPLSCCRETASNCNGSLAHPSDLYAEGCEALVVKKLQEIMMHVIWAALAFAAIQLLGMLCACIVLCRRSRDPAYELLITGGTYA

SEQ ID NO: 9136 - protein, 228 aa, Homo sapiens
MGQCGITSSKTVLVFLNLIFWGAAGILCYVGAYVFITYDDYDHFFEDVYTLIPAVVIIAVGALLFIIGLIGCCATIRESRCGLATVENEVDRSIQKVYKTYNGTNPDAASRAIDYVQRQLHCCGIHNYSDWENTDWFKETKNQSVPLSCCRETASNCNGSLAHPSDLYAEGCEALVVKKLQEIMMHVIWAALAFAAIQLLGMLCACIVLCRRSRDPAYELLITGGTYA

SEQ ID NO: 9137 - protein, 189 aa, Homo sapiens
MGQCGITSSKTVLVFLNLIFWFVIILLLVFVTEVVVVVLGYVYRAKVENEVDRSIQKVYKTYNGTNPDAASRAIDYVQRQLHCCGIHNYSDWENTDWFKETKNQSVPLSCCRETASNCNGSLAHPSDLYAEGCEALVVKKLQEIMMHVIWAALAFAAIQLLGMLCACIVLCRRSRDPAYELLITGGTYA

SEQ ID NO: 9138 - protein, 94 aa, Homo sapiens
MRKLRLRASNPGPSGAPGTRRHFSTSGGGHHCGRRWLRRVRRSRSQTPSCQNLDPNPPIARFPLPLERISEVPRRACLHGRDASSVWPPPERSD

SEQ ID NO: 9139 - protein, 1375 aa, Homo sapiens
MVPGEENQLVPKEDVFWRCRQNIFDEMKKKFLQIENAAEEPRVLCIIQDTTNSKTVNERITLNLPASTPVRKLFEDVANKVGYINGTFDLVWGNGINTADMAPLDHTSDKSLLDANFEPGKKNFLHLTDKDGEQPQILLEDSSAGEDSVHDRFIGPLPREGSGGSTSDYVSQSYSYSSILNKSETGYVGLVNQAMTCYLNSLLQTLFMTPEFRNALYKWEFEESEEDPVTSIPYQLQRLFVLLQTSKKRAIETTDVTRSFGWDSSEAWQQHDVQELCRVMFDALEQKWKQTEQADLINELYQGKLKDYVRCLECGYEGWRIDTYLDIPLVIRPYGSSQAFASVEEALHAFIQPEILDGPNQYFCERCKKKCDARKGLRFLHFPYLLTLQLKRFDFDYTTMHRIKLNDRMTFPEELDMSTFIDVEDEKSPQTESCTDSGAENEGSCHSDQMSNDFSNDDGVDEGICLETNSGTEKISKSGLEKNSLIYELFSVMVHSGSAAGGHYYACIKSFSDEQWYSFNDQHVSRITQEDIKKTHGGSSGSRGYYSSAFASSTNAYMLIYRLKDPARNAKFLEVDEYPEHIKNLVQKERELEEQEKRQREIERNTCKIKLFCLHPTKQVMMENKLEVHKDKTLKEAVEMAYKMMDLEEVIPLDCCRLVKYDEFHDYLERSYEGEEDTPMGLLLGGVKSTYMFDLLLETRKPDQVFQSYKPGEVMVKVHVVDLKAESVAAPITVRAYLNQTVTEFKQLISKAIHLPAETMRIVLERCYNDLRLLSVSSKTLKAEGFFRSNKVFVESSETLDYQMAFADSHLWKLLDRHANTIRLFVLLPEQSPVSYSKRTAYQKAGGDSGNVDDDCERVKGPVGSLKSVEAILEESTEKLKSLSLQQQQDGDNGDSSKSTETSDFENIESPLNERDSSASVDNRELEQHIQTSDPENFQSEERSDSDVNNDRSTSSVDSDILSSSHSSDTLCNADNAQIPLANGLDSHSITSSRRTKANEGKKETWDTAEEDSGTDSEYDESGKSRGEMQYMYFKAEPYAADEGSGEGHKWLMVHVDKRITLAAFKQHLEPFVGVLSSHFKVFRVYASNQEFESVRLNETLSSFSDDNKITIRLGRALKKGEYRVKVYQLLVNEQEPCKFLLDAVFAKGMTVRQSKEELIPQLREQCGLELSIDRFRLRKKTWKNPGTVFLDYHIYEEDINISSNWEVFLEVLDGVEKMKSMSQLAVLSRRWKPSEMKLDPFQEVVLESSSVDELREKLSEISGIPLDDIEFAKGRGTFPCDISVLDIHQDLDWNPKVSTLNVWPLYICDDGAVIFYRDKTEELMELTDEQRNELMKKESSRLQKTGHRVTYSPRKEKALKIYLDGAPNKDLTQD

SEQ ID NO: 9140 - protein, 1287 aa, Homo sapiens
MVPGEENQLVPKEAPLDHTSDKSLLDANFEPGKKNFLHLTDKDGEQPQILLEDSSAGEDSVHDRFIGPLPREGSGGSTSDYVSQSYSYSSILNKSETGYVGLVNQAMTCYLNSLLQTLFMTPEFRNALYKWEFEESEEDPVTSIPYQLQRLFVLLQTSKKRAIETTDVTRSFGWDSSEAWQQHDVQELCRVMFDALEQKWKQTEQADLINELYQGKLKDYVRCLECGYEGWRIDTYLDIPLVIRPYGSSQAFASVEEALHAFIQPEILDGPNQYFCERCKKKCDARKGLRFLHFPYLLTLQLKRFDFDYTTMHRIKLNDRMTFPEELDMSTFIDVEDEKSPQTESCTDSGAENEGSCHSDQMSNDFSNDDGVDEGICLETNSGTEKISKSGLEKNSLIYELFSVMVHSGSAAGGHYYACIKSFSDEQWYSFNDQHVSRITQEDIKKTHGGSSGSRGYYSSAFASSTNAYMLIYRLKDPARNAKFLEVDEYPEHIKNLVQKERELEEQEKRQREIERNTCKIKLFCLHPTKQVMMENKLEVHKDKTLKEAVEMAYKMMDLEEVIPLDCCRLVKYDEFHDYLERSYEGEEDTPMGLLLGGVKSTYMFDLLLETRKPDQVFQSYKPGEVMVKVHVVDLKAESVAAPITVRAYLNQTVTEFKQLISKAIHLPAETMRIVLERCYNDLRLLSVSSKTLKAEGFFRSNKVFVESSETLDYQMAFADSHLWKLLDRHANTIRLFVLLPEQSPVSYSKRTAYQKAGGDSGNVDDDCERVKGPVGSLKSVEAILEESTEKLKSLSLQQQQDGDNGDSSKSTETSDFENIESPLNERDSSASVDNRELEQHIQTSDPENFQSEERSDSDVNNDRSTSSVDSDILSSSHSSDTLCNADNAQIPLANGLDSHSITSSRRTKANEGKKETWDTAEEDSGTDSEYDESGKSRGEMQYMYFKAEPYAADEGSGEGHKWLMVHVDKRITLAAFKQHLEPFVGVLSSHFKVFRVYASNQEFESVRLNETLSSFSDDNKITIRLGRALKKGEYRVKVYQLLVNEQEPCKFLLDAVFAKGMTVRQSKEELIPQLREQCGLELSIDRFRLRKKTWKNPGTVFLDYHIYEEDINISSNWEVFLEVLDGVEKMKSMSQLAVLSRRWKPSEMKLDPFQEVVLESSSVDELREKLSEISGIPLDDIEFAKGRGTFPCDISVLDIHQDLDWNPKVSTLNVWPLYICDDGAVIFYRDKTEELMELTDEQRNELMKKESSRLQKTGHRVTYSPRKEKALKIYLDGAPNKDLTQD

SEQ ID NO: 9141 - protein, 157 aa, Homo sapiens
MKSMSQLAVLSRRWKPSEMKLDPFQEVVLESSSVDELREKLSEISGIPLDDIEFAKGRGTFPCDISVLDIHQDLDWNPKVSTLNVWPLYICDDGAVIFYRDKTEELMELTDEQRNELMKKESSRLQKTGHRVTYSPRKEKALKIYLDGAPNKDLTQD

SEQ ID NO: 9142 - protein, 1355 aa, Homo sapiens
MVPGEENQLVPKEIENAAEEPRVLCIIQDTTNSKTVNERITLNLPASTPVRKLFEDVANKVGYINGTFDLVWGNGINTADMAPLDHTSDKSLLDANFEPGKKNFLHLTDKDGEQPQILLEDSSAGEDSVHDRFIGPLPREGSGGSTSDYVSQSYSYSSILNKSETGYVGLVNQAMTCYLNSLLQTLFMTPEFRNALYKWEFEESEEDPVTSIPYQLQRLFVLLQTSKKRAIETTDVTRSFGWDSSEAWQQHDVQELCRVMFDALEQKWKQTEQADLINELYQGKLKDYVRCLECGYEGWRIDTYLDIPLVIRPYGSSQAFASVEEALHAFIQPEILDGPNQYFCERCKKKCDARKGLRFLHFPYLLTLQLKRFDFDYTTMHRIKLNDRMTFPEELDMSTFIDVEDEKSPQTESCTDSGAENEGSCHSDQMSNDFSNDDGVDEGICLETNSGTEKISKSGLEKNSLIYELFSVMVHSGSAAGGHYYACIKSFSDEQWYSFNDQHVSRITQEDIKKTHGGSSGSRGYYSSAFASSTNAYMLIYRLKDPARNAKFLEVDEYPEHIKNLVQKERELEEQEKRQREIERNTCKIKLFCLHPTKQVMMENKLEVHKDKTLKEAVEMAYKMMDLEEVIPLDCCRLVKYDEFHDYLERSYEGEEDTPMGLLLGGVKSTYMFDLLLETRKPDQVFQSYKPGEVMVKVHVVDLKAESVAAPITVRAYLNQTVTEFKQLISKAIHLPAETMRIVLERCYNDLRLLSVSSKTLKAEGFFRSNKVFVESSETLDYQMAFADSHLWKLLDRHANTIRLFVLLPEQSPVSYSKRTAYQKAGGDSGNVDDDCERVKGPVGSLKSVEAILEESTEKLKSLSLQQQQDGDNGDSSKSTETSDFENIESPLNERDSSASVDNRELEQHIQTSDPENFQSEERSDSDVNNDRSTSSVDSDILSSSHSSDTLCNADNAQIPLANGLDSHSITSSRRTKANEGKKETWDTAEEDSGTDSEYDESGKSRGEMQYMYFKAEPYAADEGSGEGHKWLMVHVDKRITLAAFKQHLEPFVGVLSSHFKVFRVYASNQEFESVRLNETLSSFSDDNKITIRLGRALKKGEYRVKVYQLLVNEQEPCKFLLDAVFAKGMTVRQSKEELIPQLREQCGLELSIDRFRLRKKTWKNPGTVFLDYHIYEEDINISSNWEVFLEVLDGVEKMKSMSQLAVLSRRWKPSEMKLDPFQEVVLESSSVDELREKLSEISGIPLDDIEFAKGRGTFPCDISVLDIHQDLDWNPKVSTLNVWPLYICDDGAVIFYRDKTEELMELTDEQRNELMKKESSRLQKTGHRVTYSPRKEKALKIYLDGAPNKDLTQD

SEQ ID NO: 9143 - protein, 605 aa, Homo sapiens
MSQLSSTLKRYTESARYTDAHYAKSGYGAYTPSSYGANLAASLLEKEKLGFKPVPTSSFLTRPRTYGPSSLLDYDRGRPLLRPDITGGGKRAESQTRGTERPLGSGLSGGSGFPYGVTNNCLSYLPINAYDQGVTLTQKLDSQSDLARDFSSLRTSDSYRIDPRNLGRSPMLARTRKELCTLQGLYQTASCPEYLVDYLENYGRKGSASQVPSQAPPSRVPEIISPTYRPIGRYTLWETGKGQAPGPSRSSSPGRDGMNSKSAQGLAGLRNLGNTCFMNSILQCLSNTRELRDYCLQRLYMRDLHHGSNAHTALVEEFAKLIQTIWTSSPNDVVSPSEFKTQIQRYAPRFVGYNQQDAQEFLRFLLDGLHNEVNRVTLRPKSNPENLDHLPDDEKGRQMWRKYLEREDSRIGDLFVGQLKSSLTCTDCGYCSTVFDPFWDLSLPIAKRGYPEVTLMDCMRLFTKEDVLDGDEKPTCCRCRGRKRCIKKFSIQRFPKILVLHLKRFSESRIRTSKLTTFVNFPLRDLDLREFASENTNHAVYNLYAVSNHSGTTMGGHYTAYCRSPGTGEWHTFNDSSVTPMSSSQVRTSDAYLLFYELASPPSRM

SEQ ID NO: 9144 - protein, 353 aa, Homo sapiens
MLNKAKNSKSAQGLAGLRNLGNTCFMNSILQCLSNTRELRDYCLQRLYMRDLHHGSNAHTALVEEFAKLIQTIWTSSPNDVVSPSEFKTQIQRYAPRFVGYNQQDAQEFLRFLLDGLHNEVNRVTLRPKSNPENLDHLPDDEKGRQMWRKYLEREDSRIGDLFVGQLKSSLTCTDCGYCSTVFDPFWDLSLPIAKRGYPEVTLMDCMRLFTKEDVLDGDEKPTCCRCRGRKRCIKKFSIQRFPKILVLHLKRFSESRIRTSKLTTFVNFPLRDLDLREFASENTNHAVYNLYAVSNHSGTTMGGHYTAYCRSPGTGEWHTFNDSSVTPMSSSQVRTSDAYLLFYELASPPSRM

SEQ ID NO: 9145 - protein, 362 aa, Homo sapiens
MLVPGSTRPYSKKRQNSKSAQGLAGLRNLGNTCFMNSILQCLSNTRELRDYCLQRLYMRDLHHGSNAHTALVEEFAKLIQTIWTSSPNDVVSPSEFKTQIQRYAPRFVGYNQQDAQEFLRFLLDGLHNEVNRVTLRPKSNPENLDHLPDDEKGRQMWRKYLEREDSRIGDLFVGQLKSSLTCTDCGYCSTVFDPFWDLSLPIAKRGYPEVTLMDCMRLFTKEDVLDGDEKPTCCRCRGRKRCIKKFSIQRFPKILVLHLKRFSESRIRTSKLTTFVNFPLRDLDLREFASENTNHAVYNLYAVSNHSGTTMGGHYTAYCRSPGTGEWHTFNDSSVTPMSSSQVRTSDAYLLFYELASPPSRM

SEQ ID NO: 9146 - protein, 396 aa, Homo sapiens
MRTSYTVTLPEDPPAAPFPALAKELRPRSPLSPSLLLSTFVGLLLNKAKNSKSAQGLAGLRNLGNTCFMNSILQCLSNTRELRDYCLQRLYMRDLHHGSNAHTALVEEFAKLIQTIWTSSPNDVVSPSEFKTQIQRYAPRFVGYNQQDAQEFLRFLLDGLHNEVNRVTLRPKSNPENLDHLPDDEKGRQMWRKYLEREDSRIGDLFVGQLKSSLTCTDCGYCSTVFDPFWDLSLPIAKRGYPEVTLMDCMRLFTKEDVLDGDEKPTCCRCRGRKRCIKKFSIQRFPKILVLHLKRFSESRIRTSKLTTFVNFPLRDLDLREFASENTNHAVYNLYAVSNHSGTTMGGHYTAYCRSPGTGEWHTFNDSSVTPMSSSQVRTSDAYLLFYELASPPSRM

SEQ ID NO: 9147 - protein, 1052 aa, Homo sapiens
MEGSEPVAAHQGEEASCSSWGTGSTNKNLPIMSTASVEIDDALYSRQRYVLGDTAMQKMAKSHVFLSGMGGLGLEIAKNLVLAGIKAVTIHDTEKCQAWDLGTNFFLSEDDVVNKRNRAEAVLKHIAELNPYVHVTSSSVPFNETTDLSFLDKYQCVVLTEMKLPLQKKINDFCRSQCPPIKFISADVHGIWSRLFCDFGDEFEVLDTTGEEPKEIFISNITQANPGIVTCLENHPHKLETGQFLTFREINGMTGLNGSIQQITVISPFSFSIGDTTELEPYLHGGIAVQVKTPKTVFFESLERQLKHPKCLIVDFSNPEAPLEIHTAMLALDQFQEKYSRKPNVGCQQDSEELLKLATSISETLEEKPDVNADIVHWLSWTAQGFLSPLAAAVGGVASQEVLKAVTGKFSPLCQWLYLEAADIVESLGKPECEEFLPRGDRYDALRACIGDTLCQKLQNLNIFLVGCGAIGCEMLKNFALLGVGTSKEKGMITVTDPDLIEKSNLNRQFLFRPHHIQKPKSYTAADATLKINSQIKIDAHLNKVCPTTETIYNDEFYTKQDVIITALDNVEARRYVDSRCLANLRPLLDSGTMGTKGHTEVIVPHLTESYNSHRDPPEEEIPFCTLKSFPAAIEHTIQWARDKFESSFSHKPSLFNKFWQTYSSAEEVLQKIQSGHSLEGCFQVIKLLSRRPRNWSQCVELARLKFEKYFNHKALQLLHCFPLDIRLKDGSLFWQSPKRPPSPIKFDLNEPLHLSFLQNAAKLYATVYCIPFAEEDLSADALLNILSEVKIQEFKPSNKVVQTDETARKPDHVPISSEDERNAIFQLEKAILSNEATKSDLQMAVLSFEKDDDHNGHIDFITAASNLRAKMYSIEPADRFKTKRIAGKIIPAIATTTATVSGLVALEMIKVTGGYPFEAYKNCFLNLAIPIVVFTETTEVRKTKIRNGISFTIWDRWTVHGKEDFTLLDFINAVKEKYGIEPTMVVQGVKMLYVPVMPGHAKRLKLTMHKLVKPTTEKKYVDLTVSFAPDIDGDEDLPGPPVRYYFSHDTD

SEQ ID NO: 9148 - protein, 578 aa, Homo sapiens
MLKNFALLGVGTSKEKGMITVTDPDLIEKSNLNRQFLFRPHHIQKPKSYTAADATLKINSQIKIDAHLNKVCPTTETIYNDEFYTKQDVIITALDNVEARRYVDSRCLANLRPLLDSGTMGTKGHTEVIVPHLTESYNSHRDPPEEEIPFCTLKSFPAAIEHTIQWARDKFESSFSHKPSLFNKFWQTYSSAEEVLQKIQSGHSLEGCFQVIKLLSRRPRNWSQCVELARLKFEKYFNHKALQLLHCFPLDIRLKDGSLFWQSPKRPPSPIKFDLNEPLHLSFLQNAAKLYATVYCIPFAEEDLSADALLNILSEVKIQEFKPSNKVVQTDETARKPDHVPISSEDERNAIFQLEKAILSNEATKSDLQMAVLSFEKDDDHNGHIDFITAASNLRAKMYSIEPADRFKTKRIAGKIIPAIATTTATVSGLVALEMIKVTGGYPFEAYKNCFLNLAIPIVVFTETTEVRKTKIRNGISFTIWDRWTVHGKEDFTLLDFINAVKEKYGIEPTMVVQGVKMLYVPVMPGHAKRLKLTMHKLVKPTTEKKYVDLTVSFAPDIDGDEDLPGPPVRYYFSHDTD

SEQ ID NO: 9149 - protein, 389 aa, Homo sapiens
MEGSEPVAAHQGEEASCSSWGTGSTNKNLPIMSTASVEIDDALYSRQRYVLGDTAMQKMAKSHVFLSGMGGLGLEIAKNLVLAGIKAVTIHDTEKCQAWDLGTNFFLSEDDVVNKRNRAEAVLKHIAELNPYVHVTSSSVPFNETTDLSFLDKYQCVVLTEMKLPLQKKINDFCRSQCPPIKFISADVHGIWSRLFCDFGDEFEVLDTTGEEPKEIFISNITQANPGIVTCLENHPHKLETGQFLTFREINGMTGLNGSIQQITVISPFSFSIGDTTELEPYLHGGIAVQVKTPKTVFFESLERQLKHPKCLIVDFSNPEAPLEIHTAMLALDQFQEKYSRKPNVGCQQDSEELLKLATSISETLEEKVTIEIYGCPNICLLIHKCSVY

SEQ ID NO: 9150 - protein, 340 aa, Homo sapiens
MEGSEPVAAHQGEEASCSSWGTGSTNKNLPIMSTASVEIDDALYSRQRYVLGDTAMQKMAKSHVFLSGMGGLGLEIAKNLVLAGIKAVTIHDTEKCQAWDLGTNFFLSEDDVVNKRNRAEAVLKHIAELNPYVHVTSSSVPFNETTDLSFLDKYQCVVLTEMKLPLQKKINDFCRSQCPPIKFISADVHGIWSRLFCDFGDEFEVLDTTGEEPKEIFISNITQANPGIVTCLENHPHKLETGQFLTFREINGMTGLNGSIQQITVISPFSFSIGDTTELEPYLHGGIAVQVKTPKTVFFESLERQLKHPKCLIVDFSNPEVNKHFAGLREAAESEMRISE

SEQ ID NO: 9151 - protein, 1042 aa, Homo sapiens
MDKILEGLVSSSHPLPLKRVIVRKVVESAEHWLDEAQCEAMFDLTTRLILEGQDPFQRQVGHQVLEAYARYHRPEFESFFNKTFVLGLLHQGYHSLDRKDVAILDYIHNGLKLIMSCPSVLDLFSLLQVEVLRMVCERPEPQLCARLSDLLTDFVQCIPKGKLSITFCQQLVRTIGHFQCVSTQERELREYVSQVTKVSNLLQNIWKAEPATLLPSLQEVFASISSTDASFEPSVALASLVQHIPLQMITVLIRSLTTDPNVKDASMTQALCRMIDWLSWPLAQHVDTWVIALLKGLAAVQKFTILIDVTLLKIELVFNRLWFPLVRPGALAVLSHMLLSFQHSPEAFHLIVPHVVNLVHSFKNDGLPSSTAFLVQLTELIHCMMYHYSGFPDLYEPILEAIKDFPKPSEEKIKLILNQSAWTSQSNSLASCLSRLSGKSETGKTGLINLGNTCYMNSVIQALFMATDFRRQVLSLNLNGCNSLMKKLQHLFAFLAHTQREAYAPRIFFEASRPPWFTPRSQQDCSEYLRFLLDRLHEEEKILKVQASHKPSEILECSETSLQEVASKAAVLTETPRTSDGEKTLIEKMFGGKLRTHIRCLNCRSTSQKVEAFTDLSLAFCPSSSLENMSVQDPASSPSIQDGGLMQASVPGPSEEPVVYNPTTAAFICDSLVNEKTIGSPPNEFYCSENTSVPNESNKILVNKDVPQKPGGETTPSVTDLLNYFLAPEILTGDNQYYCENCASLQNAEKTMQITEEPEYLILTLLRFSYDQKYHVRRKILDNVSLPLVLELPVKRITSFSSLSESWSVDVDFTDLSENLAKKLKPSGTDEASCTKLVPYLLSSVVVHSGISSESGHYYSYARNITSTDSSYQMYHQSEALALASSQSHLLGRDSPSAVFEQDLENKEMSKEWFLFNDSRVTFTSFQSVQKITSRFPKDTAYVLLYKKQHSTNGLSGNNPTSGLWINGDPPLQKELMDAITKDNKLYLQEQELNARARALQAASASCSFRPNGFDDNDPPGSCGPTGGGGGGGFNTVGRLVF

SEQ ID NO: 9152 - protein, 1004 aa, Homo sapiens
MDKILEGLVSSSHPLPLKRVIVRKVVESAEHWLDEAQCEAMFDLTTRLILEGQDPFQRQVGHQVLEAYARYHRPEFESFFNKTFVLGLLHQGYHSLDRKDVAILDYIHNGLKLIMSCPSVLDLFSLLQVEVLRMVCERPEPQLCARLSDLLTDFVQCIPKGKLSITFCQQLVRTIGHFQCVSTQERELREYVSQVTKVSNLLQNIWKAEPATLLPSLQEVFASISSTDASFEPSVALASLVQHIPLQMITVLIRSLTTDPNVKDASMTQALCRMIDWLSWPLAQHVDTWVIALLKGLAAVQKFTILIDVTLLKIELVFNRLWFPLVRPGALAVLSHMLLSFQHSPEAFHLIVPHVVNLVHSFKNDGLPSSTAFLVQLTELIHCMMYHYSGFPDLYEPILEAIKDFPKPSEEKIKLILNQSAWTSQSNSLASCLSRLSGKSETGKTGLINLGNTCYMNSVIQALFMATDFRRQVLSLNLNGCNSLMKKLQHLFAFLAHTQREAYAPRIFFEASRPPWFTPRSQQDCSEYLRFLLDRLHEEEKILKVQASHKPSEILECSETSLQEVASKAAVLTETPRTSDGEKTLIEKMFGGKLRTHIRCLNCRSTSQKVEAFTDLSLAFCPSSSLENMSVQDPASSPSIQDGGLMQASVPGPSEEPVVYNPTTAAFICDSLVNEKTIGSPPNEFYCSENTSVPNESNKILVNKDVPQKPGGETTPSVTDLLNYFLAPEILTGDNQYYCENCASLQNAEKTMQITEEPEYLILTLLRFSYDQKYHVRRKILDNVSLPLVLELPVKRITSFSSLSESWSVDVDFTDLSENLAKKLKPSGTDEASCTKLVPYLLSSVVVHSGISSESGHYYSYARNITSTDSSYQMYHQSEALALASSQSHLLGRDSPSAVFEQDLENKEMSKEWFLFNDSRVTFTSFQSVQKITSRFPKDTAYVLLYKKQHSTNGLSGNNPTSGLWINGDPPLQKELMDAITKDNKLYLQVSWKYKLYLLKILNN

SEQ ID NO: 9153 - protein, 405 aa, Homo sapiens
MFVQEEKIFAGKVLRLHICASDGAEWLEEATEDTSVEKLKERCLKHCAHGSLEDPKSITHHKLIHAASERVLSDARTILEENIQDQDVLLLIKKRAPSPLPKMADVSAEEKKKQDQKAPDKEAILRATANLPSYNMDRAAVQTNMRDFQTELRKILVSLIEVAQKLLALNPDAVELFKKANAMLDEDEDERVDEAALRQLTEMGFPENRATKALQLNHMSVPQAMEWLIEHAEDPTIDTPLPGQAPPEAEGATAAASEAAAGASATDEEARDELTEIFKKIRRKREFRADARAVISLMEMGFDEKEVIDALRVNNNQQNAACEWLLGDRKPSPEELDKGIDPDSPLFQAILDNPVVQLGLTNPKTLLAFEDMLENPLNSTQWMNDPETGPVMLQISRIFQTLNRT

SEQ ID NO: 9154 - protein, 931 aa, Homo sapiens
MASPGIEVELLGKGHSDLGEVAPEIKASERRTAVAIADLEWREMEGDDCEFRYGDGTNEAQDNDFPTVERSRLQEMLSLLGLETYQVQKLSLQDSLQISFDSMKNWAPQVPKDLPWNFLRKLQALNADARNTTMVLDVLPDARPVEKESQMEEEIIYWDPADDLAADIYSFSELPTPDTPVNPLDLLCALLLSSDSFLQQEIALKMALCQFALPLVLPDSENHYHTFLLWAMRGIVRTWWSQPPRGMGSFREDSVVLSRAPAFAFVRMDVSSNSKSQLLNAVLSPGHRQWDCFWHRDLNLGTNAREISDGLVEISWFFPSGREDLDIFPEPVAFLNLRGDIGSHWLQFKLLTEISSAVFILTDNISKKEYKLLYSMKESTTKYYFILSPYRGKRNTNLRFLNKLIPVLKIDHSHVLVKVSSTDSDSFVKRIRAIVGNVLRAPCRRVSVEDMAHAARKLGLKVDEDCEECQKAKDRMERITRKIKDSDAYRRDELRLQGDPWRKAAQVEKEFCQLQWAVDPPEKHRAELRRRLLELRMQQNGHDPSSGVQEFISGISSPSLSEKQYFLRWMEWGLARVAQPRLRQPPETLLTLRPKHGGTTDVGEPLWPEPLGVEHFLREMGQFYEAESCLVEAGRLPAGQRRFAHFPGLASELLLTGLPLELIDGSTLSMPVRWVTGLLKELHVRLERRSRLVVLSTVGVPGTGKSTLLNTMFGLRFATGKSCGPRGAFMQLITVAEGFSQDLGCDHILVIDSGGLIGGALTSAGDRFELEASLATLLMGLSNVTVISLAETKDIPAAILHAFLRLEKTGHMPNYQFVYQNLHDVSVPGPRPRDKRQLLDPPGDLSRAAAQMEKQGDGFRALAGLAFCDPEKQHIWHIPGLWHGAPPMAAVSLAYSEAIFELKRCLLENIRNGLSNQNKNIQQLIELVRRL

SEQ ID NO: 9155 - protein, 922 aa, Homo sapiens
MASPGHSDLGEVAPEIKASERRTAVAIADLEWREMEGDDCEFRYGDGTNEAQDNDFPTVERSRLQEMLSLLGLETYQVQKLSLQDSLQISFDSMKNWAPQVPKDLPWNFLRKLQALNADARNTTMVLDVLPDARPVEKESQMEEEIIYWDPADDLAADIYSFSELPTPDTPVNPLDLLCALLLSSDSFLQQEIALKMALCQFALPLVLPDSENHYHTFLLWAMRGIVRTWWSQPPRGMGSFREDSVVLSRAPAFAFVRMDVSSNSKSQLLNAVLSPGHRQWDCFWHRDLNLGTNAREISDGLVEISWFFPSGREDLDIFPEPVAFLNLRGDIGSHWLQFKLLTEISSAVFILTDNISKKEYKLLYSMKESTTKYYFILSPYRGKRNTNLRFLNKLIPVLKIDHSHVLVKVSSTDSDSFVKRIRAIVGNVLRAPCRRVSVEDMAHAARKLGLKVDEDCEECQKAKDRMERITRKIKDSDAYRRDELRLQGDPWRKAAQVEKEFCQLQWAVDPPEKHRAELRRRLLELRMQQNGHDPSSGVQEFISGISSPSLSEKQYFLRWMEWGLARVAQPRLRQPPETLLTLRPKHGGTTDVGEPLWPEPLGVEHFLREMGQFYEAESCLVEAGRLPAGQRRFAHFPGLASELLLTGLPLELIDGSTLSMPVRWVTGLLKELHVRLERRSRLVVLSTVGVPGTGKSTLLNTMFGLRFATGKSCGPRGAFMQLITVAEGFSQDLGCDHILVIDSGGLIGGALTSAGDRFELEASLATLLMGLSNVTVISLAETKDIPAAILHAFLRLEKTGHMPNYQFVYQNLHDVSVPGPRPRDKRQLLDPPGDLSRAAAQMEKQGDGFRALAGLAFCDPEKQHIWHIPGLWHGAPPMAAVSLAYSEAIFELKRCLLENIRNGLSNQNKNIQQLIELVRRL

SEQ ID NO: 9156 - protein, 856 aa, Homo sapiens
MLSLLGLETYQVQKLSLQDSLQISFDSMKNWAPQVPKDLPWNFLRKLQALNADARNTTMVLDVLPDARPVEKESQMEEEIIYWDPADDLAADIYSFSELPTPDTPVNPLDLLCALLLSSDSFLQQEIALKMALCQFALPLVLPDSENHYHTFLLWAMRGIVRTWWSQPPRGMGSFREDSVVLSRAPAFAFVRMDVSSNSKSQLLNAVLSPGHRQWDCFWHRDLNLGTNAREISDGLVEISWFFPSGREDLDIFPEPVAFLNLRGDIGSHWLQFKLLTEISSAVFILTDNISKKEYKLLYSMKESTTKYYFILSPYRGKRNTNLRFLNKLIPVLKIDHSHVLVKVSSTDSDSFVKRIRAIVGNVLRAPCRRVSVEDMAHAARKLGLKVDEDCEECQKAKDRMERITRKIKDSDAYRRDELRLQGDPWRKAAQVEKEFCQLQWAVDPPEKHRAELRRRLLELRMQQNGHDPSSGVQEFISGISSPSLSEKQYFLRWMEWGLARVAQPRLRQPPETLLTLRPKHGGTTDVGEPLWPEPLGVEHFLREMGQFYEAESCLVEAGRLPAGQRRFAHFPGLASELLLTGLPLELIDGSTLSMPVRWVTGLLKELHVRLERRSRLVVLSTVGVPGTGKSTLLNTMFGLRFATGKSCGPRGAFMQLITVAEGFSQDLGCDHILVIDSGGLIGGALTSAGDRFELEASLATLLMGLSNVTVISLAETKDIPAAILHAFLRLEKTGHMPNYQFVYQNLHDVSVPGPRPRDKRQLLDPPGDLSRAAAQMEKQGDGFRALAGLAFCDPEKQHIWHIPGLWHGAPPMAAVSLAYSEAIFELKRCLLENIRNGLSNQNKNIQQLIELVRRL

SEQ ID NO: 9157 - protein, 888 aa, Homo sapiens
MEGDDCEFRYGDGTNEAQDNDFPTVERSRLQEMLSLLGLETYQVQKLSLQDSLQISFDSMKNWAPQVPKDLPWNFLRKLQALNADARNTTMVLDVLPDARPVEKESQMEEEIIYWDPADDLAADIYSFSELPTPDTPVNPLDLLCALLLSSDSFLQQEIALKMALCQFALPLVLPDSENHYHTFLLWAMRGIVRTWWSQPPRGMGSFREDSVVLSRAPAFAFVRMDVSSNSKSQLLNAVLSPGHRQWDCFWHRDLNLGTNAREISDGLVEISWFFPSGREDLDIFPEPVAFLNLRGDIGSHWLQFKLLTEISSAVFILTDNISKKEYKLLYSMKESTTKYYFILSPYRGKRNTNLRFLNKLIPVLKIDHSHVLVKVSSTDSDSFVKRIRAIVGNVLRAPCRRVSVEDMAHAARKLGLKVDEDCEECQKAKDRMERITRKIKDSDAYRRDELRLQGDPWRKAAQVEKEFCQLQWAVDPPEKHRAELRRRLLELRMQQNGHDPSSGVQEFISGISSPSLSEKQYFLRWMEWGLARVAQPRLRQPPETLLTLRPKHGGTTDVGEPLWPEPLGVEHFLREMGQFYEAESCLVEAGRLPAGQRRFAHFPGLASELLLTGLPLELIDGSTLSMPVRWVTGLLKELHVRLERRSRLVVLSTVGVPGTGKSTLLNTMFGLRFATGKSCGPRGAFMQLITVAEGFSQDLGCDHILVIDSGGLIGGALTSAGDRFELEASLATLLMGLSNVTVISLAETKDIPAAILHAFLRLEKTGHMPNYQFVYQNLHDVSVPGPRPRDKRQLLDPPGDLSRAAAQMEKQGDGFRALAGLAFCDPEKQHIWHIPGLWHGAPPMAAVSLAYSEAIFELKRCLLENIRNGLSNQNKNIQQLIELVRRL

SEQ ID NO: 9158 - protein, 293 aa, Homo sapiens
MAYHSGYGAHGSKHRARAAPDPPPLFDDTSGGYSSQPGGYPATGADVAFSVNHLLGDPMANVAMAYGSSIASHGKDMVHKELHRFVSVSKLKYFFAVDTAYVAKKLGLLVFPYTHQNWEVQYSRDAPLPPRQDLNAPDLYIPTMAFITYVLLAGMALGIQKRFSPEVLGLCASTALVWVVMEVLALLLGLYLATVRSDLSTFHLLAYSGYKYVGMILSVLTGLLFGSDGYYVALAWTSSALMYFIVRSLRTAALGPDSMGGPVPRQRLQLYLTLGAAAFQPLIIYWLTFHLVR

SEQ ID NO: 9159 - protein, 336 aa, Homo sapiens
MERKISRIHLVSEPSITHFLQVSWEKTLESGFVITLTDGHSAWTGTVSESEISQEADDMAMEKGKYVGELRKALLSGAGPADVYTFNFSKESCYFFFEKNLKDVSFRLGSFNLEKVENPAEVIRELICYCLDTIAENQAKNEHLQKENERLLRDWNDVQGRFEKCVSAKEALETDLYKRFILVLNEKKTKIRSLHNKLLNAAQEREKDIKQEGETAICSEMTADRDPVYDESTDEESENQTDLSGLASAAVSKDDSIISSLDVTDIAPSRKRRQRMQRNLGTEPKMAPQENQLQEKENSRPDSSLPETSKKEHISAENMSLETLRNSSPEDLFDEI

SEQ ID NO: 9160 - protein, 334 aa, Homo sapiens
MERKISRIHLVSEPSITHFLQVSWEKTLESGFVITLTDGHSAWTGTVSESEISQEADDMAMEKGKYVGELRKALLSGAGPADVYTFNFSKESCYFFFEKNLKDVSFRLGSFNLEKVENPAEVIRELICYCLDTIAENQAKNEHLQKENERLLRDWNDVQGRFEKCVSAKEALETDLYKRFILVLNEKKTKIRSLHNKLLNAAQEREKDIKQEGETAICSEMTADRDPVYDESTDEESENQTDLSGLASAAVSKDDSIISSLDVTDIAPSRKRRQRMQRNLGTEPKMAPQENQLQEKEKPDSSLPETSKKEHISAENMSLETLRNSSPEDLFDEI

SEQ ID NO: 9161 - protein, 310 aa, Homo sapiens
MERKISRIHLVSEPSITHFLQVSWEKTLESGFVITLTDGHSAWTGTVSESEISQEADDMAMEKGKYVGELRKALLSGAGPADVYTFNFSKESCYFFFEKNLKDVSFRLGSFNLEKVENPAEVIRELICYCLDTIAENQAKNEHLQKENERLLRDWNDVQGRFEKCVSAKEALETDLYKRFILVLNEKKTKIRSLHNKLLNAAQEREKDIKQEGETAICSEMTADRDPVYDESTDEESENQTDLSGLASAAVSKDDSIISSLDVTDIAPSRKRRQRMQRNLGTEPKMAPQENQLQEKEKGRKKETSEKEAV

SEQ ID NO: 9162 - protein, 156 aa, Homo sapiens
WASQVSENRPVCKAIIQGKQFEGLVDTGADVSIIALNQWPKNWPKQKAVTGLVGIGTASEVYQSMEILHCLGPDNQESTVQPMITSIPLNLWGRDLLQQWGAEITMPAPLYSPTSQKIMTKRGYIPGKGLGKNEDGIKIPFEAKINQKREGIGYPF

SEQ ID NO: 9163 - protein, 641 aa, Homo sapiens
MAAKSDGGGVGVGFAQLHNLDEAVGSGGEEDGEPGGGGCGGGGDGSEPGESSSMHICHCCNTSSCYWGCRSACLRSLLGRKPRRSAAADGGDQPLQPPAAPGAGRQPPTPSAARPEPPPPQVERPWLDCLWIVLALLVFFGDVGTDLWLALDYYRKGDYVYFGLTLFFVLVPSLLVQSLSFRWFVQDYTGGGLGAVEGLTSRGPPMMGAGYVHGAARGGPGVRVSPTPGAQRLCRLSVWIWQSVIHLLQMGQVWRYIRTMYLGIQSQRRKEHQRRFYWAMMYEYADVNMLRLLETFLESAPQLVLQLYIMLQKNSAETLPCVSSVTSLMSLAWVLASYHKLLRDSRDDKKSMSYRGAIIQVFWRLFTISSRVISFALFASIFQLYFGIFVVVHWCAMAFWIIHGGTDFCMSKWEEILFNMVVGIVYIFCWFNVKEGRTRYRMFAYYTIVLTENAALTFLWYFYRDPETTDSYAVPALCCVFISFVAGIAMMLLYYGVLHPTGPRAKILASSCCAELLWGIPLPPDVEPMAPEIPGYRGTQVTPTRAVTEQQEDLTADTCLPVFQVRPMGPPTPLGRPYLPEGPLIKIDMPRKRYPAWDAHFVDRRLRRTINILQYVTPTAVGIRYRDGPLLYELLQYESSL

SEQ ID NO: 9164 - protein, 362 aa, Homo sapiens
MMYEYADVNMLRLLETFLESAPQLVLQLYIMLQKNSAETLPCVSSVTSLMSLAWVLASYHKLLRDSRDDKKSMSYRGAIIQVFWRLFTISSRVISFALFASIFQLYFGIFVVVHWCAMAFWIIHGGTDFCMSKWEEILFNMVVGIVYIFCWFNVKEGRTRYRMFAYYTIVLTENAALTFLWYFYRDPETTDSYAVPALCCVFISFVAGIAMMLLYYGVLHPTGPRAKILASSCCAELLWGIPLPPDVEPMAPEIPGYRGTQVTPTRAVTEQQEDLTADTCLPVFQVRPMGPPTPLGRPYLPEGPLIKIDMPRKRYPAWDAHFVDRRLRRTINILQYVTPTAVGIRYRDGPLLYELLQYESSL

SEQ ID NO: 9165 - protein, 494 aa, Homo sapiens
MPTESASCSTARQTKQKRKSHSLSIRRTNSSEQERTGLPRDMLEGQDSKLPSSVRSTLLELFGQIEREFENLYIENLELRREIDTLNERLAAEGQAIDGAELSKGQLKTKASHSTSQLSQKLKTTYKASTSKIVSSFKTTTSRAACQLVKEYIGHRDGIWDVSVAKTQPVVLGTASADHTALLWSIETGKCLVKYAGHVGSVNSIKFHPSEQLALTASGDQTAHIWRYAVQLPTPQPVADTSISGEDEVECSDKDEPDLDGDVSSDCPTIRVPLTSLKSHQGVVIASDWLVGGKQAVTASWDRTANLYDVETSELVHSLTGHDQELTHCCTHPTQRLVVTSSRDTTFRLWDFRDPSIHSVNVFQGHTDTVTSAVFTVGDNVVSGSDDRTVKVWDLKNMRSPIATIRTDSAINRINVCVGQKIIALPHDNRQVRLFDMSGVRLARLPRSSRQGHRRMVCCSAWSEDHPVCNLFTCGFDRQAIGWNINIPALLQEK

SEQ ID NO: 9166 - protein, 495 aa, Homo sapiens
MPTESASCSTARQTKQKRKSHSLSIRRTNSSEQERTGLPRDMLEGQDSKLPSSVRSTLLELFGQIEREFENLYIENLELRREIDTLNERLAAEGQAIDGAELSKGQLKTKASHSTSQLSQKLKTTYKASTSKIVSSFKTTTSRAACQLVKEYIGHRDGIWDVSVAKTQPVVLGTASADHTALLWSIETGKCLVKYAGHVGSVNSIKFHPSEQLALTASGDQTAHIWRYAVQLPTPQPVADTSQISGEDEVECSDKDEPDLDGDVSSDCPTIRVPLTSLKSHQGVVIASDWLVGGKQAVTASWDRTANLYDVETSELVHSLTGHDQELTHCCTHPTQRLVVTSSRDTTFRLWDFRDPSIHSVNVFQGHTDTVTSAVFTVGDNVVSGSDDRTVKVWDLKNMRSPIATIRTDSAINRINVCVGQKIIALPHDNRQVRLFDMSGVRLARLPRSSRQGHRRMVCCSAWSEDHPVCNLFTCGFDRQAIGWNINIPALLQEK

SEQ ID NO: 9167 - protein, 264 aa, Homo sapiens
MPTESASCSTARQTKQKRKSHSLSIRRTNSSEQERTGLPRDMLEGQDSKLPSSVRSTLLELFGQIEREFENLYIENLELRREIDTLNERLAAEGQAIDGAELSKGQLKTKASHSTSQLSQKLKTTYKASTSKIVSSFKTTTSRAACQLVKEYIGHRDGIWDVSVAKTQPVVLGTASADHTALLWSIETGKCLVKYAGHVGSVNSIKFHPSEQLALTASGDQTAHIWRYAVQLPTPQPVADTSVSTFPYLRMCRMLMSANLRIHL

SEQ ID NO: 9168 - protein, 414 aa, Homo sapiens
MAALRYAGLDDTDSEDELPPGWEERTTKDGWVYYANHTEEKTQWEHPKTGKRKRVAGDLPYGWEQETDENGQVFFVDHINKRTTYLDPRLAFTVDDNPTKPTTRQRYDGSTTAMEILQGRDFTGKVVVVTGANSGIGFETAKSFALHGAHVILACRNMARASEAVSRILEEWHKAKVEAMTLDLALLRSVQHFAEAFKAKNVPLHVLVCNAATFALPWSLTKDGLETTFQVNHLGHFYLVQLLQDVLCRSAPARVIVVSSESHRFTDINDSLGKLDFSRLSPTKNDYWAMLAYNRSKLCNILFSNELHRRLSPRGVTSNAVHPGNMMYSNIHRSWWVYTLLFTLARPFTKSMQQGAATTVYCAAVPELEGLGGMYFNNCCRCMPSPEAQSEETARTLWALSERLIQERLGSQSG

SEQ ID NO: 9169 - protein, 363 aa, Homo sapiens
MAALRYAGLDDTDSEDELPPGWEERTTKDGWVYYANHTEEKTQWEHPKTGKRKRVAGDLPYGWEQETDENGQVFFVDHINKRTTYLDPRLAFTVDDNPTKPTTRQRYDGSTTAMEILQGRDFTGKVVVVTGANSGIGFETAKSFALHGAHVILACRNMARASEAVSRILEEWHKAKVEAMTLDLALLRSVQHFAEAFKAKNVPLHVLVCNAATFALPWSLTKDGLETTFQVNHLGHFYLVQLLQDVLCRSAPARVIVVSSESHRFTDINDSLGKLDFSRLSPTKNDYWAMLAYNRSKLCNILFSNELHRRLSPRGVTSNAVHPGNMMYSNIHRSWWVYTLLFTLARPFTKSMVSDCLVEGGHF

SEQ ID NO: 9170 - protein, 189 aa, Homo sapiens
MAALRYAGLDDTDSEDELPPGWEERTTKDGWVYYANHTEEKTQWEHPKTGKRKRVAGDLPYGWEQETDENGQVFFVDHINKRTTYLDPRLAFTVDDNPTKPTTRQRYDGSTTAMEILQGRDFTGKVVVVTGANSGIGFETAKSFALHGAHVILACRNMARASEAVSRILEEWKTKYHPPPEKCRIKIFH

SEQ ID NO: 9171 - protein, 36 aa, Homo sapiens
MAALRYAGLDDTDSEDELPPGWEERTTKDGWVYYAK

SEQ ID NO: 9172 - protein, 234 aa, Homo sapiens
MAALRYAGLDDTDSEDELPPGWEERTTKDGWVYYANHTEEKTQWEHPKTGKRKRVAGDLPYGWEQETDENGQVFFVDHINKRTTYLDPRLAFTVDDNPTKPTTRQRYDGSTTAMEILQGRDFTGKVVVVTGANSGIGFETAKSFALHGAHVILACRNMARASEAVSRILEEWQQGAATTVYCAAVPELEGLGGMYFNNCCRCMPSPEAQSEETARTLWALSERLIQERLGSQSG

SEQ ID NO: 9173 - protein, 311 aa, Homo sapiens
MAALRYAGLDDTDSEDELPPGWEERTTKDGWVYYANHTEEKTQWEHPKTGKRKRVAGDLPYGWEQETDENGQVFFVDHINKRTTYLDPRLAFTVDDNPTKPTTRQRYDGSTTAMEILQGRDFTGKVVVVTGANSGIATGSCHHRVLCCCPRTGGSGRDVLQQLLPLHALTRSSERRDGPDPVGAQREADPRTAWQPVRLSGAQSGWAHTPALCVSPHASARAGPLPNVPPTQIRKSKGNKSSHNRVKNLKYQWEAGNSWGKVSLFWGWARHRSLCFLVVACLKVKTCLVCRFRISLEKHQQFSFFYCYRIA

SEQ ID NO: 9174 - protein, 213 aa, Homo sapiens
MAALRYAGLDDTDSEDELPPGWEERTTKDGWVYYANHTEEKTQWEHPKTGKRKRVAGDLPYGWEQETDENGQVFFVDHINKRTTYLDPRLAFTVDDNPTKPTTRQRYDGSTTAMEILQGRDFTGKVVVVTGANSGIGKASCHVGRTLKHTRVEELSLLPTAINRELPPPCTVLLSQNWRVWEGCTSTTAAAACPHQKLRAKRRPGPCGRSARG

SEQ ID NO: 9175 - protein, 1303 aa, Homo sapiens
MEAAPGTPPPPPSESPPPPSPPPPSTPSPPPCSPDARPATPHLLHHRLPLPDDREDGELEEGELEDDGAEETQDTSGGPERSRKEKGEKHHSDSDEEKSHRRLKRKRKKEREKEKRRSKKRRKSKHKRHASSSDDFSDFSDDSDFSPSEKGHRKYREYSPPYAPSHQQYPPSHATPLPKKAYSKMDSKSYGMYEDYENEQYGEYEGDEEEDMGKEDYDDFTKELNQYRRAKEGSSRGRGSRGRGRGYRGRGSRGGSRGRGMGRGSRGRGRGSMGGDHPEDEEDFYEEEMDYGESEEPMGDDDYDEYSKELNQYRRSKDSRGRGLSRGRGRGSRGRGKGMGRGRGRGGSRGGMNKGGMNDDEDFYDEDMGDGGGGSYRSRDHDKPHQQSDKKGKVICKYFVEGRCTWGDHCNFSHDIELPKKRELCKFYITGFCARAENCPYMHGDFPCKLYHTTGNCINGDDCMFSHDPLTEETRELLDKMLADDAEAGAEDEKEVEELKKQGINPLPKPPPGVGLLPTPPRPPGPQAPTSPNGRPMQGGPPPPPPPPPPPPGPPQMPMPVHEPLSPQQLQQQDMYNKKIPSLFEIVVRPTGQLAEKLGVRFPGPGGPPGPMGPGPNMGPPGPMGGPMHPDMHPDMHPDMHPDMHADMHADMPMGPGMNPGPPMGPGGPPMMPYGPGDSPHSGMMPPIPPAQNFYENFYQQQEGMEMEPGLLGDAEDYGHYEELPGEPGEHLFPEHPLEPDSFSEGGPPGRPKPGAGVPDFLPSAQRALYLRIQQKQQEEEERARRLAESSKQDRENEEGDTGNWYSSDEDEGGSSVTSILKTLRQQTSSRPPASVGELSSSGLGDPRLQKGHPTGSRLADPRLSRDPRLTRHVEASGGSGPGDSGPSDPRLARALPTSKPEGSLHSSPVGPSSSKGSGPPPTEEEEGERALREKAVNIPLDPLPGHPLRDPRSQLQQFSHIKKDVTLSKPSFARTVLWNPEDLIPLPIPKQDAVPPVPAALQSMPTLDPRLHRAATAGPPNARQRPGASTDSSTQGANLPDFELLSRILKTVNATGSSAAPGSSDKPSDPRVRKAPTDPRLQKPTDSTASSRAAKPGPAEAPSPTASPSGDASPPATAPYDPRVLAAGGLGQGGGGGQSSVLSGISLYDPRTPNAGGKATEPAADTGAQPKGAEGNGKSSASKAKEPPFVRKSALEQPETGKAGADGGTPTDRYNSYNRPRPKAAAAPAATTATPPPEGAPPQPGVHNLPVPTLFGTVKQTPKTGSGSPFAGNSPAREGEQDAASLKDVFKGFDPTASPFCQ

SEQ ID NO: 9176 - protein, 437 aa, Homo sapiens
MTTSTLQKAIDLVTKATEEDKAKNYEEALRLYQHAVEYFLHAIKYEAHSDKAKESIRAKCVQYLDRAEKLKDYLRSKEKHGKKPVKENQSEGKGSDSDSEGDNPEKKKLQEQLMGAVVMEKPNIRWNDVAGLEGAKEALKEAVILPIKFPHLFTGKRTPWRGILLFGPPGTGKSYLAKAVATEANNSTFFSVSSSDLMSKWLGESEKLVKNLFELARQHKPSIIFIDEVDSLCGSRNENESEAARRIKTEFLVQMQGVGNNNDGTLVLGATNIPWVLDSAIRRRFEKRIYIPLPEEAARAQMFRLHLGSTPHNLTDANIHELARKTEGYSGADISIIVRDSLMQPVRKVQSATHFKKVCGPSRTNPSMMIDDLLTPCSPGDPGAMEMTWMDVPGDKLLEPVVCMSDMLRSLATTRPTVNADDLLKVKKFSEDFGQES

SEQ ID NO: 9177 - protein, 412 aa, Homo sapiens
MAGSVGLALCGQTLVVRGGSRFLATSIASSDDDSLFIYDCSAAEKKSQENKGEDAPLDQGSGAILASTFSKSGSYFALTDDSKRLILFRTKPWQCLSVRTVARRCTALTFIASEEKVLVADKSGDVYSFSVLEPHGCGRLELGHLSMLLDVAVSPDDRFILTADRDEKIRVSWAAAPHSIESFCLGHTEFVSRISVVPTQPGLLLSSSGDGTLRLWEYRSGRQLHCCHLASLQELVDPQAPQKFAASRIAFWCQENCVALLCDGTPVVYIFQLDARRQQLVYRQQLAFQHQVWDVAFEETQGLWVLQDCQEAPLVLYRPVGDQWQSVPESTVLKKVSGVLRGNWAMLEGSAGADASFSSLYKATFDNVTSYLKKKEERLQQQLEKKQRRRSPPPGPDGHAKKMRPGEATLSC

SEQ ID NO: 9178 - protein, 411 aa, Homo sapiens
MAGSVGLALCGQTLVVRGGSRFLATSIASSDDDSLFIYDCSAAEKKSQENKGEDAPLDQGSGAILASTFSKSGSYFALTDDSKRLILFRTKPWQCLSVRTVARRCTALTFIASEEKVLVADKSGDVYSFSVLEPHGCGRLELGHLSMLLDVAVSPDDRFILTADRDEKIRVSWAAAPHSIESFCLGHTEFVSRISVVPTQPGLLLSSSGDGTLRLWEYRSGRQLHCCHLASLQELVDPQAPQFAASRIAFWCQENCVALLCDGTPVVYIFQLDARRQQLVYRQQLAFQHQVWDVAFEETQGLWVLQDCQEAPLVLYRPVGDQWQSVPESTVLKKVSGVLRGNWAMLEGSAGADASFSSLYKATFDNVTSYLKKKEERLQQQLEKKQRRRSPPPGPDGHAKKMRPGEATLSC

SEQ ID NO: 9179 - protein, 266 aa, Homo sapiens
MLLDVAVSPDDRFILTADRDEKIRVSWAAAPHSIESFCLGHTEFVSRISVVPTQPGLLLSSSGDGTLRLWEYRSGRQLHCCHLASLQELVDPQAPQKFAASRIAFWCQENCVALLCDGTPVVYIFQLDARRQQLVYRQQLAFQHQVWDVAFEETQGLWVLQDCQEAPLVLYRPVGDQWQSVPESTVLKKVSGVLRGNWAMLEGSAGADASFSSLYKATFDNVTSYLKKKEERLQQQLEKKQRRRSPPPGPDGHAKKMRPGEATLSC

SEQ ID NO: 9180 - protein, 1192 aa, Homo sapiens
MPRRAGSGQLPLPRGWEEARDYDGKVFYIDHNTRRTSWIDPRDRLTKPLSFADCVGDELPWGWEAGFDPQIGVYYIDHINKTTQIEDPRKQWRGEQEKMLKDYLSVAQDALRTQKELYHVKEQRLALALDEYVRLNDAYKEKSSSHTSLFSGSSSSTKYDPDILKAEISTTRLRVKKLKRELSQMKQELLYKEQGFETLQQIDKKMSGGQSGYELSEAKAILTELKSIRKAISSGEKEKQDLMQSLAKLQERFHLDQNIGRSEPDLRCSPVNSHLCLSRQTLDAGSQTSISGDIGVRSRSNLAEKVRLSLQYEEAKRSMANLKIELSKLDSEAWPGALDIEKEKLMLINEKEELLKELQFVTPQKRTQDELERLEAERQRLEEELLSVRGTPSRALAERLRLEERRKELLQKLEETTKLTTYLHSQLKSLSASTLSMSSGSSLGSLASSRGSLNTSSRGSLNSLSSTELYYSSQSDQIDVDYQYKLDFLLQEKSGYIPSGPITTIHENEVVKSPSQPGQSGLCGVAAAATGHTPPLAEAPKSVASLSSRSSLSSLSPPGSPLVLEGTFPMSSSHDASLHQFTADFEDCELSSHFADISLIENQILLDSDSGGASQSLSEDKDLNECAREPLYEGTADVEKSLPKRRVIHLLGEKTTCVSAAVSDESVAGDSGVYEAFVKQPSEMEDVTYSEEDVAIVETAQVQIGLRYNAKSSSFMVIIAQLRNLHAFLIPHTSKVYFRVAVLPSSTDVSCLFRTKVHPPTESILFNDVFRVAISQTALQQKTLRVDLCSVSKHRREECLAGTQISLADLPFSSEVFTLWYNLLPSKQMPCKKNEENEDSVFQPNQPLVDSIDLDAVSALLARTSAELLAVEQELAQEEEEESGQEEPRGPDGDWLTMLREASDEIVAEKEAEVKLPEDSSCTEDLSSCTSVPEMNEDGNRKESNCAKDLRSQPPTRIPTLVDKETNTDEAANDNMAVRPKERSSLSSRQHPFVRSSVIVRSQTFSPGERNQYICRLNRSDSDSSTLAKKSLFVRNSTERRSLRVKRTVCQSVLRRTTQECPVRTSLDLELDLQASLTRQSRLNDELQALRDLRQKLEELKAQGETDLPPGVLEDERFQRLLKQAEKQAEQSKEEQKQGLNAEKLMRQVSKDVCRLREQSQKVPRQVQSFREKIAYFTRAKISIPSLPADDV

SEQ ID NO: 9181 - protein, 987 aa, Homo sapiens
MSGGQSGYELSEAKAILTELKSIRKAISSGEKEKQDLMQSLAKLQERFHLDQNIGRSEPDLRCSPVNSHLCLSRQTLDAGSQTSISGDIGVRSRSNLAEKVRLSLQYEEAKRSMANLKIELSKLDSEAWPGALDIEKEKLMLINEKEELLKELQFVTPQKRTQDELERLEAERQRLEEELLSVRGTPSRALAERLRLEERRKELLQKLEETTKLTTYLHSQLKSLSASTLSMSSGSSLGSLASSRGSLNTSSRGSLNSLSSTELYYSSQSDQIDVDYQYKLDFLLQEKSGYIPSGPITTIHENEVVKSPSQPGQSGLCGVAAAATGHTPPLAEAPKSVASLSSRSSLSSLSPPGSPLVLEGTFPMSSSHDASLHQFTADFEDCELSSHFADISLIENQILLDSDSGGASQSLSEDKDLNECAREPLYEGTADVEKSLPKRRVIHLLGEKTTCVSAAVSDESVAGDSGVYEAFVKQPSEMEDVTYSEEDVAIVETAQVQIGLRYNAKSSSFMVIIAQLRNLHAFLIPHTSKVYFRVAVLPSSTDVSCLFRTKVHPPTESILFNDVFRVAISQTALQQKTLRVDLCSVSKHRREECLAGTQISLADLPFSSEVFTLWYNLLPSKQMPCKKNEENEDSVFQPNQPLVDSIDLDAVSALLARTSAELLAVEQELAQEEEEESGQEEPRGPDGDWLTMLREASDEIVAEKEAEVKLPEDSSCTEDLSSCTSVPEMNEDGNRKESNCAKDLRSQPPTRIPTLVDKETNTDEAANDNMAVRPKERSSLSSRQHPFVRSSVIVRSQTFSPGERNQYICRLNRSDSDSSTLAKKSLFVRNSTERRSLRVKRTVCQSVLRRTTQECPVRTSLDLELDLQASLTRQSRLNDELQALRDLRQKLEELKAQGETDLPPGVLEDERFQRLLKQAEKQAEQSKEEQKQGLNAEKLMRQVSKDVCRLREQSQKVPRQVQSFREKIAYFTRAKISIPSLPADDV

SEQ ID NO: 9182 - protein, 874 aa, Homo sapiens
MANLKIELSKLDSEAWPGALDIEKEKLMLINEKEELLKELQFVTPQKRTQDELERLEAERQRLEEELLSVRGTPSRALAERLRLEERRKELLQKLEETTKLTTYLHSQLKSLSASTLSMSSGSSLGSLASSRGSLNTSSRGSLNSLSSTELYYSSQSDQIDVDYQYKLDFLLQEKSGYIPSGPITTIHENEVVKSPSQPGQSGLCGVAAAATGHTPPLAEAPKSVASLSSRSSLSSLSPPGSPLVLEGTFPMSSSHDASLHQFTADFEDCELSSHFADISLIENQILLDSDSGGASQSLSEDKDLNECAREPLYEGTADVEKSLPKRRVIHLLGEKTTCVSAAVSDESVAGDSGVYEAFVKQPSEMEDVTYSEEDVAIVETAQVQIGLRYNAKSSSFMVIIAQLRNLHAFLIPHTSKVYFRVAVLPSSTDVSCLFRTKVHPPTESILFNDVFRVAISQTALQQKTLRVDLCSVSKHRREECLAGTQISLADLPFSSEVFTLWYNLLPSKQMPCKKNEENEDSVFQPNQPLVDSIDLDAVSALLARTSAELLAVEQELAQEEEEESGQEEPRGPDGDWLTMLREASDEIVAEKEAEVKLPEDSSCTEDLSSCTSVPEMNEDGNRKESNCAKDLRSQPPTRIPTLVDKETNTDEAANDNMAVRPKERSSLSSRQHPFVRSSVIVRSQTFSPGERNQYICRLNRSDSDSSTLAKKSLFVRNSTERRSLRVKRTVCQSVLRRTTQECPVRTSLDLELDLQASLTRQSRLNDELQALRDLRQKLEELKAQGETDLPPGVLEDERFQRLLKQAEKQAEQSKEEQKQGLNAEKLMRQVSKDVCRLREQSQKVPRQVQSFREKIAYFTRAKISIPSLPADDV

SEQ ID NO: 9183 - protein, 1143 aa, Homo sapiens
MPRRAGSGQLPLPRGWEEARDYDGKVFYIDHNTRRTSWIDPRDRLTKPLSFADCVGDELPWGWEAGFDPQIGVYYIDHINKTTQIEDPRKQWRGEQEKMLKDYLSVAQDALRTQKELYHVKEQRLALALDEYVRLNDAYKEKSSSHTSLFSGSSSSTKYDPDILKAEISTTRLRVKKLKRELSQMKQELLYKEQGFETLQQIDKKMSGGQSGYELSEAKAILTELKSIRKAISSGEKEKQDLMQSLAKLQERFHLDQNIGRSEPDLRCSPVNSHLCLSRQTLDAGSQTSISGDIGVRSRSNLAEKVRLSLQYEEAKRSMANLKIELSKLDSEAWPGALDIEKEKLMLINEKEELLKELQFVTPQKRTQDELERLEAERQRLEEELLSVRGTPSRALAERLRLEERRKELLQKLEETTKLTTYLHSQLKSLSASTLSMSSGSSLGSLASSRGSLNTSSRGSLNSLSSTELYYSSQSDQIDVDYQYKLDFLLQEKSGYIPSGPITTIHENEVVKSPSQPGQSGLCGVAAAATGHTPPLAEAPKSVASLSSRSSLSSLSPPGSPLVLEGTFPMSSSHDASLHQFTADFEDYVEKSLPKRRVIHLLGEKTTCVSAAVSDESVAGDSGVYEAFVKQPSEMEDVTYSEEDVAIVETAQVQIGLRYNAKSSSFMVIIAQLRNLHAFLIPHTSKVYFRVAVLPSSTDVSCLFRTKVHPPTESILFNDVFRVAISQTALQQKTLRVDLCSVSKHRREECLAGTQISLADLPFSSEVFTLWYNLLPSKQMPCKKNEENEDSVFQPNQPLVDSIDLDAVSALLARTSAELLAVEQELAQEEEEESGQEEPRGPDGDWLTMLREASDEIVAEKEAEVKLPEDSSCTEDLSSCTSVPEMNEDGNRKESNCAKDLRSQPPTRIPTLVDKETNTDEAANDNMAVRPKERSSLSSRQHPFVRSSVIVRSQTFSPGERNQYICRLNRSDSDSSTLAKKSLFVRNSTERRSLRVKRTVCQSVLRRTTQECPVRTSLDLELDLQASLTRQSRLNDELQALRDLRQKLEELKAQGETDLPPGVLEDERFQRLLKQAEKQAEQSKEEQKQGLNAEKLMRQVSKDVCRLREQSQKVPRQVQSFREKIAYFTRAKISIPSLPADDV

SEQ ID NO: 9184 - protein, 712 aa, Homo sapiens
MLKDYLSVAQDALRTQKELYHVKEQRLALALDEYVRLNDAYKEKSSSHTSLFSGSSSSTKYDPDILKAEISTTRLRVKKLKRELSQMKQELLYKEQGFETLQQIDKKMSGGQSGYELSEAKAILTELKSIRKAISSGEKEKQDLMQSLAKLQERFHLDQNIGRSEPDLRCSPVNSHLCLSRQTLDAGSQTSISGDIGVRSRSNLAEKVRLSLQYEEAKRSMANLKIELSKLDSEAWPGALDIEKEKLMLINEKEELLKELQFVTPQKRTQDELERLEAERQRLEEELLSVRGTPSRALAERLRLEERRKELLQKLEETTKLTTYLHSQLKSLSASTLSMSSGSSLGSLASSRGSLNTSSRGSLNSLSSTELYYSSQSDQIDVDYQYKLDFLLQEKSGYIPSGPITTIHENEVVKSPSQPGQSGLCGVAAAATGHTPPLAEAPKSVASLSSRSSLSSLSPPGSPLVLEGTFPMSSSHDASLHQFTADFEDCELSSHFADISLIENQILLDSDSGGASQSLSEDKDLNECAREPLYEGTADVEKSLPKRRVIHLLGEKTTCVSAAVSDESVAGDSGVYEAFVKQPSEMEDVTYSEEDVAIVETAQVQIGLRYNAKSSSFMVIIAQLRNLHAFLIPHTSKVYFRVAVLPSSTDVSCLFRTKVHPPTESILFNDVFRVAISQTALQQKTLRKNFTFVTAITHGVCLPLPVPMPSFA

SEQ ID NO: 9185 - protein, 1216 aa, Homo sapiens
MPRRAGSGQLPLPRGWEEARDYDGKVFYIDHNTRRTSWIDPRDRLTKPLSFADCVGDELPWGWEAGFDPQIGVYYIDHINKTTQIEDPRKQWRGEQEKMLKDYLSVAQDALRTQKELYHVKEQRLALALDEYVRLNDAYKEKSSSHTSLFSGSSSSTKYDPDILKAEISTTRLRVKKLKRELSQMKQELLYKEQGFETLQQIDKKMSGGQSGYELSEAKAILTELKSIRKAISSGEKEKQDLMQSLAKLQERFHLDQNIGRSEPDLRCSPVNSHLCLSRQTLDAGSQTSISGDIGVRSRSNLAEKVRLSLQYEEAKRSMANLKIELSKLDSEAWPGALDIEKEKLMLINEKEELLKELQFVTPQKRTQDELERLEAERQRLEEELLSVRGTPSRALAERLRLEERRKELLQKLEETTKLTTYLHSQLKSLSASTLSMSSGSSLGSLASSRGSLNTSSRGSLNSLSSTELYYSSQSDQIDVDYQYKLDFLLQEKSGYIPSGPITTIHENEVVKSPSQPGQSGLCGVAAAATGHTPPLAEAPKSVASLSSRSSLSSLSPPGSPLVLEGTFPMSSSHDASLHQFTADFEDCELSSHFADISLIENQILLDSDSGGASQSLSEDKDLNECAREPLYEGTADVEKSLPKRRVIHLLGEKTTCVSAAVSDESVAGDSGVYEAFVKQPSEMEDVTYSEEDVAIVETAQVQIGLRYNAKSSSFMVIIAQLRNLHAFLIPHTSKVYFRVAVLPSSTDVSCLFRTKVHPPTESILFNDVFRVAISQTALQQKTLRVDLCSVSKHRREECLAGTQISLADLPFSSEVFTLWYNLLPSKQMPCKKNEENEDSVFQPNQPLVDSIDLDAVSALLARTSAELLAVEQELAQEEEEESGQEEPRGPDGDWLNTYFLCCWELKDDVFTRLTVKPLLTMLREASDEIVAEKEAEVKLPEDSSCTEDLSSCTSVPEMNEDGNRKESNCAKDLRSQPPTRIPTLVDKETNTDEAANDNMAVRPKERSSLSSRQHPFVRSSVIVRSQTFSPGERNQYICRLNRSDSDSSTLAKKSLFVRNSTERRSLRVKRTVCQSVLRRTTQECPVRTSLDLELDLQASLTRQSRLNDELQALRDLRQKLEELKAQGETDLPPGVLEDERFQRLLKQAEKQAEQSKEEQKQGLNAEKLMRQVSKDVCRLREQSQKVPRQVQSFREKIAYFTRAKISIPSLPADDV

SEQ ID NO: 9186 - protein, 320 aa, Homo sapiens
MPRLRVHGACLPTKSVLFLFYHRLTMLREASDEIVAEKEAEVKLPEDSSCTEDLSSCTSVPEMNEDGNRKESNCAKDLRSQPPTRIPTLVDKETNTDEAANDNMAVRPKERSSLSSRQHPFVRSSVIVRSQTFSPGERNQYICRLNRSDSDSSTLAKKSLFVRNSTERRSLRVKRTVCQSVLRRTTQECPVRTSLDLELDLQASLTRQSRLNDELQALRDLRQKLEELKAQGETDLPPGVLEDERFQRLLKQAEKQAEQSKEEQKQGLNAEKLMRQVSKDVCRLREQSQKVPRQVQSFREKIAYFTRAKISIPSLPADDV

SEQ ID NO: 9187 - protein, 291 aa, Homo sapiens [sequence omitted]

SEQ ID NO: 9188 - protein, 292 aa, Homo sapiens
MLRKLWQWFYEETESSDDVEVLTLKKFKGDLAYRRQEYQKALQEYSSISEKLSSTNFAMKRDVQEGQARCLAHLGRHMEALEIAANLENKATNTDHLTTVLYLQLAICSSLQNLEKTIFCLQKLISLHPFNPWNWGKLAEAYLNLGPALSAALASSQKQHSFTSSDKTIKSFFPHSGKDCLLCFPETLPESSLFSVEANSSNSQKNEKALTNIQNCMAEKRETVLIETQLKACASFIRTRLLLQFTQPQQTSFALERNLRTQQEIEDKMKGFSFKEDTLLLIAEVSVSLGFM

SEQ ID NO: 9189 - protein, 297 aa, Homo sapiens
MGTALDIKIKRANKVYHAGEVLSGVVVISSKDSVQHQGVSLTMEGTVNLQLSAKSVGVFEAFYNSVKPIQIINSTIEMVKPGKFPSGKTEIPFEFPLHLKGNKVLYETYHGVFVNIQYTLRCDMKRSLLAKDLTKTCEFIVHSAPQKGKFTPSPVDFTITPETLQNVKERALLPKFLLRGHLNSTNCVITQPLTGELVVESSEAAIRSVELQLVRVETCGCAEGYARDATEIQNIQIADGDVCRGLSVPIYMVFPRLFTCPTLETTNFKVEFEVNIVVLLHPDHLITENFPLKLCRI

SEQ ID NO: 9190 - protein, 270 aa, Homo sapiens
MGTALDIKIKRANKVYHAGEVLSGVVVISSKDSVQHQGVSLTMEGTVNLQLSAKSVGVFEAFYNSVKPIQIINSTIEMVKPGKFPSGKTEIPFEFPLHLKGNKVLYETYHGVFVNIQPQKGKFTPSPVDFTITPETLQNVKERALLPKFLLRGHLNSTNCVITQPLTGELVVESSEAAIRSVELQLVRVETCGCAEGYARDATEIQNIQIADGDVCRGLSVPIYMVFPRLFTCPTLETTNFKVEFEVNIVVLLHPDHLITENFPLKLCRI

SEQ ID NO: 9191 - protein, 873 aa, Homo sapiens
MASRRKSTTPCMVLASEQDPDLELISDLDEGPPVLTPVENTRAESISSDEEVHESVDSDNQQNKKVEGGYECKYCTFQTPDLNMFTFHVDSEHPNVVLNSSYVCVECNFLTKRYDALSEHNLKYHPGEENFKLTMVKRNNQTIFEQTINDLTFDGSFVKEENAEQAESTEVSSSGISISKTPIMKMMKNKVENKRIAVHHNSVEDVPEEKENEIKPDREEIVENPSSSASESNTSTSIVNRIHPSTASTVVTPAAVLPGLAQVITAVSAQQNSNLIPKVLIPVNSIPTYNAALDNNPLLLNTYNKFPYPTMSEITVLSAQAKYTEEQIKIWFSAQRLKHGVSWTPEEVEEARRKQFNGTVHTVPQTITVIPTHISTGSNGLPSILQTCQIVGQPGLVLTQVAGTNTLPVTAPIALTVAGVPSQNNIQKSQVPAAQPTAETKPATAAVPTSQSVKHETALVNPDSFGIRAKKTKEQLAELKVSYLKNQFPHDSEIIRLMKITGLTKGEIKKWFSDTRYNQRNSKSNQCLHLNNDSSTTIIIDSSDETTESPTVGTAQPKQSWNPFPDFTPQKFKEKTAEQLRVLQASFLNSSVLTDEELNRLRAQTKLTRREIDAWFTEKKKSKALKEEKMEIDESNAGSSKEEAGETSPADESGAPKSGSTGKICKKTPEQLHMLKSAFVRTQWPSPEEYDKLAKESGLARTDIVSWFGDTRYAWKNGNLKWYYYYQSANSSSMNGLSSLRKRGRGRPKGRGRGRPRGRPRGSKRINNWDRGPSLIKFKTGTAILKDYYLKHKFLNEQDLDELVNKSHMGYEQVREWFAERQRRSELGIELFEENEEEDEVIDDQEEDEEETDDSDTWEPPRHVKRKLSKSDD

SEQ ID NO: 9192 - protein, 399 aa, Homo sapiens
MGILLGLLLLGHLTVDTYGRPILEVPESVTGPWKGDVNLPCTYDPLQGYTQVLVKWLVQRGSDPVTIFLRDSSGDHIQQAKYQGRLHVSHKVPGDVSLQLSTLEMDDRSHYTCEVTWQTPDGNQVVRDKITELRVQKLSVSKPTVTTGSGYGFTVPQGMRISLQCQARGSPPISYIWYKQQTNNQEPIKVATLSTLLFKPAVIADSGSYFCTAKGQVGSEQHSDIVKFVVKDSSKLLKTKTEAPTTMTYPLKATSTVKQSWDWTTDMDGYLGETSAGPGKSLPVFAIILIISLCCMVVFTMAYIMLCRKTSQQEHVYEAARAHAREANDSGETMRVAIFASGCSSDEPTSQNLGNNYSDEPCIGQEYQIIAQINGNYARLLDTVPLDYEFLATEGKSVC

SEQ ID NO: 9193 - protein, 321 aa, Homo sapiens
MGILLGLLLLGHLTVDTYGRPILEVPESVTGPWKGDVNLPCTYDPLQGYTQVLVKWLVQRGSDPVTIFLRDSSGDHIQQAKYQGRLHVSHKVPGDVSLQLSTLEMDDRSHYTCEVTWQTPDGNQVVRDKITELRVQKLSVSKPTVTTGSGYGFTVPQGMRISLQCQARGSPPISYIWYKQQTNNQEPIKVATLSTLLFKPAVIADSGSYFCTAKGQVGSEQHSDIVKFVVKDSSKLLKTKTEAPTTMTYPLKATSTVKQSWDWTTDMDGYLGETSAGPGKSLPVFAIILIISLCCMVVFTMAYIMLCRKTSQQEHVYEAAR

SEQ ID NO: 9194 - protein, 305 aa, Homo sapiens
MGILLGLLLLGHLTVDTYGRPILEVPESVTGPWKGDVNLPCTYDPLQGYTQVLVKWLVQRGSDPVTIFLRDSSGDHIQQAKYQGRLHVSHKVPGDVSLQLSTLEMDDRSHYTCEVTWQTPDGNQVVRDKITELRVQKHSSKLLKTKTEAPTTMTYPLKATSTVKQSWDWTTDMDGYLGETSAGPGKSLPVFAIILIISLCCMVVFTMAYIMLCRKTSQQEHVYEAARAHAREANDSGETMRVAIFASGCSSDEPTSQNLGNNYSDEPCIGQEYQIIAQINGNYARLLDTVPLDYEFLATEGKSVC

SEQ ID NO: 9195 - protein, 974 aa, Homo sapiens
MAARWSSENVVVEFRDSQATAMSVDCLGQHAVLSGRRFLYIVNLDAPFEGHRKISRQSKWDIGAVQWNPHDSFAHYFAASSNQRVDLYKWKDGSGEVGTTLQGHTRVISDLDWAVFEPDLLVTSSVDTYIYIWDIKDTRKPTVALSAVAGASQVKWNKKNANCLATSHDGDVRIWDKRKPSTAVEYLAAHLSKIHGLDWHPDSEHILATSSQDNSVKFWDYRQPRKYLNILPCQVPVWKARYTPFSNGLVTVMVPQLRRENSLLLWNVFDLNTPVHTFVGHDDVVLEFQWRKQKEGSKDYQLVTWSRDQTLRMWRVDSQMQRLCANDILDGVDEFIESISLLPEPEKTLHTEDTDHQHTASHGEEEALKEDPPRNLLEERKSDQLGLPQTLQQEFSLINVQIRNVNVEMDAADRSCTVSVHCSNHRVKMLVKFPAQYPNNAAPSFQFINPTTITSTMKAKLLKILKDTALQKVKRGQSCLEPCLRQLVSCLESFVNQEDSASSNPFALPNSVTPPLPTFARVTTAYGSYQDANIPFPRTSGARFCGAGYLVYFTRPMTMHRAVSPTEPTPRSLSALSAYHTGLIAPMKIRTEAPGNLRLYSGSPTRSEKEQVSISSFYYKERKSRRWKSKREGSDSGNRQIKAAGKVIIQDIACLLPVHKSLGELYILNVNDIQETCQKNAASALLVGRKDLVQVWSLATVATDLCLGPKSDPDLETPWARHPFGRQLLESLLAHYCRLRDVQTLAMLCSVFEAQSRPQGLPNPFGPFPNRSSNLVVSHSRYPSFTSSGSCSSMSDPGLNTGGWNIAGREAEHLSSPWGESSPEELRFGSLTYSDPRERERDQHDKNKRLLDPANTQQFDDFKKCYGEILYRWGLREKRAEVLKFVSCPPDPHKGIEFGVYCSHCRSEVRGTQCAICKGFTFQCAICHVAVRGSSNFCLTCGHGGHTSHMMEWFRTQEVCPTGCGCHCLLESTF

SEQ ID NO: 9196 - protein, 571 aa, Homo sapiens
MAARWSSENVVVEFRDSQATAMSVDCLGQHAVLSGRRFLYIVNLDAPFEGHRKISRQSKWDIGAVQWNPHDSFAHYFAASSNQRVDLYKWKDGSGEVGTTLQGHTRVISDLDWAVFEPDLLVTSSVDTYIYIWDIKDTRKPTVALSAVAGASQVKWNKKNANCLATSHDGDVRIWDKRKPSTAVEYLAAHLSKIHGLDWHPDSEHILATSSQDNSVKFWDYRQPRKYLNILPCQVPVWKARYTPFSNGLVTVMVPQLRRENSLLLWNVFDLNTPVHTFVGHDDVVLEFQWRKQKEGSKDYQLVTWSRDQTLRMWRVDSQMQRLCANDILDGVDEFIESISLLPEPEKTLHTEDTDHQHTASHGEEEALKEDPPRNLLEERKSDQLGLPQTLQQEFSLINVQIRNVNVEMDAADRSCTVSVHCSNHRVKMLVKFPAQYPNNAAPSFQFINPTTITSTMKAKLLKILKDTALQKVKRGQSCLEPCLRQLVSCLESFVNQEDSASSNPFALPNSVTPPLPTFARVTTAYGSYQDANIPFPRTSGARFCGAGYLVYFTRPMTMHRAVSPTEPTPR

SEQ ID NO: 9197 - protein, 566 aa, Homo sapiens
MDAADRSCTVSVHCSNHRVKMLVKFPAQYPNNAAPSFQFINPTTITSTMKAKLLKILKDTALQKVKRGQSCLEPCLRQLVSCLESFVNQEDSASSNPFALPNSVTPPLPTFARVTTAYGSYQDANIPFPRTSGARFCGAGYLVYFTRPMTMHRAVSPTEPTPRSLSALSAYHTGLIAPMKIRTEAPGNLRLYSGSPTRSEKEQVSISSFYYKERKSRRWKSKREGSDSGNRQIKAAGKVIIQDIACLLPVHKSLGELYILNVNDIQETCQKNAASALLVGRKDLVQVWSLATVATDLCLGPKSDPDLETPWARHPFGRQLLESLLAHYCRLRDVQTLAMLCSVFEAQSRPQGLPNPFGPFPNRSSNLVVSHSRYPSFTSSGSCSSMSDPGLNTGGWNIAGREAEHLSSPWGESSPEELRFGSLTYSDPRERERDQHDKNKRLLDPANTQQFDDFKKCYGEILYRWGLREKRAEVLKFVSCPPDPHKGIEFGVYCSHCRSEVRGTQCAICKGFTFQCAICHVAVRGSSNFCLTCGHGGHTSHMMEWFRTQEVCPTGCGCHCLLESTF

SEQ ID NO: 9198 - protein, 419 aa, Homo sapiens
MTGLQPVWIIIIFNYRSLSALSAYHTGLIAPMKIRTEAPGNLRLYSGSPTRSEKEQVSISSFYYKERKSRRWKSKREGSDSGNRQIKAAGKVIIQDIACLLPVHKSLGELYILNVNDIQETCQKNAASALLVGRKDLVQVWSLATVATDLCLGPKSDPDLETPWARHPFGRQLLESLLAHYCRLRDVQTLAMLCSVFEAQSRPQGLPNPFGPFPNRSSNLVVSHSRYPSFTSSGSCSSMSDPGLNTGGWNIAGREAEHLSSPWGESSPEELRFGSLTYSDPRERERDQHDKNKRLLDPANTQQFDDFKKCYGEILYRWGLREKRAEVLKFVSCPPDPHKGIEFGVYCSHCRSEVRGTQCAICKGFTFQCAICHVAVRGSSNFCLTCGHGGHTSHMMEWFRTQEVCPTGCGCHCLLESTF

SEQ ID NO: 9199 - protein, 167 aa, Homo sapiens
MSLVIRNLQRVIPIRRAPLRSKIEIVRRILGVQKFDLGIICVDNKNIQHINRIYRDRNVPTDVLSFPFHEHLKAGEFPQPDFPDDYNLGDIFLGVEYIFHQCKENEDYNDVLTVTATHGLCHLLGFTHGTEAEWQQMFQKEKAVLDELGRRTGTRLQPLTRGLFGGS

SEQ ID NO: 9200 - protein, 124 aa, Homo sapiens
MSLVIRNLQRVIPIRRAPLRSKIEIVRRILGVQKFDLGIICVDNKNIQHINRIYRDRNVPTDVLSFPFHEVTATHGLCHLLGFTHGTEAEWQQMFQKEKAVLDELGRRTGTRLQPLTRGLFGGS

SEQ ID NO: 9201 - protein, 122 aa, Homo sapiens
MSLVIRNLQRVIPIRRAPLRSKIEIHLKAGEFPQPDFPDDYNLGDIFLGVEYIFHQCKENEDYNDVLTVTATHGLCHLLGFTHGTEAEWQQMFQKEKAVLDELGRRTGTRLQPLTRGLFGGS

SEQ ID NO: 9202 - protein, 79 aa, Homo sapiens
MSLVIRNLQRVIPIRRAPLRSKIEIVTATHGLCHLLGFTHGTEAEWQQMFQKEKAVLDELGRRTGTRLQPLTRGLFGGS

SEQ ID NO: 9203 - protein, 169 aa, Homo sapiens
MSLRGRFYYCRHFRGRKQARRVGELPEVTELVSGPDWNPNTSQPMPGSPAPAPRRLPGCQRHPHPFKCCPVPAPQSLPSTTRPHLPPTPQGQASRWLFLFLFQKLRGETDVCVPDACRWRRRSRETRGENQSVRAAVRSPDQAFHALVSGSRGREGRLRPQCAGSAGGA

SEQ ID NO: 9204 - protein, 180 aa, Homo sapiens
MLEGVSNEFDHFGISLPLKICLHLGWDEGLVEGKVVRLGQGIGKSICSSCQLFEEAPTQMSTVPSGLPLPILMHLCLLPVCMAHLCPASPCYFGATPGSGKFCRLITYSHSSPQLAASLRHRGREVGKDLPYPGLCPLTFHPSFFPPVEGCVSSLPGKLLSPQTIFFQILWLYSKSSLVL

SEQ ID NO: 9205 - protein, 95 aa, Homo sapiens
MAILMLSLQLILLLIPSISHEAHKTSLSSWKHDQDWANVSNMTFSNGKLRVKGIYYRNADICSRHRVTSAGLTLQDLQLWCNLRSVARGQIPSTL

SEQ ID NO: 9206 - protein, 226 aa, Homo sapiens
MSWVQAASLIQGPGDKGDVFDEEADESLLAQREWQSNMQRRVKEGYRDGIDAGKAVTLQQGFNQGYKKGAEVILNYGRLRGTLSALLSWCHLHNNNSTLINKINNLLDAVGQCEEYVLKHLKSITPPSHVVDLLDSIEDMDLCHVVPAEKKIDEAKDERLCENNAEFNKNCSKSHSGIDCSYVECCRTQEHAHSENPSPTWILEQTASLVKQLGLSVDVLQHLKQL

SEQ ID NO: 9207 - protein, 206 aa, Homo sapiens
MSWVQAASLIQGPGDKGDVFDEEADESLLAQREWQSNMQRRVKEGYRDGIDAGKAVTLQQGFNQGYKKGAEVILNYGRLRGTLRNSTDWSLLGLRAPLRSPEVGTQLLPRPLPVPGHMASGATPKQPTELEATLLSLVPQSGRATPRFPARLRAPGPGTPSHRRRFRRKPHRDPAAACPAWPPEAPSNSETHFSTYNRIIIRGGHI

SEQ ID NO: 9208 - protein, 767 aa, Homo sapiens
MTPPPPSPLLGTQVKEDRADYKEFQDFSSLPDTHNIAWDHSFYPFQEEEEHGVKGVESVLEKGVLDEGVLEAWGCCRRCRHAGWNRSQPSPELAGAVIHARAPAVGCRQRSGHLHVRLKQRLLERPCQEPLGKKYQLELPPLYERARKPEGSKNLPADGQGLRAVRADAALPVWPGGPGRPGPHAPEAGAEGQHQGQWPPADTRHLRTPKWPYKVATEEKPEAEEAEKKRQAKVQEKRLPPWKKRTLNQVHRVPWGQHRACQVMLLVSTKQLQRYLHFEKPAKPANMGQDPDCFGKSEGELATCLCGGESVVGETEAPGVRPDPRPEKDAKPAVSGCQEESWLQSEYDEMHPREEMNVPSLRSGSGCQVSGSPLAKGLHPLQPCHPHYMMWECCLFTLTLGTQACFEVCARRLKLAHFCPDTSLWSCGGQSPPVLCQLLDIISVSRDKVIGSHEKKPSSNPNQDDFHSSEYAYRCGIAEAVGLPSIPVHPIGYYDAEKLLEYESLLLQVSEPVNPELSAGPITGLLDRLSGFRDHGPPGSSCRSQRKGNGVETKDQAHRNRDPRGFQGGVLTARLFKMQVSLELFCGHQEHYLTRPVLAPGYPVHLGKAGTHWEQGPNMPTPEQHGTWGNRHLFAVLPLLFYTSLEIMSIGYSVVMAGRNVWQPTKGQMPHQPEQSCQTLALPMTIRHSWEGGAIRESSGWVSWKCHLKATEASQNPCVRATALRVGCSAVTYGVLGQAQGSAPWTSAFKTFSAGIAGLERHAWETM

SEQ ID NO: 9209 - protein, 251 aa, Homo sapiens
MQPGGTAGPEEAPMREAEAGPPQVGLSRPTCSLPASSPGPALPPGCVSRPDSGLPTTSLDSAPAQLPAALVDPQLPEAKLPRPSSGLTVASPGSAPALRWHLQAPNGLRSVGSSRPSLGLPAASAGPKRPEVGLSRPSSGLPAAFAGPSRPQVGLELGLEEQQVSLSGPSSILSAASPGAKLPRVSLSRPSSSCLPLASFSPAQPSSWLSAAFPGPAFDFWRPLQAQNLPSSGPLQARPRPRPHSGLSTPS

SEQ ID NO: 9210 - protein, 713 aa, Homo sapiens
MAKPSHSSYVLQQLNNQREWGFLCDCCIAIDDIYFQAHKAVLAACSSYFRMFFMNHQHSTAQLNLSNMKISAECFDLILQFMYLGKIMTAPSSFEQFKVAMNYLQLYNVPDCLEDIQDADCSSSKCSSSASSKQNSKMIFGVRMYEDTVARNGNEANRWCAEPSSTVNTPHNREADEESLQLGNFPEPLFDVCKKSSVSKLSTPKERVSRRFGRSFTCDSCGFGFSCEKLLDEHVLTCTNRHLYQNTRSYHRIVDIRDGKDSNIKAEFGEKDSSKTFSAQTDKYRGDTSQAADDSASTTGSRKSSTVESEIASEEKSRAAERKRIIIKMEPEDIPTDELKDFNIIKVTDKDCNESTDNDELEDEPEEPFYRYYVEEDVSIKKSGRKTLKPRMSVSADERGGLENMRPPNNSSPVQEDAENASCELCGLTITEEDLSSHYLAKHIENICACGKCGQILVKGRQLQEHAQRCGEPQDLTMNGLGNTEEKMDLEENPDEQSEIRDMFVEMLDDFRDNHYQINSIQKKQLFKHSACPFRCPNCGQRFETENLVVEHMSSCLDQDMFKSAIMEENERDHRRKHFCNLCGKGFYQRCHLREHYTVHTKEKQFVCQTCGKQFLRERQLRLHNDMHKGMARYVCSICDQGNFRKHDHVRHMISHLSAGETICQVCFQIFPNNEQLEQHMDVHLYTCGICGAKFNLRKDMRSHYNAKHLKRT

SEQ ID NO: 9211 - protein, 644 aa, Homo sapiens
MAKPSHSSYVLQQLNNQREWGFLCDCCIAIDDIYFQAHKAVLAACSSYFRMFFMNHQHSTAQLNLSNMKISAECFDLILQFMYLGKIMTAPSSFEQFKVAMNYLQLYNVPDCLEDIQDADCSSSKCSSSASSKQNSKMIFGVRMYEDTVARNGNEANRWCAEPSSTVNTPHNREADEESLQLGNFPEPLFDVCKKSSVSKLSTPKERVSRRFGRSFTCDSCGFGFSCEKLLDEHVLTCTNRHLYQNTRSYHRIVDIRDGKDSNIKAEFGEKDSSKTFSAQTDKYRGDTSQAADDSASTTGSRKSSTVESEIASEEKSRAAERKRIIIKMEPEDIPTDELKDFNIIKVTDKDCNESTDNDELEDEPEEPFYRYYVEEDVSIKKSGRKTLKPRMSVSADERGGLENMRPPNNSSPVQEDAENASCELCGLTITEEDLSSHYLAKHIENICACGKCGQILVKGRQLQEHAQRCGEPQDLTMNGLGNTEEKMDLEENPDEQSEIRDMFVEMLDDFRDNHYQINSIQKKQLFKHSACPFRCPNCGQRFETENLVVEHMSSCLDQDMFKSAIMEENERDHRRKHFCNLCGKGFYQRCHLREHYTVHTKEKQFVCQTCGKQFLRERQLRLHNDMHKGMASGEIGPSKPVEK

SEQ ID NO: 9212 - protein, 1066 aa, Homo sapiens
MEGLLHYINPAHAISLLSALNEERLKGQLCDVLLIVGDQKFRAHKNVLAASSEYFQSLFTNKENESQTVFQLDFCEPDAFDNVLNYIYSSSLFVEKSSLAAVQELGYSLGISFLTNIVSKTPQAPFPTCPNRKKVFVEDDENSSQKRSVIVCQSRNEAQGKTVSQNQPDVSHTSRPSPSIAVKANTNKPHVPKPIEPLHNLSLTEKSWPKDSSVVYAKSLEHSGSLDDPNRISLVKRNAVLPSKPLQDREAMDDKPGVSGQLPKGKALELALKRPRPPVLSVCSSSETPYLLKETNKGNGQGEDRNLLYYSKLGLVIPSSGSGSGNQSIDRSGPLVKSLLRRSLSMDSQVPVYSPSIDLKSSQGSSSVSSDAPGNVLCALSQKSSLKDCSEKTALDDRPQVLQPHRLRSFSASQSTDREGASPVTEVRIKTEPSSPLSDPSDIIRVTVGDAATTAAASSSSVTRDLSLKTEDDQKDMSRLPAKRRFQADRRLPFKKLKVNEHGSPVSEDNFEEGSSPTLLDADFPDSDLNKDEFGELEGTRPNKKFKCKHCLKIFRSTAGLHRHVNMYHNPEKPYACDICHKRFHTNFKVWTHCQTQHGIVKNPSPASSSHAVLDEKFQRKLIDIVREREIKKALIIKLRRGKPGFQGQSSSQAQQVIKRNLRSRAKGAYICTYCGKAYRFLSQFKQHIKMHPGEKPLGVNKVAKPKEHAPLASPVENKEVYQCRLCNAKLSSLLEQGSHERLCRNAAVCPYCSLRFFSPELKQEHESKCEYKKLTCLECMRTFKSSFSIWRHQVEVHNQNNMAPTENFSLPVLDHNGDVTGSSRPQSQPEPNKVNHIVTTKDDNVFSDSSEQVNFDSEDSSCLPEDLSLSKQLKIQVKEEPVEEAEEEAPEASTAPKEAGPSKEASLWPCEKCGKMFTVHKQLERHQELLCSVKPFICHVCNKAFRTNFRLWSHFQSHMSQASEESAHKESEVCPVPTNSPSPPPLPPPPPLPKIQPLEPDSPTGLSENPTPATEKLFVPQESDTLFYHAPPLSAITFKRQFMCKLCHRTFKTAFSLWSHEQTHN

SEQ ID NO: 9213 - protein, 865 aa, Homo sapiens
MEGLLHYINPAHAISLLSALNEERLKGQLCDVLLIVGDQKFRAHKNVLAASSEYFQSLFTNKENESQTVFQLDFCEPDAFDNVLNYIYSSSLFVEKSSLAAVQELGYSLGISFLTNIVSKTPQAPFPTCPNRKKVFVEDDENSSQKRSVIVCQSRNEAQGKTVSQNQPDVSHTSRPSPSIAVKANTNKPHVPKPIEPLHNLSLTEKSWPKDSSVVYAKSLEHSGSLDDPNRISLVKRNAVLPSKPLQDREAMDDKPGVSGQLPKGKALELALKRPRPPVLSVCSSSETPYLLKETNKGNGQGEDRNLLYYSKLGLVIPSSGSGSGNQSIDRSGPLVKSLLRRSLSMDSQVPVYSPSIDLKSSQGSSSVSSDAPGNVLCALSQKSSLKDCSEKTALDDRPQVLQPHRLRSFSASQSTDREGASPVTEVRIKTEPSSPLSDPSDIIRVTVGDAATTAAASSSSVTRDLSLKTEDDQKDMSRLPAKRRFQADRRLPFKKLKVNEHGSPVSEDNFEEGSSPTLLDADFPDSDLNKDEFEQGSHERLCRNAAVCPYCSLRFFSPELKQEHESKCEYKKLTCLECMRTFKSSFSIWRHQVEVHNQNNMAPTENFSLPVLDHNGDVTGSSRPQSQPEPNKVNHIVTTKDDNVFSDSSEQVNFDSEDSSCLPEDLSLSKQLKIQVKEEPVEEAEEEAPEASTAPKEAGPSKEASLWPCEKCGKMFTVHKQLERHQELLCSVKPFICHVCNKAFRTNFRLWSHFQSHMSQASEESAHKESEVCPVPTNSPSPPPLPPPPPLPKIQPLEPDSPTGLSENPTPATEKLFVPQESDTLFYHAPPLSAITFKRQFMCKLCHRTFKTAFSLWSHEQTHN

SEQ ID NO: 9214 - protein, 939 aa, Homo sapiens
MATSQYFDFAQGGGPQYSAQPPTLPLPTVGASYTAQPTPGMDPAVNPAFPPAAPAGYGGYQPHSGQDFAYGSRPQEPVPTATTMATYQDSYSYGQSAAARSYEDRPYFQSAALQSGRMTAADSGQPGTQEACGQPSPHGSHSHAQPPQQAPIVESGQPASTLSSGYTYPTATGVQPESSASIVTSYPPPSYNPTCTAYTAPSYPNYDASVYSAASPFYPPAQPPPPPGPPQQLPPPPAPAGSGSSPRADSKPPLPSKLPRPKAGPRQLQLHYCDICKISCAGPQTYREHLGGQKHRKKEAAQKTGVQPNGSPRGVQAQLHCDLCAVSCTGADAYAAHIRGSKHQKVFKLHAKLGKPIPTLEPALATESPPGAEAKPTSPTGPSVCASSRPALAKRPVASKALCEGPPEPQAAGCRPQWGKPAQPKLEGPGAPTQGGSKEAPAGCSDAQPVGPEYVEEVFSDEGRVLRFHCKLCECSFNDLNAKDLHVRGRRHRLQYRKKVNPDLPIATEPSSRARKVLEERMRKQRHLAEERLEQLRRWHAERRRLEEEPPQDVPPHAPPDWAQPLLMGRPESPASAPLQPGRRPASSDDRHVMCKHATIYPTEQELLAVQRAVSHAERALKLVSDTLAEEDRGRREEEGDKRSSVAPQTRVLKGVMRVGILAKGLLLRGDRNVRLALLCSEKPTHSLLRRIAQQLPRQLQMVTEDEYEVSSDPEANIVISSCEEPRMQVTISVTSPLMREDPSTDPGVEEPQADAGDVLSPKKCLESLAALRHARWFQARASGLQPCVIVIRVLRDLCRRVPTWGALPAWAMELLVEKAVSSAAGPLGPGDAVRRVLECVATGTLLTDGPGLQDPCERDQTDALEPMTLQEREDVTASAQHALRMLAFRQTHKVLGMDLLPPRHRLGARFRKRQRGPGEGEEGAGEKKRGRRGGEGLV

SEQ ID NO: 9215 - protein, 70 aa, Homo sapiens
MATSQYFDFAQGGGPQYSPEVETTPPALASGLPCALPWTVGCSGSDAVTALCPSLRGLACICSILWDPAW

SEQ ID NO: 9216 - protein, 366 aa, Homo sapiens
MATSQYFDFAQGGGPQYSAQPPTLPLPTVGASYTAQPTPGMDPAVNPAFPPAAPAGYGGYQPHSGQDFAYGSRPQEPVPTATTMATYQDSYSYGQSAAARSYEDRPYFQSAALQSGRMTAADSGQPGTQEACGQPSPHGSHSHAQPPQQAPIVESGQPASTLSSGYTYPTATGVQPESSASIVTSYPPPSYNPTCTAYTAPSYPNYDASVYSAASPFYPPAQPPPPPGPPQQLPPPPAPAGSGSSPRADSKPPLPSKLPRPKAGPRQLQLHYCDICKISCAGPQTYREHLGGQKHRKKEAAQKTGVQPNGSPRGVQAQLHCDLCAVSCTGADAYAAHIRGSKHQKGLLSHRQQAADPSGGNQPNLN

SEQ ID NO: 9217 - protein, 697 aa, Homo sapiens
MAETSPEPSGQLVVHSDAHSDTVLASFEDQRKKGFLCDITLIVENVHFRAHKALLAASSEYFSMMFAEEGEIGQSIYMLEGMVADTFGILLEFIYTGYLHASEKSTEQILATAQFLKVYDLVKAYTDFQNNHSSPKPTTLNTAGAPVVVISNKKNDPPKRKRGRPKKVNTLQEEKSELAAEEEIQLRVNNSVQNRQNFVVKGDSGVLNEQIAAKEKEESEPTCEPSREEEMPVEKDENYDPKTEDGQASQSRYSKRRIWRSVKLKDYKLVGDQEDHGSAKRICGRRKRPGGPEARCKDCGKVFKYNHFLAIHQRSHTGERPFKCNECGKGFAQKHSLQVHTRMHTGERPYTCTVCSKALTTKHSLLEHMSLHSGQKSFTCDQCGKYFSQNRQLKSHYRVHTGHSLPECKDCHRKFMDVSQLKKHLRTHTGEKPFTCEICGKSFTAKSSLQTHIRIHRGEKPYSCGICGKSFSDSSAKRRHCILHTGKKPFSCPECNLQFARLDNLKAHLKIHSKEKHASDASSISGSSNTEEVRNILQLQPYQLSTSGEQEIQLLVTDSVHNINFMPGPSQGISIVTAESSQNMTADQAANLTLLTQQPEQLQNLILSAQQEQTEHIQSLNMIESQMGPSQTEPVHVITLSKETLEHLHAHQEQTEELHLATSTSDPAQHLQLTQEPGPPPPTHHVPQPTPLGQEQS

SEQ ID NO: 9218 - protein, 333 aa, Homo sapiens
MAETSPEPSGQLVVHSDAHSDTVLASFEDQRKKGFLCDITLIVENVHFRAHKALLAASSEYFSMMFAEEGEIGQSIYMLEGMVADTFGILLEFIYTGYLHASEKSTEQILATAQFLKVYDLVKAYTDFQNNHSSPKPTTLNTAGAPVVVISNKKNDPPKRKRGRPKKVNTLQEEKSELAAEEEIQLRVNNSVQNRQNFVVKGDSGVLNEQIAAKEKEESEPTCEPSREEEMPVEKDENYDPKTEDGQASQSRYSKRRIWRSVKLKDYKLVGDQEDHGSAKRICGRRKRPGGPEARCKDCGKVFKYNHFLAIHQRSHTGNDVFKADCSVLQNWE

SEQ ID NO: 9219 - protein, 208 aa, Homo sapiens
MSPTKDSHPSPHFPRDSGIHAPTPPDSGALTLSPPVSQGPGVGPRTGRGNRLCRPPGRSAARSFCLLPGPPLGTGALGSPRAAQGLGFRGSGQRARHNSFTSPSPPGAHHPLGTHTRALPPPLARCPCAALLAGRECHGGPSPAAPRPLPGTSLTWPSRAPLPRPPPRERQGPGDRSPSPSAPSCPGVGASSPRRRKPREAAGLTPDG

SEQ ID NO: 9220 - protein, 195 aa, Homo sapiens
MGVWGKKHLRLTHAPSPTFSHLPPSPQAGEPGIDGISLAVVCAAFIRIHPARRHPARNGSRLACTPTPRPNAGLEVVSSARVAASLPSEGGWTSGAPRSSGLSLPGSAWQPPPLPVLRKPAWPGSPAVKNESKFPNRGSRNFPRRRLPPAPVSGEPPERCKLAREIRWRLWKAHEGWGGGAKRPLGDPAWSGVKR

SEQ ID NO: 9221 - protein, 646 aa, Homo sapiens
MSTAPSLSALRSSKHSGGGGGGGGGGGADPAWTSALSGNSSGPGPGSSPAGSTKPFVHAVPPSDPLRQANRLPIKVLKMLTARTGHILHPEYLQPLPSTPVSPIELDAKKSPLALLAQTCSQIGKPDPSPSSKLSSVASNGGGAGGAGGGAAGDKDTKSGPLKLSDIGVEDKSSFKPYSKPGSDKKEPGGGGGGGGGGGGGGGGVSSEKSGFRVPSATCQPFTPRTGSPSSSASACSPGGMLSSAGGAPEGKDDKKDTDVGGGGKGTGGASAEGGPTGLAHGRISCGGGINVDVNQHPDGGPGGKALGSDCGGSSGSSSGSGPSAPTSSSVLGSGLVAPVSPYKPGQTVFPLPPAGMTYPGSLAGAYAGYPPQFLPHGVALDPTKPGSLVGAQLAAAAAGSLGCSKPAGSSPLAGASPPSVMTASLCRDPYCLSYHCASHLAGAAAASASCAHDPAAAAAALKSGYPLVYPTHPLHGVHSSLTAAAAAGATPPSLAGHPLYPYGFMLPNDPLPHICNWVSANGPCDKRFATSEELLSHLRTHTAFPGTDKLLSGYPSSSSLASAAAAAMACHMHIPTSGAPGSPGTLALRSPHHALGLSSRYHPYSKSPLPTPGAPVPVPAATGPYYSPYALYGQRLTTASALGYQ

SEQ ID NO: 9222 - protein, 609 aa, Homo sapiens
MSTAPSLSALRSSKHSGGGGGGGGGGGADPAWTSALSGNSSGPGPGSSPAGSTKPFVHAVPPSDPLRQANRLPIKVLKMLTARTGHILHPEYLQPLPSTPVSPIELDAKKSPLALLAQTCSQIGKPDPSPSSKLSSVASNGGGAGGAGGGAAGDKDTKSGPLKLSDIGVEDKSSFKPYSKPGSDKKEPGGGGGGGGGGGGGGGGVSSEKSGFRVPSATCQPFTPRTGSPSSSASAEGGPTGLAHGRISCGGGINVDVNQHPDGGPGGKALGSDCGGSSGSSSGSGPSAPTSSSVLGSGLVAPVSPYKPGQTVFPLPPAGMTYPGSLAGAYAGYPPQFLPHGVALDPTKPGSLVGAQLAAAAAGSLGCSKPAGSSPLAGASPPSVMTASLCRDPYCLSYHCASHLAGAAAASASCAHDPAAAAAALKSGYPLVYPTHPLHGVHSSLTAAAAAGATPPSLAGHPLYPYGFMLPNDPLPHICNWVSANGPCDKRFATSEELLSHLRTHTAFPGTDKLLSGYPSSSSLASAAAAAMACHMHIPTSGAPGSPGTLALRSPHHALGLSSRYHPYSKSPLPTPGAPVPVPAATGPYYSPYALYGQRLTTASALGYQ

SEQ ID NO: 9223 - protein, 283 aa, Homo sapiens
MSTAPSLSALRSSKHSGGGGGGGGGGGADPAWTSALSGNSSGPGPGSSPAGSTKPFVHAVPPSDPLRQANRLPIKVLKMLTARTGHILHPEYLQPLPSTPVSPIELDAKKSPLALLAQTCSQIGKPDPSPSLAGHPLYPYGFMLPNDPLPHICNWVSANGPCDKRFATSEELLSHLRTHTAFPGTDKLLSGYPSSSSLASAAAAAMACHMHIPTSGAPGSPGTLALRSPHHALGLSSRYHPYSKSPLPTPGAPVPVPAATGPYYSPYALYGQRLTTASALGYQ

SEQ ID NO: 9224 - protein, 1300 aa, Homo sapiens
MEEASLCLGVSSAEPEAEPHLSGPVLNGQYAMSQKLHQITSQLSHAFPELHPRPNPEEKPPASLEEKAHVPMSGQPMGSQMALLANQLGREVDTSLNGRVDLQQFLNGQNLGIMSQMSDIEDDARKNRKYPCPLCGKRFRFNSILSLHMRTHTGEKPFKCPYCDHRAAQKGNLKIHLRTHKLGNLGKGRGRVREENRLLHELEERAILRDKQLKGSLLQPRPDLKPPPHAQQAPLAACTLALQANHSVPDVAHPVPSPKPASVQEDAVAPAAGFRCTFCKGKFKKREELDRHIRILHKPYKCTLCDFAASQEEELISHVEKAHITAESAQGQGPNGGGEQSANEFRCEVCGQVFSQAWFLKGHMRKHKDSFEHCCQICGRRFKEPWFLKNHMKVHLNKLSVKNKSPSDPEVPVPMGGMSQEAHANLYSRYLSCLQSGFMTPDKAGLSEPSQLYGKGELPMKEKEALGKLLSPISSMAHGVPEGDKHSLLGCLNLVPPLKSSCIERLQAAAKAAEMDPVNSYQAWQLMARGMAMEHGFLSKEHPLQRNHEDTLANAGVLFDKEKREYVLVGADGSKQKMPADLVHSTKVGSQRDLPSKLDPLESSRDFLSHGLNQTLEYNLQGPGNMKEKPTECPDCGRVFRTYHQVVVHSRVHKRDRKGEEDGLHVGLDERRGSGSDQESQSVSRSTTPGSSNVTEESGVGGGLSQTGSAQEDSPHPSSPSSSDIGEEAGRSAGVQQPALLRDRSLGSAMKDCPYCGKTFRTSHHLKVHLRIHTGEKPYKCPHCDYAGTQSASLKYHLERHHRERQNGAGPLSGQPPNQDHKDEMSSKASLFIRPDILRGAFKGLPGIDFRGGPASQQWTSGVLSSGDHSGQATGMSSEVPSDALKGTDLPSKSTHFSEIGRAYQSIVSNGVNFQGSLQAFMDSFVLSSLKKEKDMKDKALADPPSMKVHGVDGGEEKPSGKSSQRKSEKSQYEPLDLSVRPDAASLPGSSVTVQDSIAWHGCLFCAFTTSSMELMALHLQANHLGKAKRKDNTIGVTVNCKDQAREASKMALLPSLQSNKDLGLSNMISSLDSASEKMAQGQLKETLGEQKSGAWTGHVDPAFCNFPSDFYKQFGVYPGMVGSGASSSCPNKEPDGKAHSEEDVPILIPETTSKNTTDDLSDIASSEDMDSSKGENNDEEDVETEPEMMTKPLSALSKDSSSDGGDSLQPTGTSQPVQGLVSPLSQAPEKQWHSQGLLQAQDPLAGLPKPERGPQSLDKPMNMLSVLRAYSSDGLAAFNGLASSTANSGCIKRPDLCGK

SEQ ID NO: 9225 - protein, 522 aa, Homo sapiens
MAVSHLPTMVQESVTFKDVAILFTQEEWGQLSPAQRALYRDVMLENYSNLVSLGLLGPKPDTFSQLEKREVWMPEDTPGGFCLDWMTMPASKKSTVKAEIPEEELDQWTIKERFSSSSHWKCASLLEWQCGGQEISLQRVVLTHPNTPSQECDESGSTMSSSLHSDQSQGFQPSKNAFECSECGKVFSKSSTLNKHQKIHNEKNANQKIHIKEKRYECRECGKAFHQSTHLIHHQRIHTGEKPYECKECGKAFSVSSSLTYHQKIHTGEKPFECNLCGKAFIRNIHLAHHHRIHTGEKPFKCNICEKAFVCRAHLTKHQNIHSGEKPYKCNECGKAFNQSTSFLQHQRIHTGEKPFECNECGKAFRVNSSLTEHQRIHTGEKPYKCNECGKAFRDNSSFARHRKIHTGEKPYRCGLCEKAFRDQSALAQHQRIHTGEKPYTCNICEKAFSDHSALTQHKRIHTREKPYKCKICEKAFIRSTHLTQHQRIHTGEKPYKCNKCGKAFNQTANLIQHQRHHIGEK

SEQ ID NO: 9226 - protein, 632 aa, Homo sapiens
MQREEGFNTKMADGPDEYDTEAGCVPLLHPEEIKPQSHYNHGYGEPLGRKTHIDDYSTWDIVKATQYGIYERCRELVEAGYDVRQPDKENVTLLHWAAINNRIDLVKYYISKGAIVDQLGGDLNSTPLHWATRQGHLSMVVQLMKYGADPSLIDGEGCSCIHLAAQFGHTSIVAYLIAKGQDVDMMDQNGMTPLMWAAYRTHSVDPTRLLLTFNVSVNLGDKYHKNTALHWAVLAGNTTVISLLLEAGANVDAQNIKGESALDLAKQRKNVWMINHLQEARQAKGYDNPSFLRKLKADKEFRQKVMLGTPFLVIWLVGFIADLNIDSWLIKGLMYGGVWATVQFLSKSFFDHSMHSALPLGIYLATKFWMYVTWFFWFWNDLNFLFIHLPFLANSVALFYNFGKSWKSDPGIIKATEEQKKKTIVELAETGSLDLSIFCSTCLIRKPVRSKHCGVCNRCIAKFDHHCPWVGNCVGAGNHRYFMGYLFFLLFMICWMIYGCISYWGLHCETTYTKDGFWTYITQIATCSPWMFWMFLNSVFHFMWVAVLLMCQMYQISCLGITTNERMNARRYKHFKVTTTSIESPFNHGCVRNIIDFFEFRCCGLFRPVIVDWTRQYTIEYDQISGSGYQLV

SEQ ID NO: 9227 - protein, 216 aa, Homo sapiens
MSTIPKRAVCPFSTQRYGIYERCRELVEAGYDVRQPDKENVTLLHWAAINNRIDLVKYYISKGAIVDQLGGDLNSTPLHWATRQGHLSMVVQLMKYGADPSLIDGEGCSCIHLAAQFGHTSIVAYLIAKGQDVDMMDQNGMTPLMWAAYRTHSVDPTRLLLTFNVSVNLGDKYHKNTALHWAVLAGNTTVISLLLEAGANVDAQNIKAILRCHMAL

SEQ ID NO: 9228 - protein, 203 aa, Homo sapiens
MQREEGFNTKMADGPDEYDTEAGCVPLLHPEEIKPQSHYNHGYGEPLGRKTHIDDYSTWDIVKATQYGIYERCRELVEAGYDVRQPDKENVTLLHWAAINNRIDLVKYYISKGAIVDQLGGDLNSTPLHWATRQGHLSMVVQLMKYGADPSLIDGEGCSCIHLAAQFGHTSIVAYLIAKGQDVDMMDQNGMTPLMWAAYRTHS

SEQ ID NO: 9229 - protein, 426 aa, Homo sapiens
MLENYGAVASLAAFPFPKPALISQLERGETPWCSVPRGALDGEAPRGISSGYPFLKPAGISHPEQVEEPLNLKLQGEGPSLICPEGVLKRKKEDFILKEEIIEEAQDLMVLSSGPQWCGSQELWFGKTCEEKSRLGRWPGYLNGGRMESSTNDIIEVIVKDEMISVEESSGNTDVNNLLGIHHKILNEQIFYICEECGKCFDQNEDFDQHQKTHNGEKVYGCKECGKAFSFRSHCIAHQRIHSGVKPYECQECAKAFVWKSNLIRHQRIHTGEKPFECKECGKGFSQNTSLTQHQRIHTGEKPYTCKECGKSFTRNPALLRHQRMHTGEKPYECKDCGKGFMWNSDLSQHQRVHTGDKPHECTDCGKSFFCKAHLIRHQRIHTGERPYKCNDCGKAFSQNSVLIKHQRRHARDKPYNCQISHLLEH

SEQ ID NO: 9230 - protein, 318 aa, Homo sapiens
MVLSSGPQWCGSQELWFGKTCEEKSRLGRWPGYLNGGRMESSTNDIIEVIVKDEMISVEESSGNTDVNNLLGIHHKILNEQIFYICEECGKCFDQNEDFDQHQKTHNGEKVYGCKECGKAFSFRSHCIAHQRIHSGVKPYECQECAKAFVWKSNLIRHQRIHTGEKPFECKECGKGFSQNTSLTQHQRIHTGEKPYTCKECGKSFTRNPALLRHQRMHTGEKPYECKDCGKGFMWNSDLSQHQRVHTGDKPHECTDCGKSFFCKAHLIRHQRIHTGERPYKCNDCGKAFSQNSVLIKHQRRHARDKPYNCQISHLLEH

SEQ ID NO: 9231 - protein, 452 aa, Homo sapiens
MAAVALASGTRLGLVLELLPGQPALPRARRESVTFEDVAVYFSENEWIGLGPAQRALYRDVMLENYGAVASLAFPFPKPALISQLERGETPWCSVPRGALDGEAPRGISSEGVLKRKKEDFILKEEIIEEAQDLMVLSSGPQWCGSQELWFGKTCEEKSRLGRWPGYLNGGRMESSTNDIIEVIVKDEMISVEESSGNTDVNNLLGIHHKILNEQIFYICEECGKCFDQNEDFDQHQKTHNGEKVYGCKECGKAFSFRSHCIAHQRIHSGVKPYECQECAKAFVWKSNLIRHQRIHTGEKPFECKECGKGFSQNTSLTQHQRIHTGEKPYTCKECGKSFTRNPALLRHQRMHTGEKPYECKDCGKGFMWNSDLSQHQRVHTGDKPHECTDCGKSFFCKAHLIRHQRIHTGERPYKCNDCGKAFSQNSVLIKHQRRHARDKPYNCQISHLLEH

SEQ ID NO: 9232 - protein, 781 aa, Homo sapiens
MATQGHLTFKDVAIEFSQEEWKCLEPVQKALYKDVMLENYRNLVFLGISPKCVIKELPPTENSNTGERFQTVALERHQSYDIENLYFREIQKHLHDLEFQWKDGETNDKEVPVPHENNLTGKRDQHSQGDVENNHIENQLTSNFESRLAELQKVQTEGRLYECNETEKTGNNGCLVSPHIREKTYVCNECGKAFKASSSLINHQRIHTTEKPYKCNECGKAFHRASLLTVHKVVHTRGKSYQCDVCGKIFRKNSYFVRHQRSHTGQKPYICNECGKSFSKSSHLAVHQRIHTGEKPYKCNLCGKSFSQRVHLRLHQTVHTGERPFKCNECGKTFKRSSNLTVHQVIHAGKKPYKCDVCGKAFRHRSNLVCHRRIHSGEKQYKCNECGKVFSKRSSLAVHRRIHTVEKPCKCNECGKVFSKRSSLAVHQRIHTGQKTYKCNKCGKVYSKHSHLAVHWRIHTGEKAYKCNECGKVFSIHSRLAAHQRIHTGEKPYKCNECGKVFSQHSRLAVHRRIHTGEKPYKCKECGKVFSDRSAFARHRRIHTGEKPYKCKECGKVFSQCSRLTVHRRIHSGEKPYKCNECGKVYSQYSHLVGHRRVHTGEKPYKCHECGKAFNQGSTLNRHQRIHTGEKPYKCNQCGNSFSQRVHLRLHQTVHTGDRPYKCNECGKTFKRSSNLTAHQIIHAGKKPYKCDECGKVFRHSSHLVSHQRIHTGEKRYKCIECGKAFGRLFSLSKHQRIHSGKKPYKCNECGKSFICRSGLTKHRIRHTGESLTTKLNVTRP

SEQ ID NO: 9233 - protein, 2146 aa, Homo sapiens
MYPNWGRYGGSSHYPPPPVPPPPPVALPEASPGPGYSSSTTPAAPSSSGFMSFREQHLAQLQQLQQMHQKQMQCVLQPHHLPPPPLPPPPVMPGGGYGDWQPPPPPMPPPPGPALSYQKQQQYKHQMLHHQRDGPPGLVPMELESPPESPPVPPGSYMPPSQSYMPPPQPPPSYYPPTSSQPYLPPAQPSPSQSPPSQSYLAPTPSYSSSSSSSQSYLSHSQSYLPSSQASPSRPSQGHSKSQLLAPPPPSAPPGNKTTVQQEPLESGAKNKSTEQQQAAPEPDPSTMTPQEQQQYWYRQHLLSLQQRTKVHLPGHKKGPVVAKDTPEPVKEEVTVPATSQVPESPSSEEPPLPPPNEEVPPPLPPEEPQSEDPEEDARLKQLQAAAAHWQQHQQHRVGFQYQGIMQKHTQLQQILQQYQQIIQPPPHIQTMSVDMQLRHYEMQQQQFQHLYQEWEREFQLWEEQLHSYPHKDQLQEYEKQWKTWQGHMKATQSYLQEKVNSFQNMKNQYMGNMSMPPPFVPYSQMPPPLPTMPPPVLPPSLPPPVMPPALPATVPPPGMPPPVMPPSLPTSVPPPGMPPSLSSAGPPPVLPPPSLSSAGPPPVLPPPSLSSTAPPPVMPLPPLSSATPPPGIPPPGVPQGIPPQLTAAPVPPASSSQSSQVPEKPRPALLPTPVSFGSAPPTTYHPPLQSAGPSEQVNSKAPLSKSALPYSSFSSDQGLGESSAAPSQPITAVKDMPVRSGGLLPDPPRSSYLESPRGPRFDGPRRFEDLGSRCEGPRPKGPRFEGNRPDGPRPRYEGHPAEGTKSKWGMIPRGPASQFYITPSTSLSPRQSGPQWKGPKPAFGQQHQQQPKSQAEPLSGNKEPLADTSSNQQKNFKMQSAAFSIAADVKDVKAAQSNENLSDSQQEPPKSEVSEGPVEPSNWDQNVQSMETQIDKAQAVTQPVPLANKPVPAQSTFPSKTGGMEGGTAVATSSLTADNDFKPVGIGLPHSENNQDKGLPRPDNRDNRLEGNRGNSSSYRGPGQSRMEDTRDKGLVNRGRGQAISRGPGLVKQEDFRDKMMGRREDSREKMNRGEGSRDRGLVRPGSSREKVPGGLQGSQDRGAAGSRERGPPRRAGSQERGPLRRAGSRERIPPRRAGSRERGPPRGPGSRERGLGRSDFGRDRGPFRPEPGDGGEKMYPYHRDEPPRAPWNHGEERGHEEFPLDGRNAPMERERLDDWDRERYWRECERDYQDDTLELYNREDRFSAPPSRSHDGDRRGPWWDDWERDQDMDEDYNREMERDMDRDVDRISRPMDMYDRSLDNEWDRDYGRPLDEQESQFRERDIPSLPPLPPLPPLPPLDRYRDDRWREERNREHGYDRDFRDRGELRIREYPERGDTWREKRDYVPDRMDWERERLSDRWYPSDVDRHSPMAEHMPSSHHSSEMMGSDASLDSDQGLGGVMVLSQRQHEIILKAAQELKMLREQKEQLQKMKDFGSEPQMADHLPPQESRLQNTSSRPGMYPPPGSYRPPPPMGKPPGSIVRPSAPPARSSVPVTRPPVPIPPPPPPPPLPPPPPVIKPQTSAVEQERWDEDSFYGLWDTNDEQGLNSEFKSETAAIPSAPVLPPPPVHSSIPPPGPVPMGMPPMSKPPPVQQTVDYGHGRDISTNKVEQIPYGERITLRPDPLPERSTFETEHAGQRDRYDRERDREPYFDRQSNVIADHRDFKRDRETHRDRDRDRGVIDYDRDRFDRERRPRDDRAQSYRDKKDHSSSRRGGFDRPSYDRKSDRPVYEGPSMFGGERRTYPEERMPLPAPSLSHQPPPAPRVEKKPESKNVDDILKPPGRESRPERIVVIMRGLPGSGKTHVAKLIRDKEVEFGGPAPRVLSLDDYFITEVEKEEKDPDSGKKVKKKVMEYEYEAEMEETYRTSMFKTFKKTLDDGFFPFIILDAINDRVRHFDQFWSAAKTKGFEVYLAEMSADNQTCGKRNIHGRKLKEINKMADHWETAPRHMMRLDIRSLLQDAAIEEVEMEDFDANIEEQKEEKKDAEEEESELGYIPKSKWEMDTSEAKLDKLDGLRTGTKRKRDWEAIASRMEDYLQLPDDYDTRASEPGKKRVRWADLEEKKDADRKRAIGFVVGQTDWEKITDESGHLAEKALNRTKYI

SEQ ID NO: 9234 - protein, 1862 aa, Homo sapiens
MYPNWGRYGGSSHYPPPPVPPPPPVALPEASPGPGYSSSTTPAAPSSSGFMSFREQHLAQLQQLQQMHQKQMQCVLQPHHLPPPPLPPPPVMPGGGYGDWQPPPPPMPPPPGPALSYQKQQQYKHQMLHHQRDGPPGLVPMELESPPESPPVPPGSYMPPSQSYMPPPQPPPSYYPPTSSQPYLPPAQPSPSQSPPSQSYLAPTPSYSSSSSSSQSYLSHSQSYLPSSQASPSRPSQGHSKSQLLAPPPPSAPPGNKTTVQQEPLESGAKNKSTEQQQAAPEPDPSTMTPQEQQQYWYRQHLLSLQQRTKVHLPGHKKGPVVAKDTPEPVKEEVTVPATSQVPESPSSEEPPLPPPNEEVPPPLPPEEPQSEDPEEDARLKQLQAAAAHWQQHQQHRVGFQYQGIMQKHTQLQQILQQYQQIIQPPPHIQATTPPPGIPPPGVPQGIPPQLTAAPVPPASSSQSSQVPEKPRPALLPTPVSFGSAPPTTYHPPLQSAGPSEQVNSKAPLSKSALPYSSFSSDQGLGESSAAPSQPITAVKDMPVRSGGLLPDPPRSSYLESPRGPRFDGPRRFEDLGSRCEGPRPKGPRFEGNRPDGPRPRYEGHPAEGTKSKWGMIPRGPASQFYITPSTSLSPRQSGPQWKGPKPAFGQQHQQQPKSQAEPLSGNKEPLADTSSNQQKNFKMQSAAFSIAADVKDVKAAQSNENLSDSQQEPPKSEVSEGPVEPSNWDQNVQSMETQIDKAQAVTQPVPLANKPVPAQSTFPSKTGGMEGGTAVATSSLTADNDFKPVGIGLPHSENNQDKGLPRPDNRDNRLEGNRGNSSSYRGPGQSRMEDTRDKGLVNRGRGQAISRGPGLVKQEDFRDKMMGRREDSREKMNRGEGSRDRGLVRPGSSREKVPGGLQGSQDRGAAGSRERGPPRRAGSQERGPLRRAGSRERIPPRRAGSRERGPPRGPGSRERGLGRSDFGRDRGPFRPEPGDGGEKMYPYHRDEPPRAPWNHGEERGHEEFPLDGRNAPMERERLDDWDRERYWRECERDYQDDTLELYNREDRFSAPPSRSHDGDRRGPWWDDWERDQDMDEDYNREMERDMDRDVDRISRPMDMYDRSLDNEWDRDYGRPLDEQESQFRERDIPSLPPLPPLPPLPPLDRYRDDRWREERNREHGYDRDFRDRGELRIREYPERGDTWREKRDYVPDRMDWERERLSDRWYPSDVDRHSPMAEHMPSSHHSSEMMGSDASLDSDQGLGGVMVLSQRQHEIILKAAQELKMLREQKEQLQKMKDFGSEPQMADHLPPQESRLQNTSSRPGMYPPPGSYRPPPPMGKPPGSIVRPSAPPARSSVPVTRPPVPIPPPPPPPPLPPPPPVIKPQTSAVEQERWDEDSFYGLWDTNDEQGLNSEFKSETAAIPSAPVLPPPPVHSSIPPPGPVPMGMPPMSKPPPVQQTVDYGHGRDISTNKVEQIPYGERITLRPDPLPERSTFETEHAGQRDRYDRERDREPYFDRQSNVIADHRDFKRDRETHRDRDRDRGVIDYDRDRFDRERRPRDDRAQSYRDKKDHSSSRRGGFDRPSYDRKSDRPVYEGPSMFGGERRTYPEERMPLPAPSLSHQPPPAPRVEKKPESKNVDDILKPPGRESRPERIVVIMRGLPGSGKTHVAKLIRDKEVEFGGPAPRVLSLDDYFITEVEKEEKDPDSGKKVKKKVMEYEYEAEMEETYRTSMFKTFKKTLDDGFFPFIILDAINDRVRHFDQFWSAAKTKGFEVYLAEMSADNQTCGKRNIHGRKLKEINKMADHWETAPRHMMRLDIRSLLQDAAIEEVEMEDFDANIEEQKEEKKDAEEEESELVGDRPTTLNSVSLLKFLKKV

SEQ ID NO: 9235 - protein, 1951 aa, Homo sapiens
MYPNWGRYGGSSHYPPPPVPPPPPVALPEASPGPGYSSSTTPAAPSSSGFMSFREQHLAQLQQLQQMHQKQMQCVLQPHHLPPPPLPPPPVMPGGGYGDWQPPPPPMPPPPGPALSYQKQQQYKHQMLHHQRDGPPGLVPMELESPPESPPVPPGSYMPPSQSYMPPPQPPPSYYPPTSSQPYLPPAQPSPSQSPPSQSYLAPTPSYSSSSSSSQSYLSHSQSYLPSSQASPSRPSQGHSKSQLLAPPPPSAPPGNKTTVQQEPLESGAKNKSTEQQQAAPEPDPSTMTPQEQQQYWYRQHLLSLQQRTKVHLPGHKKGPVVAKDTPEPVKEEVTVPATSQVPESPSSEEPPLPPPNEEVPPPLPPEEPQSEDPEEDARLKQLQAAAAHWQQHQQHRVGFQYQGIMQKHTQLQQILQQYQQIIQPPPHIQATTPPPGIPPPGVPQGIPPQLTAAPVPPASSSQSSQVPEKPRPALLPTPVSFGSAPPTTYHPPLQSAGPSEQVNSKAPLSKSALPYSSFSSDQGLGESSAAPSQPITAVKDMPVRSGGLLPDPPRSSYLESPRGPRFDGPRRFEDLGSRCEGPRPKGPRFEGNRPDGPRPRYEGHPAEGTKSKWGMIPRGPASQFYITPSTSLSPRQSGPQWKGPKPAFGQQHQQQPKSQAEPLSGNKEPLADTSSNQQKNFKMQSAAFSIAADVKDVKAAQSNENLSDSQQEPPKSEVSEGPVEPSNWDQNVQSMETQIDKAQAVTQPVPLANKPVPAQSTFPSKTGGMEGGTAVATSSLTADNDFKPVGIGLPHSENNQDKGLPRPDNRDNRLEGNRGNSSSYRGPGQSRMEDTRDKGLVNRGRGQAISRGPGLVKQEDFRDKMMGRREDSREKMNRGEGSRDRGLVRPGSSREKVPGGLQGSQDRGAAGSRERGPPRRAGSQERGPLRRAGSRERIPPRRAGSRERGPPRGPGSRERGLGRSDFGRDRGPFRPEPGDGGEKMYPYHRDEPPRAPWNHGEERGHEEFPLDGRNAPMERERLDDWDRERYWRECERDYQDDTLELYNREDRFSAPPSRSHDGDRRGPWWDDWERDQDMDEDYNREMERDMDRDVDRISRPMDMYDRSLDNEWDRDYGRPLDEQESQFRERDIPSLPPLPPLPPLPPLDRYRDDRWREERNREHGYDRDFRDRGELRIREYPERGDTWREKRDYVPDRMDWERERLSDRWYPSDVDRHSPMAEHMPSSHHSSEMMGSDASLDSDQGLGGVMVLSQRQHEIILKAAQELKMLREQKEQLQKMKDFGSEPQMADHLPPQESRLQNTSSRPGMYPPPGSYRPPPPMGKPPGSIVRPSAPPARSSVPVTRPPVPIPPPPPPPPLPPPPPVIKPQTSAVEQERWDEDSFYGLWDTNDEQGLNSEFKSETAAIPSAPVLPPPPVHSSIPPPGPVPMGMPPMSKPPPVQQTVDYGHGRDISTNKVEQIPYGERITLRPDPLPERSTFETEHAGQRDRYDRERDREPYFDRQSNVIADHRDFKRDRETHRDRDRDRGVIDYDRDRFDRERRPRDDRAQSYRDKKDHSSSRRGGFDRPSYDRKSDRPVYEGPSMFGGERRTYPEERMPLPAPSLSHQPPPAPRVEKKPESKNVDDILKPPGRESRPERIVVIMRGLPGSGKTHVAKLIRDKEVEFGGPAPRVLSLDDYFITEVEKEEKDPDSGKKVKKKVMEYEYEAEMEETYRTSMFKTFKKTLDDGFFPFIILDAINDRVRHFDQFWSAAKTKGFEVYLAEMSADNQTCGKRNIHGRKLKEINKMADHWETAPRHMMRLDIRSLLQDAAIEEVEMEDFDANIEEQKEEKKDAEEEESELGYIPKSKWEMDTSEAKLDKLDGLRTGTKRKRDWEAIASRMEDYLQLPDDYDTRASEPGKKRVRWADLEEKKDADRKRAIGFVVGQTDWEKITDESGHLAEKALNRTKYI

SEQ ID NO: 9236 - protein, 578 aa, Homo sapiens
MLSCNICGETVTSEPDMKAHLIVHMESEIICPFCKLSGVNYDEMCFHIETAHFEQNTLERNFERINTVQYGTSDNKKDNTLQCGMEVNSSILSGCASNHPKNSAQNLTKDSTLKHEGFYSENLTESRKFLKSREKQSSLTEIKGSVYETTYSPPECPFCGKIEEHSEDMETHVKTKHANLLDIPLEDCDQPLYDCPMCGLICTNYHILQEHVDLHLEENSFQQGMDRVQCSGDLQLAHQLQQEEDRKRRSEESRQEIEEFQKLQRQYGLDNSGGYKQQQLRNMEIEVNRGRMPPSEFHRRKADMMESLALGFDDGKTKTSGIIEALHRYYQNAATDVRRVWLSSVVDHFHSSLGDKGWGCGYRNFQMLLSSLLQNDAYNDCLKGMLIPCIPKIQSMIEDAWKEGFDPQGASQLNNRLQGTKAWIGACEVYILLTSLRVKCHIVDFHKSTGPLGTHPRLFEWILNYYSSEGEGSPKVVCTSKPPIYLQHQGHSRTVIGIEEKKNRTLCLLILDPGCPSREMQKLLKQDIEASSLKQLRKSMGNLKHKQYQILAVEGALSLEEKLARRQASQVFTAEKIP

SEQ ID NO: 9237 - protein, 59 aa, Homo sapiens
MQKLLKQDIEASSLKQLRKSMGNLKHKQYQILAVEGALSLEEKLARRQASQVFTAEKIP

SEQ ID NO: 9238 - protein, 185 aa, Homo sapiens
MAGPRPRWRDQLLFMSIIVLVIVVICLMFYALLWEAGNLTDLPNLRIGFYNFCLWNEDTSTLQCHQFPELEALGVPRVGLGLARLGVYGSLVLTLFAPQPLLLAQCNSDERAWRLAVGFLAVSSVLLAGGLGLFLSYVWKWVRLSLPGPGFLALGSAQALLILLLIAMAVFPLRAERAESKLESC

SEQ ID NO: 9239 - protein, 125 aa, Homo sapiens
MQMDPGPQVPLYWLGFVYAALAALGGISGYAKVGSVQSPSAGFFFSELAGLDASQPSRNPKEHLSSPVYIWDLARYYANKILTLWNIYACGFSCRCLLIVSKLGSMYGEQILSVVAMSQLGLMKN

SEQ ID NO: 9240 - protein, 311 aa, Homo sapiens
MAGPLWRTAAFVQRHRTGLLVGSCAGLFGVPISYHLFPDPVVQWLYQYWPQGQPAPLPPQLQSLFQEVLQDIGVPSGHCYKPFTTFTFQPVSAGFPRLPAGAVVGIPASFLGDLVINTNHPVVIHGHTVDWRSPAGARLRASLTLSREAQKFALAREVVYLESSTTAVHALLAPACLAGTWALGVGAKYTLGLHAGPMNLRAAFSLVAAVAGFVAYAFSQDSLTHAVESWLDRRTASLSAAYACGGVEFYEKLLSGNLALRSLLGKDGEKLYTPSGNIVPRHLFRIKHLPYTTRRDSVLQMWRGMLNPGRS

SEQ ID NO: 9241 - protein, 250 aa, Homo sapiens [sequence omitted]

SEQ ID NO: 9242 - protein, 234 aa, Homo sapiens
MPASSPFLLAPKGPPGNMGGPVREPALSVALWLSWGAALGAVACAMALLTQQTELQSLRREVSRLQGTGGPSQNGEGYPWQSLPEQSSDALEAWENGERSRKRRAVLTQKQKNDSDVTEVMWQPALRRGRGLQAQGYGVRIQDAGVYLLYSQVLFQDVTFTMGQVVSREGQGRQETLFRCIRSMPSHPDRAYNSCYSAGVFHLHQGDILSVIIPRARAKLNLSPHGTFLGFVKL

SEQ ID NO: 9243 - protein, 247 aa, Homo sapiens
MPASSPFLLAPKGPPGNMGGPVREPALSVALWLSWGAALGAVACAMALLTQQTELQSLRREVSRLQGTGGPSQNGEGYPWQSLPEQSSDALEAWENGERSRKRRAVLTQKQKKQHSVLHLVPINATSKDDSDVTEVMWQPALRRGRGLQAQGYGVRIQDAGVYLLYSQVLFQDVTFTMGQVVSREGQGRQETLFRCIRSMPSHPDRAYNSCYSAGVFHLHQGDILSVIIPRARAKLNLSPHGTFLGL

SEQ ID NO: 9244 - protein, 222 aa, Homo sapiens
MPASSPFLLAPKGPPGNMGGPVREPALSVALWLSWGAALGAVACAMALLTQQTELQSLRREVSRLQGTGGPSQNGEGYPWQSLPEQHSVLHLVPINATSKDDSDVTEVMWQPALRRGRGLQAQGYGVRIQDAGVYLLYSQVLFQDVTFTMGQVVSREGQGRQETLFRCIRSMPSHPDRAYNSCYSAGVFHLHQGDILSVIIPRARAKLNLSPHGTFLGFVKL

SEQ ID NO: 9245 - protein, 205 aa, Homo sapiens
MGGPVREPALSVALWLSWGAALGAVACAMALLTQQTELQSLRREVSRLQGTGGPSQNGEGYPWQSLPEQHSVLHLVPINATSKDDSDVTEVMWQPALRRGRGLQAQGYGVRIQDAGVYLLYSQVLFQDVTFTMGQVVSREGQGRQETLFRCIRSMPSHPDRAYNSCYSAGVFHLHQGDILSVIIPRARAKLNLSPHGTFLGFVKL

SEQ ID NO: 9246 - protein, 459 aa, Homo sapiens
MTVELWLRLRGKGLAMLHVTRGVWGSRVRVWPLLPALLGPPRALSSLAAKMGEYRKMWNPREPRDWAQQYRERFIPFSKEQLLRLLIQEFHSSPAEKAALEAFSAHVDFCTLFHYHQILARLQALYDPINPDRETLDQPSLTDPQRLSNEQEVLRALEPLLAQANFSPLSEDTLAYALVVHHPQDEVQVTVNLDQYVYIHFWALGQRVGQMPLKSSVGSRRGFFTKLPPAERRYFKRVVLAARTKRGHLVLKSFKDTPLEGLEQLLPELKVRTPTLQRALLNLMLVVSGVAIFVNVGMVVLTDLKVATSLLLLLFAIFMGLRASKMFGQRRSAQALELAHMLYYRSTSNNSELLSALALRAQDEHTKEALLAHSFLARRPGGTQGSPEETSRWLRSEVENWLLAKSGCEVTFNGTRALAHLQALTPSMGLYPPPGFPKLDPVAPITSEPPQATPSSNIS

SEQ ID NO: 9247 - protein, 359 aa, Homo sapiens
MTVELWLRLRGKGLAMLHVTRGVWGSRVRVWPLLPALLGPPRALSSLAAKMGEYRKMWNPREPRDWAQQYRERFIPFSKEQLLRLLIQVTVNLDQYVYIHFWALGQRVGQMPLKSSVGSRRGFFTKLPPAERRYFKRVVLAARTKRGHLVLKSFKDTPLEGLEQLLPELKVRTPTLQRALLNLMLVVSGVAIFVNVGMVVLTDLKVATSLLLLLFAIFMGLRASKMFGQRRSAQALELAHMLYYRSTSNNSELLSALALRAQDEHTKEALLAHSFLARRPGGTQGSPEETSRWLRSEVENWLLAKSGCEVTFNGTRALAHLQALTPSMGLYPPPGFPKLDPVAPITSEPPQATPSSNIS

SEQ ID NO: 9248 - protein, 128 aa, Homo sapiens
MTVELWLRLRGKGLAMLHVTRGVWGSRVRVWPLLPALLGPPRALSSLAAKMGEYRKMWNPREPRDWAQQYRERFIPFSKEQLLRLLIQVTGIPLESGREGGFGGVLSPRGLLHPVPLPPNPGPAAGLI

SEQ ID NO: 9249 - protein, 195 aa, Homo sapiens
MSAARPQFSIDDAFELSLEDGGPGPESSGVARFGPLHFERRARFEVADEDKQSRLRYQNLENDEDGAQASPEPDGGVGTRDSSRTSIRSSQWSFSTISSSTQRSYNTCCSWTQHPLIQKNRRVVLASFLLLLLGLVLILVGVGLEATPSPGVSSAIFFVPGFLLLVPGVYHVIFIYCAVKGHRGFQFFYLPYFEK

SEQ ID NO: 9250 - protein, 180 aa, Homo sapiens
MSAARPQFSIDDAFELSLEDGGPGPESSGVARFGPLHFERRARFEVADEDKQSRLRYQNLENDEDGAQASPEPDGGVGTRDSSRTSIRSSQWSFSTISSSTQRSYNTCCSWTQHPLIQKNRRVVLASFLLLLLGLGVSSAIFFVPGFLLLVPGVYHVIFIYCAVKGHRGFQFFYLPYFEK

SEQ ID NO: 9251 - protein, 192 aa, Homo sapiens
MSAARPQFSIDDAFELSLEDGGPGPESSGVARFGPLHFERRARFEVADEDKQSRLRYQNLENDEDGAQASPEPDGGVGTRDSSRTSIRSSQWSFSTISSSTQRSYNTCCSWTQHPLIQKNRRVVLASFLLLLLGLGPAQCLALETELGELPGEGLCLGHLQLRWWVSRAGGGSPRPHHCSCPHPRGSVCVQC

SEQ ID NO: 9252 - protein, 441 aa, Homo sapiens
MRGLEESGPRPTATPCGCVKPALETGNLLTEPVGYLESCFSAKNGTPRQPSICSYSRACLRIRKRIFNNPEHSLMGLEQFSHVWILFVFHKNGHLSCKAKVQPPRLNGAKTGVFSTRSPHRPNAIGLTLAKLEKVEGGAIYLSGIDMIHGTPVLDIKPYIAEYDSPQNVMEPLADFNLQNNQHTPNTVSQSDSKTDSCDQRQLSGCDEPQPHHSTKRKPKCPEDRTSEENYLTHSDTARIQQAFPMHREIAVDFGLESRRDQSSSVAEEQIGPYCPEKSFSEKGTDKKLERVEGAAVLQGSRAETQPMAPHCPAGRADGAPRSVVPAWVTEAPVATLEVRFTPHAEMDLGQLSSQDVGQASFKYFQSAEEAKRAIEAVLSADPRSVYRRKLCQDRLFYFTVDIAHVTCWFGDGFAEVLRIKPASEPVHMTGPVGSLVSLGS

SEQ ID NO: 9253 - protein, 249 aa, Homo sapiens
MASRRMETKPVITCLKTLLIIYSFVFWITGVILLAVGVWGKLTLGTYISLIAENSTNAPYVLIGTGTTIVVFGLFGCFATCRGSPWMLKLYAMFLSLVFLAELVAGISGFVFRHEIKDTFLRTYTDAMQTYNGNDERSRAVDHVQRSLSCCGVQNYTNWSTSPYFLEHGIPPSCCMNETDCNPQDLHNLTVAATKVNQKGCYDLVTSFMETNMGIIAGVAFGIAFSQLIGMLLACCLSRFITANQYEMV

SEQ ID NO: 9254 - protein, 94 aa, Homo sapiens
MRKLRLRASNPGPSGAPGTRQHFSTSRGGHHCARRWLRRVRRSRSQTPSYQNLDPNPPIVRFPLPLERISEVPRRACLHGRDASSVWPPPERSD

SEQ ID NO: 9255 - protein, 263 aa, Homo sapiens; identical to SEQ ID NO: 6374

SEQ ID NO: 9256 - protein, 142 aa, Homo sapiens
MSYMLPHLHNGWQVDQAILSEEDRVVVIRFGHDWDPTCMKMDEVLYSIAEKVKNFAVIYLVDITEVPDFNKMYELYDPCTVMFFFRNKHIMIDLGTGNNNKINWAMEDKQEMVDIIETVYRGARKGRGLVVSPKDYSTKYRY

SEQ ID NO: 9257 - protein, 313 aa, Homo sapiens
MSDLLLLGLIGGLTLLLLLTLLAFAGYSGLLAGVEVSAGSPPIRNVTVAYKFHMGLYGETGRLFTESCSISPKLRSIAVYYDNPHMVPPDKCRCAVGSILSEGEESPSPELIDLYQKFGFKVFSFPAPSHVVTATFPYTTILSIWLATRRVHPALDTYIKERKLCAYPRLEIYQEDQIHFMCPLARQGDFYVPEMKETEWKWRGLVEAIDTQVDGTGADTMSDTSSVSLEVSPGSRETSAATLSPGASSRGWDDGDTRSEHSYSESGASGSSFEELDLEGEGPLGESRLDPGTEPLGTTKWLWEPTAPEKGKE

SEQ ID NO: 9258 - protein, 1123 aa, Homo sapiens
MDLGPGDAAGGGPLAPRPRRRRSLRRLFSRFLLALGSRSRPGDSPPRPQPGHCDGDGEGGFACAPGPVPAAPGSPGEERPPGPQPQLQLPAGDGARPPGAQGLKNHGNTCFMNAVVQCLSNTDLLAEFLALGRYRAAPGRAEVTEQLAALVRALWTREYTPQLSAEFKNAVSKYGSQFQGNSQHDALEFLLWLLDRVHEDLEGSSRGPVSEKLPPEATKTSENCLSPSAQLPLGQSFVQSHFQAQYRSSLTCPHCLKQSNTFDPFLCVSLPIPLRQTRFLSVTLVFPSKSQRFLRVGLAVPILSTVAALRKMVAEEGGVPADEVILVELYPSGFQRSFFDEEDLNTIAEGDNVYAFQVPPSPSQGTLSAHPLGLSASPRLAAREGQRFSLSLHSESKVLILFCNLVGSGQQASRFGPPFLIREDRAVSWAQLQQSILSKVRHLMKSEAPVQNLGSLFSIRVVGLSVACSYLSPKDSRPLCHWAVDRVLHLRRPGGPPHVKLAVEWDSSVKERLFGSLQEERAQDADSVWQQQQAHQQHSCTLDECFQFYTKEEQLAQDDAWKCPHCQVLQQGMVKLSLWTLPDILIIHLKRFCQVGERRNKLSTLVKFPLSGLNMAPHVAQRSTSPEAGLGPWPSWKQPDCLPTSYPLDFLYDLYAVCNHHGNLQGGHYTAYCRNSLDGQWYSYDDSTVEPLREDEVNTRGAYILFYQKRNSIPPWSASSSMRGSTSSSLSDHWLLRLGSHAGSTRGSLLSWSSAPCPSLPQVPDSPIFTNSLCNQEKGGLEPRRLVRGVKGRSISMKAPTTSRAKQGPFKTMPLRWSFGSKEKPPGASVELVEYLESRRRPRSTSQSIVSLLTGTAGEDEKSASPRSNVALPANSEDGGRAIERGPAGVPCPSAQPNHCLAPGNSDGPNTARKLKENAGQDIKLPRKFDLPLTVMPSVEHEKPARPEGQKAMNWKESFQMGSKSSPPSPYMGFSGNSKDSRRGTSELDRPLQGTLTLLRSVFRKKENRRNERAEVSPQVPPVSLVSGGLSPAMDGQAPGSPPALRIPEGLARGLGSRLERDVWSAPSSLRLPRKASRAPRGSALGMSQRTVPGEQASYGTFQRVKYHTLSLGRKKTLPESSF

SEQ ID NO: 9259 - protein, 635 aa, Homo sapiens
MPTVCGSSSRRISSTAVPWMNVFSSTPRRSRSRPGGPCPGREGGWLPLVGWPRAAGASQSGWFAFQLAQDDAWKCPHCQVLQQGMVKLSLWTLPDILIIHLKRFCQVGERRNKLSTLVKFPLSGLNMAPHVAQRSTSPEAGLGPWPSWKQPDCLPTSYPLDFLYDLYAVCNHHGNLQGGHYTAYCRNSLDGQWYSYDDSTVEPLREDEVNTRGAYILFYQKRNSIPPWSASSSMRGSTSSSLSDHWLLRLGSHAGSTRGSLLSWSSAPCPSLPQVPDSPIFTNSLCNQEKGGLEPRRLVRGVKGRSISMKAPTTSRAKQGPFKTMPLRWSFGSKEKPPGASVELVEYLESRRRPRSTSQSIVSLLTGTAGEDEKSASPRSNVALPANSEDGGRAIERGPAGVPCPSAQPNHCLAPGNSDGPNTARKLKENAGQDIKLPRKFDLPLTVMPSVEHEKPARPEGQKAMNWKESFQMGSKSSPPSPYMGFSGNSKDSRRGTSELDRPLQGTLTLLRSVFRKKENRRNERAEVSPQVPPVSLVSGGLSPAMDGQAPGSPPALRIPEGLARGLGSRLERDVWSAPSSLRLPRKASRAPRGSALGMSQRTVPGEQASYGTFQRVKYHTLSLGRKKTLPESSF

SEQ ID NO: 9260 - protein, 812 aa, Homo sapiens
MVAEEGGVPADEVILVELYPSGFQRSFFDEEDLNTIAEGDNVYAFQVPPSPSQGTLSAHPLGLSASPRLAAREGQRFSLSLHSESKVLILFCNLVGSGQQASRFGPPFLIREDRAVSWAQLQQSILSKVRHLMKSEAPVQNLGSLFSIRVVGLSVACSYLSPKDSRPLCHWAVDRVLHLRRPGGPPHVKLAVEWDSSVKERLFGSLQEERAQDADSVWQQQQAHQQHSCTLDECFQFYTKEEQLAQDDAWKCPHCQVLQQGMVKLSLWTLPDILIIHLKRFCQVGERRNKLSTLVKFPLSGLNMAPHVAQRSTSPEAGLGPWPSWKQPDCLPTSYPLDFLYDLYAVCNHHGNLQGGHYTAYCRNSLDGQWYSYDDSTVEPLREDEVNTRGAYILFYQKRNSIPPWSASSSMRGSTSSSLSDHWLLRLGSHAGSTRGSLLSWSSAPCPSLPQVPDSPIFTNSLCNQEKGGLEPRRLVRGVKGRSISMKAPTTSRAKQGPFKTMPLRWSFGSKEKPPGASVELVEYLESRRRPRSTSQSIVSLLTGTAGEDEKSASPRSNVALPANSEDGGRAIERGPAGVPCPSAQPNHCLAPGNSDGPNTARKLKENAGQDIKLPRKFDLPLTVMPSVEHEKPARPEGQKAMNWKESFQMGSKSSPPSPYMGFSGNSKDSRRGTSELDRPLQGTLTLLRSVFRKKENRRNERAEVSPQVPPVSLVSGGLSPAMDGQAPGSPPALRIPEGLARGLGSRLERDVWSAPSSLRLPRKASRAPRGSALGMSQRTVPGEQASYGTFQRVKYHTLSLGRKKTLPESSF

SEQ ID NO: 9261 - protein, 1118 aa, Homo sapiens
MDLGPGDAAGGGPLAPRPRRRRSLRRLFSRFLLALGSRSRPGDSPPRPQPGHCDGDGEGGFACAPGPVPAAPGSPGEERPPGPQPQLQLPAGDGARPPGAQGLKNHGNTCFMNAVVQCLSNTDLLAEFLALGRYRAAPGRAEVTEQLAALVRALWTREYTPQLSAEFKNAVSKYGSQFQGNSQHDALEFLLWLLDRVHEDLEGSSRGPVSEKLPPEATKTSENCLSPSAQLPLGQSFVQSHFQAQYRSSLTCPHCLKQSNTFDPFLCVSLPIPLRQTRFLSVTLVFPSKSQRFLRVGLAVPILSTVAALRKMVAEEGGVPADEVILVELYPSGFQRSFFDEEDLNTIAEGDNVYAFQVPPSPSQGTLSAHPLGLSASPRLAAREGQRFSLSLHSESKVLILFCNLVGSGQQASRFGPPFLIREDRAVSWAQLQQSILSKVRHLMKSEAPVQNLGSLFSIRVVGLSVACSYLSPKDSRPLCHWAVDRVLHLRRPGGPPHVKLAVEWDSSVKERLFGSLQEERAQDADSVWQQQQAHQQHSCTLDECFQFYTKEEQLAQDDAWKCPHCQVLQQGMVKLSLWTLPDILIIHLKRFCQVGERRNKLSTLVKFPLSGLNMAPHVAQRSTSPEAGLGPWPSWKQPDCLPTSYPLDFLYDLYAVCNHHGNLQAYCRNSLDGQWYSYDDSTVEPLREDEVNTRGAYILFYQKRNSIPPWSASSSMRGSTSSSLSDHWLLRLGSHAGSTRGSLLSWSSAPCPSLPQVPDSPIFTNSLCNQEKGGLEPRRLVRGVKGRSISMKAPTTSRAKQGPFKTMPLRWSFGSKEKPPGASVELVEYLESRRRPRSTSQSIVSLLTGTAGEDEKSASPRSNVALPANSEDGGRAIERGPAGVPCPSAQPNHCLAPGNSDGPNTARKLKENAGQDIKLPRKFDLPLTVMPSVEHEKPARPEGQKAMNWKESFQMGSKSSPPSPYMGFSGNSKDSRRGTSELDRPLQGTLTLLRSVFRKKENRRNERAEVSPQVPPVSLVSGGLSPAMDGQAPGSPPALRIPEGLARGLGSRLERDVWSAPSSLRLPRKASRAPRGSALGMSQRTVPGEQASYGTFQRVKYHTLSLGRKKTLPESSF

SEQ ID NO: 9262 - protein, 688 aa, Homo sapiens
MDRCKHVGRLRLAQDHSILNPQKWCCLECATTESVWACLKCSHVACGRYIEDHALKHFEETGHPLAMEVRDLYVFCYLCKDYVLNDNPEGDLKLLRSSLLAVRGQKQDTPVRRGRTLRSMASGEDVVLPQRAPQGQPQMLTALWYRRQRLLARTLRLWFEKSSRGQAKLEQRRQEEALERKKEEARRRRREVKRRLLEELASTPPRKSARLLLHTPRDAGPAASRPAALPTSRRVPAATLKLRRQPAMAPGVTGLRNLGNTCYMNSILQVLSHLQKFRECFLNLDPSKTEHLFPKATNGKTQLSGKPTNSSATELSLRNDRAEACEREGFCWNGRASISRSLELIQNKEPSSKHISLCRELHTLFRVMWSGKWALVSPFAMLHSVWSLIPAFRGYDQQDAQEFLCELLHKVQQELESEGTTRRILIPFSQRKLTKQVLKVVNTIFHGQLLSQVTCISCNYKSNTIEPFWDLSLEFPERYHCIEKGFVPLNQTECLLTEMLAKFTETEALEGRIYACDQCNSKRRKSNPKPLVLSEARKQLMIYRLPQVLRLHLKRFRWSGRNHREKIGVHVVFDQVLTMEPYCCRDMLSSLDKETFAYDLSAVVMHHGKGFGSGHYTAYCYNTEGGFWVHCNDSKLNVCSVEEVCKTQAYILFYTQRTVQGNARISETHLQAQVQSSNNDEGRPQTFS

SEQ ID NO: 9263 - protein, 640 aa, Homo sapiens
MDRCKHVGRLRLAQDHSILNPQKWCCLECATTESVWACLKCSHVACGRYIEDHALKHFEETGHPLAMEVRDLYVFCYLCKDYVLNDNPEGDLKLLRSSLLAVRGQKQDTPVRRGRTLRSMASGEDVVLPQRAPQGQPQMLTALWYRRQRLLARTLRLWFEKSSRGQAKLEQRRQEEALERKKEEARRRRREVKRRLLEELASTPPRKSARLLLHTPRDAGPAASRPAALPTSRRVPAATLKLRRQPAMAPGVTGLRNLGNTCYMNSILQVLSHLQKFRECFLNLDPSKTEHLFPKATNGKTQLSGKPTNSSATELSLRNDRAEACEREGFCWNGRASISRSLELIQNKEPSSKHISLCRELHTLFRVMWSGKWALVSPFAMLHSVWSLIPAFRGYDQQDAQEFLCELLHKVQQELESEGTTRRILIPFSQRKLTKQVLKVVNTIFHGQLLSQVTCISCNYKSNTIEPFWDLSLEFPERYHCIEKGFVPLNQTECLLTEMLAKFTETEALEGRIYACDQCNSKRRKSNPKPLVLSEARKQLMIYRLPQVLRLHLKRFRWSGRNHREKIGVHVVFDQVLTMEPYCCRDMLSSLDKETFAYDLSAVVMHHGKGFGSGHYTAYCYNTEGGACALLCGVGDTERG

SEQ ID NO: 9264 - protein, 530 aa, Homo sapiens
MEEDSLYLGGEWQFNHFSKLTSSRPDAAFAEIQRTSLPEKSPLSCETRVDLCDDLAPVARQLAPREKLPLSSRRPAAVGAGLQNMGNTCYVNASLQCLTYTPPLANYMLSREHSQTCHRHKGCMLCTMQAHITRALHNPGHVIQPSQALAAGFHRGKQEDAHEFLMFTVDAMKKACLPGHKQVDHHSKDTTLIHQIFGGYWRSQIKCLHCHGISDTFDPYLDIALDIQAAQSVQQALEQLVKPEELNGENAYHCGVCLQRAPASKTLTLHTSAKVLILVLKRFSDVTGNKIAKNVQYPECLDMQPYMSQTNTGPLVYVLYAVLVHAGWSCHNGHYFSYVKAQEGQWYKMDDAEVTASSITSVLSQQAYVLFYIQKSEWERHSESVSRGREPRALGAEDTDRRATQGELKRDHPCLQAPELDEHLVERATQESTLDHWKFLQEQNKTKPEFNVRKVEGTLPPDVLVIHQSKYKCGMKNHHPEQQSSLLKLSSTTPTHQESMNTGTLASLRGRARRSKGKNKHSKRALLVCQ

SEQ ID NO: 9265 - protein, 1058 aa, Homo sapiens
MSSSPLSKKRRVSGPDPKPGSNCSPAQSVLSEVPSVPTNGMAKNGSEADIDEGLYSRQLYVLGHEAMKRLQTSSVLVSGLRGLGVEIAKNIILGGVKAVTLHDQGTAQWADLSSQFYLREEDIGKNRAEVSQPRLAELNSYVPVTAYTGPLVEDFLSGFQVVVLTNTPLEDQLRVGEFCHNRGIKLVVADTRGLFGQLFCDFGEEMILTDSNGEQPLSAMVSMVTKDNPGVVTCLDEARHGFESGDFVSFSEVQGMVELNGNQPMEIKVLGPYTFSICDTSNFSDYIRGGIVSQVKVPKKISFKSLVASLAEPDFVVTDFAKFSRPAQLHIGFQALHQFCAQHGRPPRPRNEEDAAELVALAQAVNARALPAVQQNNLDEDLIRKLAYVAAGDLAPINAFIGGLAAQEVMKACSGKFMPIMQWLYFDALECLPEDKEVLTEDKCLQRQNRYDGQVAVFGSDLQEKLGKQKYFLVGAGAIGCELLKNFAMIGLGCGEGGEIIVTDMDTIEKSNLNRQFLFRPWDVTKLKSDTAAAAVRQMNPHIRVTSHQNRVGPDTERIYDDDFFQNLDGVANALDNVDARMYMDRRCVYYRKPLLESGTLGTKGNVQVVIPFLTESYSSSQDPPEKSIPICTLKNFPNAIEHTLQWARDEFEGLFKQPAENVNQYLTDPKFVERTLRLAGTQPLEVLEAVQRSLVLQRPQTWADCVTWACHHWHTQYSNNIRQLLHNFPPDQLTSSGAPFWSGPKRCPHPLTFDVNNPLHLDYVMAAANLFAQTYGLTGSQDRAAVATFLQSVQVPEFTPKSGVKIHVSDQELQSANASVDDSRLEELKATLPSPDKLPGFKMYPIDFEKDDDSNFHMDFIVAASNLRAENYDIPSADRHKSKLIAGKIIPAIATTTAAVVGLVCLELYKVVQGHRQLDSYKNGFLNLALPFFGFSEPLAAPRHQYYNQEWTLWDRFEVQGLQPNGEEMTLKQFLDYFKTEHKLEITMLSQGVSMLYSFFMPAAKLKERLDQPMTEIVSRVSKRKLGRHVRALVLELCCNDESGEDVEVPYVRYTIR

SEQ ID NO: 9266 - protein, 1018 aa, Homo sapiens
MAKNGSEADIDEGLYSRQLYVLGHEAMKRLQTSSVLVSGLRGLGVEIAKNIILGGVKAVTLHDQGTAQWADLSSQFYLREEDIGKNRAEVSQPRLAELNSYVPVTAYTGPLVEDFLSGFQVVVLTNTPLEDQLRVGEFCHNRGIKLVVADTRGLFGQLFCDFGEEMILTDSNGEQPLSAMVSMVTKDNPGVVTCLDEARHGFESGDFVSFSEVQGMVELNGNQPMEIKVLGPYTFSICDTSNFSDYIRGGIVSQVKVPKKISFKSLVASLAEPDFVVTDFAKFSRPAQLHIGFQALHQFCAQHGRPPRPRNEEDAAELVALAQAVNARALPAVQQNNLDEDLIRKLAYVAAGDLAPINAFIGGLAAQEVMKACSGKFMPIMQWLYFDALECLPEDKEVLTEDKCLQRQNRYDGQVAVFGSDLQEKLGKQKYFLVGAGAIGCELLKNFAMIGLGCGEGGEIIVTDMDTIEKSNLNRQFLFRPWDVTKLKSDTAAAAVRQMNPHIRVTSHQNRVGPDTERIYDDDFFQNLDGVANALDNVDARMYMDRRCVYYRKPLLESGTLGTKGNVQVVIPFLTESYSSSQDPPEKSIPICTLKNFPNAIEHTLQWARDEFEGLFKQPAENVNQYLTDPKFVERTLRLAGTQPLEVLEAVQRSLVLQRPQTWADCVTWACHHWHTQYSNNIRQLLHNFPPDQLTSSGAPFWSGPKRCPHPLTFDVNNPLHLDYVMAAANLFAQTYGLTGSQDRAAVATFLQSVQVPEFTPKSGVKIHVSDQELQSANASVDDSRLEELKATLPSPDKLPGFKMYPIDFEKDDDSNFHMDFIVAASNLRAENYDIPSADRHKSKLIAGKIIPAIATTTAAVVGLVCLELYKVVQGHRQLDSYKNGFLNLALPFFGFSEPLAAPRHQYYNQEWTLWDRFEVQGLQPNGEEMTLKQFLDYFKTEHKLEITMLSQGVSMLYSFFMPAAKLKERLDQPMTEIVSRVSKRKLGRHVRALVLELCCNDESGEDVEVPYVRYTIR

SEQ ID NO: 9267 - protein, 828 aa, Homo sapiens
MNSDQDVALKLAQERAEIVAKYDRGREGAEIEPWEDADYLVYKVTDRFGFLHEEELPDHNVAVERQKHLEIERTTKWLKMLKGWEKYKNTEKFHRRIYKGIPLQLRGEVWALLLEIPKMKEETRDLYSKLKHRARGCSPDIRQIDLDVNRTFRDHIMFRDRYGVKQQSLFHVLAAYSIYNTEVGYCQGMSQITALLLMYMNEEDAFWALVKLFSGPKHAMHGFFVQGFPKLLRFQEHHEKILNKFLSKLKQHLDSQEIYTSFYTMKWFFQCFLDRTPFTLNLRIWDIYIFEGERVLTAMSYTILKLHKKHLMKLSMEELVEFFQETLAKDFFFEDDFVIEQLQISMTELKRAKLDLPEPGKEDEYPKKPLGQLPPELQSWGVHHLSNGQRSVGRPSPLASGRRESGAPHRRHEHSPHPQSRTGTPERAQPPRRKSVEEESKKLKDEADFQRKLPSGPQDSSRQYNHAAANQNSNATSNIRKEFVPKWNKPSDVSATERTAKYTMEGKGRAAHPALAVTVPGPAEVRVSNVRPKMKALDAEDGKRGSTASQYDNVPGPELDSGASVEEALERAYSQSPRHALYPPSPRKHAEPSSSPSKVSNKFTFKVQPPSHARYPSQLDGEARGLAHPPSYSNPPVYHGNSPKHFPTANSSFASPQFSPGTQLNPSRRPHGSTLSVSASPEKSYSRPSPLVLPSSRIEVLPVDTGAGGYSGNSGSPKNGKLIIPPVDYLPDNRTWSEVSYTYRPETQGQSWTRDASRGNLPKYSAFQLAPFQDHGLPAVSVDSPVRYKASPAAEDASPSGYPYSGPPPPAYHYRNRDGLSIQESVLL

SEQ ID NO: 9268 - protein, 845 aa, Homo sapiens
MRTEAVVNSQGQTDYLTKDSDQDVALKLAQERAEIVAKYDRGREGAEIEPWEDADYLVYKVTDRFGFLHEEELPDHNVAVERQKHLEIERTTKWLKMLKGWEKYKNTEKFHRRIYKGIPLQLRGEVWALLLEIPKMKEETRDLYSKLKHRARGCSPDIRQIDLDVNRTFRDHIMFRDRYGVKQQSLFHVLAAYSIYNTEVGYCQGMSQITALLLMYMNEEDAFWALVKLFSGPKHAMHGFFVQGFPKLLRFQEHHEKILNKFLSKLKQHLDSQEIYTSFYTMKWFFQCFLDRTPFTLNLRIWDIYIFEGERVLTAMSYTILKLHKKHLMKLSMEELVEFFQETLAKDFFFEDDFVIEQLQISMTELKRAKLDLPEPGKEDEYPKKPLGQLPPELQSWGVHHLSNGQRSVGRPSPLASGRRESGAPHRRHEHSPHPQSRTGTPERAQPPRRKSVEEESKKLKDEADFQRKLPSGPQDSSRQYNHAAANQNSNATSNIRKEFVPKWNKPSDVSATERTAKYTMEGKGRAAHPALAVTVPGPAEVRVSNVRPKMKALDAEDGKRGSTASQYDNVPGPELDSGASVEEALERAYSQSPRHALYPPSPRKHAEPSSSPSKVSNKFTFKVQPPSHARYPSQLDGEARGLAHPPSYSNPPVYHGNSPKHFPTANSSFASPQFSPGTQLNPSRRPHGSTLSVSASPEKSYSRPSPLVLPSSRIEVLPVDTGAGGYSGNSGSPKNGKLIIPPVDYLPDNRTWSEVSYTYRPETQGQSWTRDASRGNLPKYSAFQLAPFQDHGLPAVSVDSPVRYKASPAAEDASPSGYPYSGPPPPAYHYRNRDGLSIQESVLL

SEQ ID NO: 9269 - protein, 371 aa, Homo sapiens
MLMASTTSAVPGHPSLPSLPSNSSQERPLDTRDPLLARAELALLSIVFVAVALSNGLVLAALARRGRRGHWAPIHVFIGHLCLADLAVALFQVLPQLAWKATDRFRGPDALCRAVKYLQMVGMYASSYMILAMTLDRHRAICRPMLAYRHGSGAHWNRPVLVAWAFSLLLSLPQLFIFAQRNVEGGSGVTDCWACFAEPWGRRTYVTWIALMVFVAPTLGIAACQVLIFREIHASLVPGPSERPGGRRRGRRTGSPGEGAHVSAAVAKTVRMTLVIVVVYVLCWAPFFLVQLWAAWDPEAPLEGAPFVLLMLLASLNSCTNPWIYASFSSSVSSELRSLLCCARGRTPPSLGPQDESCTTASSSLAKDTSS

SEQ ID NO: 9270 - protein, 309 aa, Homo sapiens
MLMASTTSAVPGHPSLPSLPSNSSQERPLDTRDPLLARAELALLSIVFVAVALSNGLVLAALARRGRRGHWAPIHVFIGHLCLADLAVALFQVLPQLAWKATDRFRGPDALCRAVKYLQMVGMYASSYMILAMTLDRHRAICRPMLAYRHGSGAHWNRPVLVAWAFSLLLSLPQLFIFAQRNVEGGSGVTDCWACFAEPWGRRTYVTWIALMVFVAPTLGIAACQVLIFREIHASLVPGPSERPGGRRRGRRTGSPGEGAHVSAAVAKTVRMTLVIVVVYVLCWAPFFLVQLWAAWDPEAPLEGGCSRG

SEQ ID NO: 9271 - protein, 475 aa, Homo sapiens
MSDFDEFERQLNENKQERDKENRHRKRSHSRSRSRDRKRRSRSRDRRNRDQRSASRDRRRRSKPLTRGAKEEHGGLIRSPRHEKKKKVRKYWDVPPPGFEHITPMQYKAMQAAGQIPATALLPTMTPDGLAVTPTPVPVVGSQMTRQARRLYVGNIPFGITEEAMMDFFNAQMRLGGLTQAPGNPVLAVQINQDKNFAFLEFRSVDETTQAMAFDGIIFQGQSLKIRRPHDYQPLPGMSENPSVYVPGVVSTVVPDSAHKLFIGGLPNYLNDDQVKELLTSFGPLKAFNLVKDSATGLSKGYAFCEYVDINVTDQAIAGLNGMQLGDKKLLVQRASVGAKNATLVSPPSTINQTPVTLQVPGLMSSQVQMGGHPTEVLCLMNMVLPEELLDDEEYEEIVEDVRDECSKYGLVKSIEIPRPVDGVEVPGCGKIFVEFTSVFDCQKAMQGLTGRKFANRVVVTKYCDPDSYHRRDFW

SEQ ID NO: 9272 - protein, 471 aa, Homo sapiens
MSDFDEFERQLNENKQERDKENRHRKRSHSRSRSRDRKRRSRSRDRRNRDQRSASRDRRRRSKPLTRGAKEEHGGLIRSPRHEKKKKVRKYWDVPPPGFEHITPMQYKAMQAAGQIPATALLPTMTPDGLAVTPTPVPVVGSQMTRQARRLYVGNIPFGITEEAMMDFFNAQMRLGGLTQAPGNPVLAVQINQDKNFAFLEFRSVDETTQAMAFDGIIFQGQSLKIRRPHDYQPLPGMSENPSVYVPGVVSTVVPDSAHKLFIGGLPNYLNDDQVKELLTSFGPLKAFNLVKDSATGLSKGYAFCEYVDINVTDQAIAGLNGMQLGDKKLLVQRASVGAKNATLSTINQTPVTLQVPGLMSSQVQMGGHPTEVLCLMNMVLPEELLDDEEYEEIVEDVRDECSKYGLVKSIEIPRPVDGVEVPGCGKIFVEFTSVFDCQKAMQGLTGRKFANRVVVTKYCDPDSYHRRDFW

SEQ ID NO: 9273 - protein, 2554 aa, Homo sapiens
MTATTRGSPVGGNDNQGQAPDGQSQPPLQQNQTSSPDSSNENSPATPPDEQGQGDAPPQLEDEEPAFPHTDLAKLDDMINRPRWVVPVLPKGELEVLLEAAIDLSKKGLDVKSEACQRFFRDGLTISFTKILTDEAVSGWKFEIHRCIINNTHRLVELCVAKLSQDWFPLLELLAMALNPHCKFHIYNGTRPCESVSSSVQLPEDELFARSPDPRSPKGWLVDLLNKFGTLNGFQILHDRFINGSALNVQIIAALIKPFGQCYEFLTLHTVKKYFLPIIEMVPQFLENLTDEELKKEAKNEAKNDALSMIIKSLKNLASRVPGQEETVKNLEIFRLKMILRLLQISSFNGKMNALNEVNKVISSVSYYTHRHGNPEEEEWLTAERMAEWIQQNNILSIVLRDSLHQPQYVEKLEKILRFVIKEKALTLQDLDNIWAAQAGKHEAIVKNVHDLLAKLAWDFSPEQLDHLFDCFKASWTNASKKQREKLLELIRRLAEDDKDGVMAHKVLNLLWNLAHSDDVPVDIMDLALSAHIKILDYSCSQDRDTQKIQWIDRFIEELRTNDKWVIPALKQIREICSLFGEAPQNLSQTQRSPHVFYRHDLINQLQHNHALVTLVAENLATYMESMRLYARDHEDYDPQTVRLGSRYSHVQEVQERLNFLRFLLKDGQLWLCAPQAKQIWKCLAENAVYLCDREACFKWYSKLMGDEPDLDPDINKDFFESNVLQLDPSLLTENGMKCFERFFKAVNCREGKLVAKRRAYMMDDLELIGLDYLWRVVIQSNDDIASRAIDLLKEIYTNLGPRLQVNQVVIHEDFIQSCFDRLKASYDTLCVLDGDKDSVNCARQEAVRMVRVLTVLREYINECDSDYHEERTILPMSRAFRGKHLSFVVRFPNQGRQVDDLEVWSHTNDTIGSVRRCILNRIKANVAHTKIELFVGGELIDPADDRKLIGQLNLKDKSLITAKLTQISSNMPSSPDSSSDSSTGSPGNHGNHYSDGPNPEVESCLPGVIMSLHPRYISFLWQVADLGSSLNMPPLRDGARVLMKLMPPDSTTIEKLRAICLDHAKLGESSLSPSLDSLFFGPSASQVLYLTEVVYALLMPAGAPLADDSSDFQFHFLKSGGLPLVLSMLTRNNFLPNADMETRRGAYLNALKIAKLLLTAIGYGHVRAVAEACQPGVEGVNPMTQINQVTHDQAVVLQSALQSIPNPSSECMLRNVSVRLAQQISDEASRYMPDICVIRAIQKIIWASGCGSLQLVFSPNEEITKIYEKTNAGNEPDLEDEQVCCEALEVMTLCFALIPTALDALSKEKAWQTFIIDLLLHCHSKTVRQVAQEQFFLMCTRCCMGHRPLLFFITLLFTVLGSTARERAKHSGDYFTLLRHLLNYAYNSNINVPNAEVLLNNEIDWLKRIRDDVKRTGETGIEETILEGHLGVTKELLAFQTSEKKFHIGCEKGGANLIKELIDDFIFPASNVYLQYMRNGELPAEQAIPVCGSPPTINAGFELLVALAVGCVRNLKQIVDSLTEMYYIGTAITTCEALTEWEYLPPVGPRPPKGFVGLKNAGATCYMNSVIQQLYMIPSIRNGILAIEGTGSDVDDDMSGDEKQDNESNVDPRDDVFGYPQQFEDKPALSKTEDRKEYNIGVLRHLQVIFGHLAASRLQYYVPRGFWKQFRLWGEPVNLREQHDALEFFNSLVDSLDEALKALGHPAMLSKVLGGSFADQKICQGCPHRYECEESFTTLNVDIRNHQNLLDSLEQYVKGDLLEGANAYHCEKCNKKVDTVKRLLIKKLPPVLAIQLKRFDYDWERECAIKFNDYFEFPRELDMEPYTVAGVAKLEGDNVNPESQLIQQSEQSESETAGSTKYRLVGVLVHSGQASGGHYYSYIIQRNGGDGERNRWYKFDDGDVTECKMDDDEEMKNQCFGGEYMGEVFDHMMKRMSYRRQKRWWNAYILFYERMDTIDQDDELIRYISELAITTRPHQIIMPSAIERSVRKQNVQFMHNRMQYSMEYFQFMKKLLTCNGVYLNPPPGQDHLLPEAEEITMISIQLAARFLFTTGFHTKKVVRGSASDWYDALCILLRHSKNVRFWFAHNVLFNVSNRFSEYLLECPSAEVRGAFAKLIVFIAHFSLQDGPCPSPFASPGPSSQAYDNLSLSDHLLRAVLNLLRREVSEHGRHLQQYFNLFVMYANLGVAEKTQLLKLSVPATFMLVSLDEGPGPPIKYQYAELGKLYSVVSQLIRCCNVSSRMQSSINGNPPLPNPFGDPNLSQPIMPIQQNVADILFVRTSYVKKIIEDCSNSEETVKLLRFCCWENPQFSSTVLSELLWQVAYSYTYELRPYLDLLLQILLIEDSWQTHRIHNALKGIPDDRDGLFDTIQRSKNHYQKRAYQCIKCMVALFSNCPVAYQILQGNGDLKRKWTWAVEWLGDELERRPYTGNPQYTYNNWSPPVQSNETSNGYFLERSHSARMTLAKACELCPEEEPDDQDAPDEHESPPPEDAPLYPHSPGSQYQQNNHVHGQPYTGPAAHHMNNPQRTGQRAQENYEGSEEVSPPQTKDQ

SEQ ID NO: 9274 - protein, 2570 aa, Homo sapiens
MTATTRGSPVGGNDNQGQAPDGQSQPPLQQNQTSSPDSSNENSPATPPDEQGQGDAPPQLEDEEPAFPHTDLAKLDDMINRPRWVVPVLPKGELEVLLEAAIDLSKKGLDVKSEACQRFFRDGLTISFTKILTDEAVSGWKFEIHRCIINNTHRLVELCVAKLSQDWFPLLELLAMALNPHCKFHIYNGTRPCESVSSSVQLPEDELFARSPDPRSPKGWLVDLLNKFGTLNGFQILHDRFINGSALNVQIIAALIKPFGQCYEFLTLHTVKKYFLPIIEMVPQFLENLTDEELKKEAKNEAKNDALSMIIKSLKNLASRVPGQEETVKNLEIFRLKMILRLLQISSFNGKMNALNEVNKVISSVSYYTHRHGNPEEEEWLTAERMAEWIQQNNILSIVLRDSLHQPQYVEKLEKILRFVIKEKALTLQDLDNIWAAQAGKHEAIVKNVHDLLAKLAWDFSPEQLDHLFDCFKASWTNASKKQREKLLELIRRLAEDDKDGVMAHKVLNLLWNLAHSDDVPVDIMDLALSAHIKILDYSCSQDRDTQKIQWIDRFIEELRTNDKWVIPALKQIREICSLFGEAPQNLSQTQRSPHVFYRHDLINQLQHNHALVTLVAENLATYMESMRLYARDHEDYDPQTVRLGSRYSHVQEVQERLNFLRFLLKDGQLWLCAPQAKQIWKCLAENAVYLCDREACFKWYSKLMGDEPDLDPDINKDFFESNVLQLDPSLLTENGMKCFERFFKAVNCREGKLVAKRRAYMMDDLELIGLDYLWRVVIQSNDDIASRAIDLLKEIYTNLGPRLQVNQVVIHEDFIQSCFDRLKASYDTLCVLDGDKDSVNCARQEAVRMVRVLTVLREYINECDSDYHEERTILPMSRAFRGKHLSFVVRFPNQGRQVDDLEVWSHTNDTIGSVRRCILNRIKANVAHTKIELFVGGELIDPADDRKLIGQLNLKDKSLITAKLTQISSNMPSSPDSSSDSSTGSPGNHGNHYSDGPNPEVESCLPGVIMSLHPRYISFLWQVADLGSSLNMPPLRDGARVLMKLMPPDSTTIEKLRAICLDHAKLGESSLSPSLDSLFFGPSASQVLYLTEVVYALLMPAGAPLADDSSDFQFHFLKSGGLPLVLSMLTRNNFLPNADMETRRGAYLNALKIAKLLLTAIGYGHVRAVAEACQPGVEGVNPMTQINQVTHDQAVVLQSALQSIPNPSSECMLRNVSVRLAQQISDEASRYMPDICVIRAIQKIIWASGCGSLQLVFSPNEEITKIYEKTNAGNEPDLEDEQVCCEALEVMTLCFALIPTALDALSKEKAWQTFIIDLLLHCHSKTVRQVAQEQFFLMCTRCCMGHRPLLFFITLLFTVLGSTARERAKHSGDYFTLLRHLLNYAYNSNINVPNAEVLLNNEIDWLKRIRDDVKRTGETGIEETILEGHLGVTKELLAFQTSEKKFHIGCEKGGANLIKELIDDFIFPASNVYLQYMRNGELPAEQAIPVCGSPPTINAGFELLVALAVGCVRNLKQIVDSLTEMYYIGTAITTCEALTEWEYLPPVGPRPPKGFVGLKNAGATCYMNSVIQQLYMIPSIRNGILAIEGTGSDVDDDMSGDEKQDNESNVDPRDDVFGYPQQFEDKPALSKTEDRKEYNIGVLRHLQVIFGHLAASRLQYYVPRGFWKQFRLWGEPVNLREQHDALEFFNSLVDSLDEALKALGHPAMLSKVLGGSFADQKICQGCPHRYECEESFTTLNVDIRNHQNLLDSLEQYVKGDLLEGANAYHCEKCNKKVDTVKRLLIKKLPPVLAIQLKRFDYDWERECAIKFNDYFEFPRELDMEPYTVAGVAKLEGDNVNPESQLIQQSEQSESETAGSTKYRLVGVLVHSGQASGGHYYSYIIQRNGGDGERNRWYKFDDGDVTECKMDDDEEMKNQCFGGEYMGEVFDHMMKRMSYRRQKRWWNAYILFYERMDTIDQDDELIRYISELAITTRPHQIIMPSAIERSVRKQNVQFMHNRMQYSMEYFQFMKKLLTCNGVYLNPPPGQDHLLPEAEEITMISIQLAARFLFTTGFHTKKVVRGSASDWYDALCILLRHSKNVRFWFAHNVLFNVSNRFSEYLLECPSAEVRGAFAKLIVFIAHFSLQDGPCPSPFASPGPSSQAYDNLSLSDHLLRAVLNLLRREVSEHGRHLQQYFNLFVMYANLGVAEKTQLLKLSVPATFMLVSLDEGPGPPIKYQYAELGKLYSVVSQLIRCCNVSSRMQSSINGNPPLPNPFGDPNLSQPIMPIQQNVADILFVRTSYVKKIIEDCSNSEETVKLLRFCCWENPQFSSTVLSELLWQVAYSYTYELRPYLDLLLQILLIEDSWQTHRIHNALKGIPDDRDGLFDTIQRSKNHYQKRAYQCIKCMVALFSNCPVAYQILQGNGDLKRKWTWAVEWLGDELERRPYTGNPQYTYNNWSPPVQSNETSNGYFLERSHSARMTLAKACELCPEEVKKATSVQQIEMEESKEPDDQDAPDEHESPPPEDAPLYPHSPGSQYQQNNHVHGQPYTGPAAHHMNNPQRTGQRAQENYEGSEEVSPPQTKDQ

SEQ ID NO: 9275 - protein, 108 aa, Homo sapiens
MWGAFLLYVSMKMGGTAGQSLEQPSEVTAVEGAIVQINCTYQTSGFYGLSWYQQHDGGAPTFLSYNALDGLEETGRFSSFLSRSDSYGYLLLQELQMKDSASYFCAVR

SEQ ID NO: 9276 - protein, 483 aa, Homo sapiens
MTKMDIRGAVDAAVPTNIIAAKAAEVRANKVNWQSYLQGQMISAEDCEFIQRFEMKRSPEEKQEMLQTEGSQCAKTFINLMTHICKEQTVQYILTMVDDMLQENHQRVSIFFDYARCSKNTAWPYFLPMLNRQDPFTVHMAARIIAKLAAWGKELMEGSDLNYYFNWIKTQLSSQKLRGSGVAVETGTVSSSDSSQYVQCVAGCLQLMLRVNEYRFAWVEADGVNCIMGVLSNKCGFQLQYQMIFSIWLLAFSPQMCEHLRRYNIIPVLSDILQESVKEKVTRIILAAFRNFLEKSTERETRQEYALAMIQCKVLKQLENLEQQKYDDEDISEDIKFLLEKLGESVQDLSSFDEYSSELKSGRLEWSPVHKSEKFWRENAVRLNEKNYELLKILTKLLEVSDDPQVLAVAAHDVGEYVRHYPRGKRVIEQLGGKQLVMNHMHHEDQQVRYNALLAVQKLMVHNWEYLGKQLQSEQPQTAAARS

SEQ ID NO: 9277 - protein, 465 aa, Homo sapiens
MTKMDIRGAVDAAVPTNIIAAKAAEVRANKVNWQSYLQGQMISAEDCEFIQRFEMKRSPEEKQEMLQTEGSQCAKTFINLMTHICKEQTVQYILTMVDDMLQENHQRVSIFFDYARCSKNTAWPYFLPMLNRQDPFTVHMAARIIAKLAAWGKELMEGSDLNYYFNWIKTQLSSQSSQYVQCVAGCLQLMLRVNEYRFAWVEADGVNCIMGVLSNKCGFQLQYQMIFSIWLLAFSPQMCEHLRRYNIIPVLSDILQESVKEKVTRIILAAFRNFLEKSTERETRQEYALAMIQCKVLKQLENLEQQKYDDEDISEDIKFLLEKLGESVQDLSSFDEYSSELKSGRLEWSPVHKSEKFWRENAVRLNEKNYELLKILTKLLEVSDDPQVLAVAAHDVGEYVRHYPRGKRVIEQLGGKQLVMNHMHHEDQQVRYNALLAVQKLMVHNWEYLGKQLQSEQPQTAAARS

SEQ ID NO: 9278 - protein, 563 aa, Homo sapiens
MGPLTIRDVTVEFSLEEWHCLDTAQQNLYRDVMLENYRNLVFLGIAVSKPDLITCLEQGKEPCNMKRHEMVAKPPVMCSHIAEDLCPERDIKYFFQKVILRRYDKCEHENLQLRKGCKSVDECKVCKGGYNGLNQCLITTQSKMYQCDKYVKVFYKFSNSDRHKIRHTEKKTCKCKECGKSFCMLSQLTRHKRIHIRENSHKCEECGKAFNQSSALTRHKMTHTGEKPYKCEECGKAFNRSSHLTQHKVIHTREKPYKCEECGKAFNRSSHITQHKRIHNREKPFKYDECCKAFKWSSALTTLTQHKRIHTGEKPYKCEECGKAFNQSSALTRHKMIHTGEKPFQCEECGKAFNRSSHLTQHKIIHTKEKPYKCEECGKAFNRSSHLTKHKRIHTREKAYKCDEYCKAFNWSSALTTLTQHKIIHTGEKPYKCEECGKAFNRSSYLIRHKIIHTGEKPYKCEECGKAFNQSSHLTQHKIIHTGEKPYKCEECGKAFNRSSHLSQHKIIHTGEKPYKCEECGKPFNRFSYLTVHKRIHAGENPNKYEECGKACNHSSNLTKHNS

SEQ ID NO: 9279 - protein, 535 aa, Homo sapiens
MGPLTIRDVTVEFSLEEWHCLDTAQQNLYRDVMLENYRNLVFLGIAVSKPDLITCLEQGKEPCNMKRHEMVAKPPVMCSHIAEDLCPERDIKYFFQKVILRRYDKCEHENLQLRKGCKSVDECKVCKGGYNGLNQCLITTQSKMYQCDKYVKVFYKFSNSDRHKIRHTEKKTCKCKECGKAFNQSSALTRHKMTHTGEKPYKCEECGKAFNRSSHLTQHKVIHTREKPYKCEECGKAFNRSSHITQHKRIHNREKPFKYDECCKAFKWSSALTTLTQHKRIHTGEKPYKCEECGKAFNQSSALTRHKMIHTGEKPFQCEECGKAFNRSSHLTQHKIIHTKEKPYKCEECGKAFNRSSHLTKHKRIHTREKAYKCDEYCKAFNWSSALTTLTQHKIIHTGEKPYKCEECGKAFNRSSYLIRHKIIHTGEKPYKCEECGKAFNQSSHLTQHKIIHTGEKPYKCEECGKAFNRSSHLSQHKIIHTGEKPYKCEECGKPFNRFSYLTVHKRIHAGENPNKYEECGKACNHSSNLTKHNS

SEQ ID NO: 9280 - protein, 531 aa, Homo sapiens
MLENYRNLVFLGIAVSKPDLITCLEQGKEPCNMKRHEMVAKPPVMCSHIAEDLCPERDIKYFFQKVILRRYDKCEHENLQLRKGCKSVDECKVCKGGYNGLNQCLITTQSKMYQCDKYVKVFYKFSNSDRHKIRHTEKKTCKCKECGKSFCMLSQLTRHKRIHIRENSHKCEECGKAFNQSSALTRHKMTHTGEKPYKCEECGKAFNRSSHLTQHKVIHTREKPYKCEECGKAFNRSSHITQHKRIHNREKPFKYDECCKAFKWSSALTTLTQHKRIHTGEKPYKCEECGKAFNQSSALTRHKMIHTGEKPFQCEECGKAFNRSSHLTQHKIIHTKEKPYKCEECGKAFNRSSHLTKHKRIHTREKAYKCDEYCKAFNWSSALTTLTQHKIIHTGEKPYKCEECGKAFNRSSYLIRHKIIHTGEKPYKCEECGKAFNQSSHLTQHKIIHTGEKPYKCEECGKAFNRSSHLSQHKIIHTGEKPYKCEECGKPFNRFSYLTVHKRIHAGENPNKYEECGKACNHSSNLTKHNS

SEQ ID NO: 9281 - protein, 530 aa, Homo sapiens
MGPLTIRDVTVEFSLEEWHCLDTAQQNLYRDVMLENYRNLVFLGIAVSKPDLCPERDIKYFFQKVILRRYDKCEHENLQLRKGCKSVDECKVCKGGYNGLNQCLITTQSKMYQCDKYVKVFYKFSNSDRHKIRHTEKKTCKCKECGKSFCMLSQLTRHKRIHIRENSHKCEECGKAFNQSSALTRHKMTHTGEKPYKCEECGKAFNRSSHLTQHKVIHTREKPYKCEECGKAFNRSSHITQHKRIHNREKPFKYDECCKAFKWSSALTTLTQHKRIHTGEKPYKCEECGKAFNQSSALTRHKMIHTGEKPFQCEECGKAFNRSSHLTQHKIIHTKEKPYKCEECGKAFNRSSHLTKHKRIHTREKAYKCDEYCKAFNWSSALTTLTQHKIIHTGEKPYKCEECGKAFNRSSYLIRHKIIHTGEKPYKCEECGKAFNQSSHLTQHKIIHTGEKPYKCEECGKAFNRSSHLSQHKIIHTGEKPYKCEECGKPFNRFSYLTVHKRIHAGENPNKYEECGKACNHSSNLTKHNS

SEQ ID NO: 9282 - protein, 271 aa, Homo sapiens
MTEPQVGCVACPRVHKEPAQVGTPWPAKPRSHPRKRDPTALLPRSLWPACQESVTALCFLQETVERLGQSPAQDTPVLGPCWDPMALGTQGRLLLDRDSKDTQTRISQKGRRLQPPGTPSAPPQRRPRKQLNPCRGTERVDPGFEGVTLKFQIKPDSSLQIIPTYSLPCSSRSQESPADAVGGPAAHPGGTEAHSAGSEALEPRRCASCRTQRTPLWRDAEDGTPLCNACGIRYKKYGTRCSSCWLVPRKNVQPKRLCGRCGVSLDPIQEG

SEQ ID NO: 9283 - protein, 412 aa, Homo sapiens
MIGMLESLQHESDLLQHDQIHTGEKPYECNECRKTFSLKQNLVEHKKMHTGEKSHECTECGKVCSRVSSLTLHLRSHTGKKAYKCNKCGKAFSQKENFLSHQKHHTGEKPYECEKVSIQMPTIIRHQKNHTGTKPYACKECGKAFNGKAYLTEHEKIHTGEKPFECNQCGRAFSQKQYLIKHQNIHTGKKPFKCSECGKAFSQKENLIIHQRIHTGEKPYECKGCGKAFIQKSSLIRHQRSHTGEKPYTCKECGKAFSGKSNLTEHEKIHIGEKPYKCNECGTIFRQKQYLIKHHNIHTGEKPYECNKCGKAFSRITSLIVHVRIHTGDKPYECKVCGKAFCQSSSLTVHMRSHTGEKPYGCNECGKAFSQFSTLALHMRIHTGEKPYQCSECGKAFSQKSHHIRHQRIHTH

SEQ ID NO: 9284 - protein, 569 aa, Homo sapiens
MSSAPRGPPSVAPLPAGIGRSTAKTPGLPGSLEMGPLTFRDVAIEFSLEEWQCLDTSQQNLYRNVMLDNYRNLVFLGIAVSKPDLITCLEQGKEPCNMKRHAMVAKPPVVCSHFAQDLWPKQGLKDSFQKVILRRYGKYGHENLQLRKGCKSADEHKVHKRGYNGLNQCLTTTQSKIFQCDKYVKVLHKFSNSNIHKKRQTGKKPFKCKECGKSCCILSQLTQHKKTATRVNFYKCKTCGKAFNQFSNLTKHKIIHPEVNPYKCEECGKAFNQSLTLTKHKKIHTEEKPYKCEDCGKVFSVFSVLTKHKIIHTGTKPYNCEECGKGFSIFSTLTKHKIIHTGEKPYKCNECGKAFNWSSTLTKHKRIHTGEKPYKCEECGKAFNQSSTLTRHKIVHTGEKPYKCEECGKAFKRSTTLTKHKRIYTKEKPYKCEECGKAFSVFSTLTKHKIIHTGAKPYKCEECGSAFRAFSTLTEHKRVHTGEKPYKCNECGKAFNWSSTLTKHKRIHTGEKPYKCEECGKAFNRSSNLTRHKKIHTGEKPYKPKRCDSAFDNTPNFSRHKRNHMGEKS

SEQ ID NO: 9285 - protein, 504 aa, Homo sapiens
MLDNYRNLVFLGIAVSKPDLITCLEQGKEPCNMKRHAMVAKPPVVCSHFAQDLWPKQGLKDSFQKVILRRYGKYGHENLQLRKGCKSADEHKVHKRGYNGLNQCLTTTQSKIFQCDKYVKVLHKFSNSNIHKKRQTGKKPFKCKECGKSCCILSQLTQHKKTATRVNFYKCKTCGKAFNQFSNLTKHKIIHPEVNPYKCEECGKAFNQSLTLTKHKKIHTEEKPYKCEDCGKVFSVFSVLTKHKIIHTGTKPYNCEECGKGFSIFSTLTKHKIIHTGEKPYKCNECGKAFNWSSTLTKHKRIHTGEKPYKCEECGKAFNQSSTLTRHKIVHTGEKPYKCEECGKAFKRSTTLTKHKRIYTKEKPYKCEECGKAFSVFSTLTKHKIIHTGAKPYKCEECGSAFRAFSTLTEHKRVHTGEKPYKCNECGKAFNWSSTLTKHKRIHTGEKPYKCEECGKAFNRSSNLTRHKKIHTGEKPYKPKRCDSAFDNTPNFSRHKRNHMGEKS

SEQ ID NO: 9286 - protein, 126 aa, Homo sapiens
MAASRYRRFLKLCEEWPVDETKRGRDLGAYLRQRVAQAFREGENTQVAEPEACDQMYESLARLHSNYYKHKYPRPRDTSFSGLSLEEYKLILSTDTLEELKEIDKGMWKKLQEKFAPKGPEEDHKA

SEQ ID NO: 9287 - protein, 830 aa, Homo sapiens
MGSMFRSEEVALVQLFLPTAAAYTCVSRLGELGLVEFRDLNASVSAFQRRFVVDVRRCEELEKTFTFLQEEVRRAGLVLPPPKGRLPAPPPRDLLRIQEETERLAQELRDVRGNQQALRAQLHQLQLHAAVLRQGHEPQLAAAHTDGASERTPLLQAPGGPHQDLRVNFVAGAVEPHKAPALERLLWRACRGFLIASFRELEQPLEHPVTGEPATWMTFLISYWGEQIGQKIRKITDCFHCHVFPFLQQEEARLGALQQLQQQSQELQEVLGETERFLSQVLGRVLQLLPPGQVQVHKMKAVYLALNQCSVSTTHKCLIAEAWCSVRDLPALQEALRDSSMEEGVSAVAHRIPCRDMPPTLIRTNRFTASFQGIVDAYGVGRYQEVNPAPYTIITFPFLFAVMFGDVGHGLLMFLFALAMVLAENRPAVKAAQNEIWQTFFRGRYLLLLMGLFSIYTGFIYNECFSRATSIFPSGWSVAAMANQSGWSDAFLAQHTMLTLDPNVTGVFLGPYPFGIDPIWSLAANHLSFLNSFKMKMSVILGVVHMAFGVVLGVFNHVHFGQRHRLLLETLPELTFLLGLFGYLVFLVIYKWLCVWAARAASAPSILIHFINMFLFSHSPSNRLLYPRQEVVQATLVVLALAMVPILLLGTPLHLLHRHRRRLRRRPADRQEENKAGLLDLPDASVNGWSSDEEKAGGLDDEEEAELVPSEVLMHQAIHTIEFCLGCVSNTASYLRLWALSLAHAQLSEVLWAMVMRIGLGLGREVGVAAVVLVPIFAAFAVMTVAILLVMEGLSAFLHALRLHWVEFQNKFYSGTGYKLSPFTFAATDD

SEQ ID NO: 9288 - protein, 614 aa, Homo sapiens
MTFLISYWGEQIGQKIRKITDCFHCHVFPFLQQEEARLGALQQLQQQSQELQEVLGETERFLSQVLGRVLQLLPPGQVQVHKMKAVYLALNQCSVSTTHKCLIAEAWCSVRDLPALQEALRDSSMEEGVSAVAHRIPCRDMPPTLIRTNRFTASFQGIVDAYGVGRYQEVNPAPYTIITFPFLFAVMFGDVGHGLLMFLFALAMVLAENRPAVKAAQNEIWQTFFRGRYLLLLMGLFSIYTGFIYNECFSRATSIFPSGWSVAAMANQSGWSDAFLAQHTMLTLDPNVTGVFLGPYPFGIDPIWSLAANHLSFLNSFKMKMSVILGVVHMAFGVVLGVFNHVHFGQRHRLLLETLPELTFLLGLFGYLVFLVIYKWLCVWAARAASAPSILIHFINMFLFSHSPSNRLLYPRQEVVQATLVVLALAMVPILLLGTPLHLLHRHRRRLRRRPADRQEENKAGLLDLPDASVNGWSSDEEKAGGLDDEEEAELVPSEVLMHQAIHTIEFCLGCVSNTASYLRLWALSLAHAQLSEVLWAMVMRIGLGLGREVGVAAVVLVPIFAAFAVMTVAILLVMEGLSAFLHALRLHWVEFQNKFYSGTGYKLSPFTFAATDD

SEQ ID NO: 9289 - protein, 856 aa, Homo sapiens
MGSLFRSETMCLAQLFLQSGTAYECLSALGEKGLVQFRDLNQNVSSFQRKFVGEVKRCEELERILVYLVQEINRADIPLPEGEASPPAPPLKQVLEMQEQLQKLEVELREVTKNKEKLRKNLLELIEYTHMLRVTKTFVKRNVEFEPTYEEFPSLESDSLLDYSCMQRLGAKLGFVSGLINQGKVEAFEKMLWRVCKGYTIVSYAELDESLEDPETGEVIKWYVFLISFWGEQIGHKVKKICDCYHCHVYPYPNTAEERREIQEGLNTRIQDLYTVLHKTEDYLRQVLCKAAESVYSRVIQVKKMKAIYHMLNMCSFDVTNKCLIAEVWCPEADLQDLRRALEEGSRESGATIPSFMNIIPTKETPPTRIRTNKFTEGFQNIVDAYGVGSYREVNPALFTIITFPFLFAVMFGDFGHGFVMFLFALLLVLNENHPRLNQSQEIMRMFFNGRYILLLMGLFSVYTGLIYNDCFSKSVNLFGSGWNVSAMYSSSHPPAEHKKMVLWNDSVVRHNSILQLDPSIPGVFRGPYPLGIDPIWNLATNRLTFLNSFKMKMSVILGIIHMTFGVILGIFNHLHFRKKFNIYLVSIPELLFMLCIFGYLIFMIFYKWLVFSAETSRVAPSILIEFINMFLFPASKTSGLYTGQEYVQRVLLVVTALSVPVLFLGKPLFLLWLHNGRSCFGVNRSGYTLIRKDSEEEVSLLGSQDIEEGNHQVEDGCREMACEEFNFGEILMTQVIHSIEYCLGCISNTASYLRLWALSLAHAQLSDVLWAMLMRVGLRVDTTYGVLLLLPVIALFAVLTIFILLIMEGLSAFLHAIRLHWVEFQNKFYVGAGTKFVPFSFSLLSSKFNNDDSVA

SEQ ID NO: 9290 - protein, 456 aa, Homo sapiens
MAGLQRLASHLPVGVMLPHNTTEAPGPHSAKQDSYEQGDSSQQSLKGHLRNNFQKQLLSNKELILDKVYTHPKWNTQTKARSYSYPHCTGISQQDPESDSQGQGNGLFYSSGPQSWYPKANNQDFIPFTKKRVGVDRAFPLKPMVHRKSCSTGEAGTDGDHNVYPRPPEPREFSSRNFGVRNQGNFSVVGTVLAATQAEKAVANFDRTEWVQIRRLEAAGESLEEEIRRKQILLRGKLKKTEEELRRIQTQKEQAKENENGELQKIILPRSRVKGNKSNTMYKPIFSPEFEFEEEFSRDRREDETWGRSQQNSGPFQFSDYRIQRLKRERLVASNNKIRDPVSEPSVEKFSPPSETPVGALQGSARNSSLSMAPDSSGSSGSIEEPQLGECSHCGRKFLSFRLERHSNICSRMRGSKRKVFDSSRARAKGTELEQYLNWKGPASAKAEPPQKSNWR

SEQ ID NO: 9291 - protein, 275 aa, Homo sapiens
MAGLQRLASHLPVGVMLPHNTTEAPGPHSAKQDSYEQGDSSQQSLKGHLRNNFQKQLLSNKELILDKVYTHPKWNTQTKARSYSYPHCTGISQQDPESDSQGQGNGLFYSSGPQSWYPKANNQDFIPFTKKRVGVDRAFPLKPMVHRKSCSTGEAGTDGDHNVYPRPPEPREFSSRNFGVRNQGNFSVVGTVLAATQAEKAVANFDRTEWVQIRRLEAAGESLEEEIRRKQILLRGKLKKTEEELRRIQTQKEQAKENENGELQKIILPRSRVKG

SEQ ID NO: 9292 - protein, 2382 aa, Homo sapiens
MSGGAAEKQSSTPGSLFLSPPAPAPKNGSSSDSSVGEKLGAAAADAVTGRTEEYRRRRHTMDKDSRGAAATTTTTEHRFFRRSVICDSNATALELPGLPLSLPQPSIPAAVPQSAPPEPHREETVTATATSQVAQQPPAAAAPGEQAVAGPAPSTVPSSTSKDRPVSQPSLVGSKEEPPPARSGSGGGSAKEPQEERSQQQDDIEELETKAVGMSNDGRFLKFDIEIGRGSFKTVYKGLDTETTVEVAWCELQDRKLTKSERQRFKEEAEMLKGLQHPNIVRFYDSWESTVKGKKCIVLVTELMTSGTLKTYLKRFKVMKIKVLRSWCRQILKGLQFLHTRTPPIIHRDLKCDNIFITGPTGSVKIGDLGLATLKRASFAKSVIGTPEFMAPEMYEEKYDESVDVYAFGMCMLEMATSEYPYSECQNAAQIYRRVTSGVKPASFDKVAIPEVKEIIEGCIRQNKDERYSIKDLLNHAFFQEETGVRVELAEEDDGEKIAIKLWLRIEDIKKLKGKYKDNEAIEFSFDLERDVPEDVAQEMVESGYVCEGDHKTMAKAIKDRVSLIKRKREQRQLVREEQEKKKQEESSLKQQVEQSSASQTGIKQLPSASTGIPTASTTSASVSTQVEPEEPEADQHQQLQYQQPSISVLSDGTVDSGQGSSVFTESRVSSQQTVSYGSQHEQAHSTGTVPGHIPSTVQAQSQPHGVYPPSSVAQGQSQGQPSSSSLTGVSSSQPIQHPQQQQGIQQTAPPQQTVQYSLSQTSTSSEATTAQPVSQPQAPQVLPQVSAGKQLPVSQPVPTIQGEPQIPVATQPSVVPVHSGAHFLPVGQPLPTPLLPQYPVSQIPISTPHVSTAQTGFSSLPITMAAGITQPLLTLASSATTAAIPGVSTVVPSQLPTLLQPVTQLPSQVHPQLLQPAVQSMGIPANLGQAAEVPLSSGDVLYQGFPPRLPPQYPGDSNIAPSSNVASVCIHSTVLSPPMPTEVLATPGYFPTVVQPYVESNLLVPMGGVGGQVQVSQPGGSLAQAPTTSSQQAVLESTQGVSQVAPAEPVAVAQTQATQPTTLASSVDSAHSDVASGMSDGNENVPSSSGRHEGRTTKRHYRKSVRSRSRHEKTSRPKLRILNVSNKGDRVVECQLETHNRKMVTFKFDLDGDNPEEIATIMVNNDFILAIERESFVDQVREIIEKADEMLSEDVSVEPEGDQGLESLQGKDDYGFSGSQKLEGEFKQPIPASSMPQQIGIPTSSLTQVVHSAGRRFIVSPVPESRLRESKVFPSEITDTVAASTAQSPGMNLSHSASSLSLQQAFSELRRAQMTEGPNTAPPNFSHTGPTFPVVPPFLSSIAGVPTTAAATAPVPATSSPPNDISTSVIQSEVTVPTEEGIAGVATSTGVVTSGGLPIPPVSESPVLSSVVSSITIPAVVSISTTSPSLQVPTSTSEIVVSSTALYPSVTVSATSASAGGSTATPGPKPPAVVSQQAAGSTTVGATLTSVSTTTSFPSTASQLCIQLSSSTSTPTLAETVVVSAHSLDKTSHSSTTGLAFSLSAPSSSSSPGAGVSSYISQPGGLHPLVIPSVIASTPILPQAAGPTSTPLLPQVPSIPPLVQPVANVPAVQQTLIHSQPQPALLPNQPHTHCPEVDSDTQPKAPGIDDIKTLEEKLRSLFSEHSSSGAQHASVSLETSLVIESTVTPGIPTTAVAPSKLLTSTTSTCLPPTNLPLGTVALPVTPVVTPGQVSTPVSTTTSGVKPGTAPSKPPLTKAPVLPVGTELPAGTLPSEQLPPFPGPSLTQSQQPLEDLDAQLRRTLSPEMITVTSAVGPVSMAAPTAITEAGTQPQKGVSQVKEGPVLATSSGAGVFKMGRFQVSVAADGAQKEGKNKSEDAKSVHFESSTSESSVLSSSSPESTLVKPEPNGITIPGISSDVPESAHKTTASEAKSDTGQPTKVGRFQVTTTANKVGRFSVSKTEDKITDTKKEGPVASPPFMDLEQAVLPAVIPKKEKPELSEPSHLNGPSSDPEAAFLSRDVDDGSGSPHSPHQLSSKSLPSQNLSQSLSNSFNSSYMSSDNESDIEDEDLKLELRRLRDKHLKEIQDLQSRQKHEIESLYTKLGKVPPAVIIPPAAPLSGRRRRPTKSKGSKSSRSSSLGNKSPQLSGNLSGQSAASVLHPQQTLHPPGNIPESGQNQLLQPLKPSPSSDNLYSAFTSDGAISVPSLSAPGQGTSSTNTVGATVNSQAAQAQPPAMTSSRKGTFTDDLHKLVDNWARDAMNLSGRRGSKGHMNYEGPGMARKFSAPGQLCISMTSNLGGSAPISAASATSLGHFTKSMCPPQQYGFPATPFGAQWSGTGGPAPQPLGQFQPVGTASLQNFNISNLQKSISNPPGSNLRTT

SEQ ID NO: 9293 - protein, 2135 aa, Homo sapiens
MSGGAAEKQSSTPGSLFLSPPAPAPKNGSSSDSSVGEKLGAAAADAVTGRTEEYRRRRHTMDKDSRGAAATTTTTEHRFFRRSVICDSNATALELPGLPLSLPQPSIPAAVPQSAPPEPHREETVTATATSQVAQQPPAAAAPGEQAVAGPAPSTVPSSTSKDRPVSQPSLVGSKEEPPPARSGSGGGSAKEPQEERSQQQDDIEELETKAVGMSNDGRFLKFDIEIGRGSFKTVYKGLDTETTVEVAWCELQDRKLTKSERQRFKEEAEMLKGLQHPNIVRFYDSWESTVKGKKCIVLVTELMTSGTLKTYLKRFKVMKIKVLRSWCRQILKGLQFLHTRTPPIIHRDLKCDNIFITGPTGSVKIGDLGLATLKRASFAKSVIGTPEFMAPEMYEEKYDESVDVYAFGMCMLEMATSEYPYSECQNAAQIYRRVTSGVKPASFDKVAIPEVKEIIEGCIRQNKDERYSIKDLLNHAFFQEETGVRVELAEEDDGEKIAIKLWLRIEDIKKLKGKYKDNEAIEFSFDLERDVPEDVAQEMVESGYVCEGDHKTMAKAIKDRVSLIKRKREQRQLVREEQEKKKQEESSLKQQVEQSSASQTGIKQLPSASTGIPTASTTSASVSTQVEPEEPEADQHQQLQYQQPSISVLSDGTVDSGQGSSVFTESRVSSQQTVSYGSQHEQAHSTGTVPGHIPSTVQAQSQPHGVYPPSSVAQGQSQGQPSSSSLTGVSSSQPIQHPQQQGIQQTAPPQQTVQYSLSQTSTSSEATTAQPVSQPQAPQVLPQVSAGKQSTQGVSQVAPAEPVAVAQTQATQPTTLASSVDSAHSDVASGMSDGNENVPSSSGRHEGRTTKRHYRKSVRSRSRHEKTSRPKLRILNVSNKGDRVVECQLETHNRKMVTFKFDLDGDNPEEIATIMVNNDFILAIERESFVDQVREIIEKADEMLSEDVSVEPEGDQGLESLQGKDDYGFSGSQKLEGEFKQPIPASSMPQQIGIPTSSLTQVVHSAGRRFIVSPVPESRLRESKVFPSEITDTVAASTAQSPGMNLSHSASSLSLQQAFSELRRAQMTEGPNTAPPNFSHTGPTFPVVPPFLSSIAGVPTTAAATAPVPATSSPPNDISTSVIQSEVTVPTEEGIAGVATSTGVVTSGGLPIPPVSESPVLSSVVSSITIPAVVSISTTSPSLQVPTSTSEIVVSSTALYPSVTVSATSASAGGSTATPGPKPPAVVSQQAAGSTTVGATLTSVSTTTSFPSTASQLCIQLSSSTSTPTLAETVVVSAHSLDKTSHSSTTGLAFSLSAPSSSSSPGAGVSSYISQPGGLHPLVIPSVIASTPILPQAAGPTSTPLLPQVPSIPPLVQPVANVPAVQQTLIHSQPQPALLPNQPHTHCPEVDSDTQPKAPGIDDIKTLEEKLRSLFSEHSSSGAQHASVSLETSLVIESTVTPGIPTTAVAPSKLLTSTTSTCLPPTNLPLGTVALPVTPVVTPGQVSTPVSTTTSGVKPGTAPSKPPLTKAPVLPVGTELPAGTLPSEQLPPFPGPSLTQSQQPLEDLDAQLRRTLSPEMITVTSAVGPVSMAAPTAITEAGTQPQKGVSQVKEGPVLATSSGAGVFKMGRFQVSVAADGAQKEGKNKSEDAKSVHFESSTSESSVLSSSSPESTLVKPEPNGITIPGISSDVPESAHKTTASEAKSDTGQPTKVGRFQVTTTANKVGRFSVSKTEDKITDTKKEGPVASPPFMDLEQAVLPAVIPKKEKPELSEPSHLNGPSSDPEAAFLSRDVDDGSGSPHSPHQLSSKSLPSQNLSQSLSNSFNSSYMSSDNESDIEDEDLKLELRRLRDKHLKEIQDLQSRQKHEIESLYTKLGKVPPAVIIPPAAPLSGRRRRPTKSKGSKSSRSSSLGNKSPQLSGNLSGQSAASVLHPQQTLHPPGNIPESGQNQLLQPLKPSPSSDNLYSAFTSDGAISVPSLSAPGQGTSSTNTVGATVNSQAAQAQPPAMTSSRKGTFTDDLHKLVDNWARDAMNLSGRRGSKGHMNYEGPGMARKFSAPGQLCISMTSNLGGSAPISAASATSLGHFTKSMCPPQQYGFPATPFGAQWSGTGGPAPQPLGQFQPVGTASLQNFNISNLQKSISNPPGSNLRTT

SEQ ID NO: 9294 - protein, 1975 aa, Homo sapiens
MDIKKKDFCSVFVIINSHCCCCPQKDCINEGVKPASFDKVAIPEVKEIIEGCIRQNKDERYSIKDLLNHAFFQEETGVRVELAEEDDGEKIAIKLWLRIEDIKKLKGKYKDNEAIEFSFDLERDVPEDVAQEMVESGYVCEGDHKTMAKAIKDRVSLIKRKREQRQLVREEQEKKKQEESSLKQQVEQSSASQTGIKQLPSASTGIPTASTTSASVSTQVEPEEPEADQHQQLQYQQPSISVLSDGTVDSGQGSSVFTESRVSSQQTVSYGSQHEQAHSTGTVPGHIPSTVQAQSQPHGVYPPSSVAQGQSQGQPSSSSLTGVSSSQPIQHPQQQQGIQQTAPPQQTVQYSLSQTSTSSEATTAQPVSQPQAPQVLPQVSAGKQLPVSQPVPTIQGEPQIPVATQPSVVPVHSGAHFLPVGQPLPTPLLPQYPVSQIPISTPHVSTAQTGFSSLPITMAAGITQPLLTLASSATTAAIPGVSTVVPSQLPTLLQPVTQLPSQVHPQLLQPAVQSMGIPANLGQAAEVPLSSGDVLYQGFPPRLPPQYPGDSNIAPSSNVASVCIHSTVLSPPMPTEVLATPGYFPTVVQPYVESNLLVPMGGVGGQVQVSQPGGSLAQAPTTSSQQAVLESTQGVSQVAPAEPVAVAQTQATQPTTLASSVDSAHSDVASGMSDGNENVPSSSGRHEGRTTKRHYRKSVRSRSRHEKTSRPKLRILNVSNKGDRVVECQLETHNRKMVTFKFDLDGDNPEEIATIMVNNDFILAIERESFVDQVREIIEKADEMLSEDVSVEPEGDQGLESLQGKDDYGFSGSQKLEGEFKQPIPASSMPQQIGIPTSSLTQVVHSAGRRFIVSPVPESRLRESKVFPSEITDTVAASTAQSPGMNLSHSASSLSLQQAFSELRRAQMTEGPNTAPPNFSHTGPTFPVVPPFLSSIAGVPTTAAATAPVPATSSPPNDISTSVIQSEVTVPTEEGIAGVATSTGVVTSGGLPIPPVSESPVLSSVVSSITIPAVVSISTTSPSLQVPTSTSEIVVSSTALYPSVTVSATSASAGGSTATPGPKPPAVVSQQAAGSTTVGATLTSVSTTTSFPSTASQLCIQLSSSTSTPTLAETVVVSAHSLDKTSHSSTTGLAFSLSAPSSSSSPGAGVSSYISQPGGLHPLVIPSVIASTPILPQAAGPTSTPLLPQVPSIPPLVQPVANVPAVQQTLIHSQPQPALLPNQPHTHCPEVDSDTQPKAPGIDDIKTLEEKLRSLFSEHSSSGAQHASVSLETSLVIESTVTPGIPTTAVAPSKLLTSTTSTCLPPTNLPLGTVALPVTPVVTPGQVSTPVSTTTSGVKPGTAPSKPPLTKAPVLPVGTELPAGTLPSEQLPPFPGPSLTQSQQPLEDLDAQLRRTLSPEMITVTSAVGPVSMAAPTAITEAGTQPQKGVSQVKEGPVLATSSGAGVFKMGRFQVSVAADGAQKEGKNKSEDAKSVHFESSTSESSVLSSSSPESTLVKPEPNGITIPGISSDVPESAHKTTASEAKSDTGQPTKVGRFQVTTTANKVGRFSVSKTEDKITDTKKEGPVASPPFMDLEQAVLPAVIPKKEKPELSEPSHLNGPSSDPEAAFLSRDVDDGSGSPHSPHQLSSKSLPSQNLSQSLSNSFNSSYMSSDNESDIEDEDLKLELRRLRDKHLKEIQDLQSRQKHEIESLYTKLGKVPPAVIIPPAAPLSGRRRRPTKSKGSKSSRSSSLGNKSPQLSGNLSGQSAASVLHPQQTLHPPGNIPESGQNQLLQPLKPSPSSDNLYSAFTSDGAISVPSLSAPGQGTSSTNTVGATVNSQAAQAQPPAMTSSRKGTFTDDLHKLVDNWARDAMNLSGRRGSKGHMNYEGPGMARKFSAPGQLCISMTSNLGGSAPISAASATSLGHFTKSMCPPQQYGFPATPFGAQWSGTGGPAPQPLGQFQPVGTASLQNFNISNLQKSISNPPGSNLRTT

SEQ ID NO: 9295 - protein, 2634 aa, Homo sapiens
MSGGAAEKQSSTPGSLFLSPPAPAPKNGSSSDSSVGEKLGAAAADAVTGRTEEYRRRRHTMDKDSRGAAATTTTTEHRFFRRSVICDSNATALELPGLPLSLPQPSIPAAVPQSAPPEPHREETVTATATSQVAQQPPAAAAPGEQAVAGPAPSTVPSSTSKDRPVSQPSLVGSKEEPPPARSGSGGGSAKEPQEERSQQQDDIEELETKAVGMSNDGRFLKFDIEIGRGSFKTVYKGLDTETTVEVAWCELQDRKLTKSERQRFKEEAEMLKGLQHPNIVRFYDSWESTVKGKKCIVLVTELMTSGTLKTYLKRFKVMKIKVLRSWCRQILKGLQFLHTRTPPIIHRDLKCDNIFITGPTGSVKIGDLGLATLKRASFAKSVIGTPEFMAPEMYEEKYDESVDVYAFGMCMLEMATSEYPYSECQNAAQIYRRVTSGVKPASFDKVAIPEVKEIIEGCIRQNKDERYSIKDLLNHAFFQEETGVRVELAEEDDGEKIAIKLWLRIEDIKKLKGKYKDNEAIEFSFDLERDVPEDVAQEMVESGYVCEGDHKTMAKAIKDRVSLIKRKREQRQLVREEQEKKKQEESSLKQQVEQSSASQTGIKQLPSASTGIPTASTTSASVSTQVEPEEPEADQHQQLQYQQPSISVLSDGTVDSGQGSSVFTESRVSSQQTVSYGSQHEQAHSTGTVPGHIPSTVQAQSQPHGVYPPSSVPRRGRSMSVCVPIFLLLPLCPASLPVLFHPTASTVCTSFSFPPPDCPEETFAEKLSKALESVLPMHSASQRKHRRSSLPSLFVSTPQSMAHPCGGTPTYPESQIFFPTIHERPVSFSPPPTCPPKVAISQRRKSTSFLEAQTHHFQPLLRTVGQSLLPPGGSPTNWTPEAVVMLGTTASRVTGESCEIQVHPMFEPSQVYSDYRPGLVLPEEAHYFIPQEAVYVAGVHYQARVAEQYEGIPYNSSVLSSPMKQIPEQKPVQGGPTSSSVFEFPSGQAFLVGHLQNLRLDSGLGPGSPLSSISAPISTDATRLKFHPVFVPHSAPAVLTHNNESRSNCVFEFHVHTPSSSSGEGGGILPQRVYRNRQVAVDLNQEELPPQSVGLHGYLQPVTEEKHNYHAPELTVSVVEPIGQNWPIGSPEYSSDSSQITSSDPSDFQSPPPTGGAAAPFGSDVSMPFIHLPQTVLQESPLFFCFPQGTTSQQVLTASFSSGGSALHPQAQGQSQGQPSSSSLTGVSSSQPIQHPQQQQGIQQTAPPQQTVQYSLSQTSTSSEATTAQPVSQPQAPQVLPQVSAGKQSTQGVSQVAPAEPVAVAQTQATQPTTLASSVDSAHSDVASGMSDGNENVPSSSGRHEGRTTKRHYRKSVRSRSRHEKTSRPKLRILNVSNKGDRVVECQLETHNRKMVTFKFDLDGDNPEEIATIMVNNDFILAIERESFVDQVREIIEKADEMLSEDVSVEPEGDQGLESLQGKDDYGFSGSQKLEGEFKQPIPASSMPQQIGIPTSSLTQVVHSAGRRFIVSPVPESRLRESKVFPSEITDTVAASTAQSPGMNLSHSASSLSLQQAFSELRRAQMTEGPNTAPPNFSHTGPTFPVVPPFLSSIAGVPTTAAATAPVPATSSPPNDISTSVIQSEVTVPTEEGIAGVATSTGVVTSGGLPIPPVSESPVLSSVVSSITIPAVVSISTTSPSLQVPTSTSEIVVSSTALYPSVTVSATSASAGGSTATPGPKPPAVVSQQAAGSTTVGATLTSVSTTTSFPSTASQLCIQLSSSTSTPTLAETVVVSAHSLDKTSHSSTTGLAFSLSAPSSSSSPGAGVSSYISQPGGLHPLVIPSVIASTPILPQAAGPTSTPLLPQVPSIPPLVQPVANVPAVQQTLIHSQPQPALLPNQPHTHCPEVDSDTQPKAPGIDDIKTLEEKLRSLFSEHSSSGAQHASVSLETSLVIESTVTPGIPTTAVAPSKLLTSTTSTCLPPTNLPLGTVALPVTPVVTPGQVSTPVSTTTSGVKPGTAPSKPPLTKAPVLPVGTELPAGTLPSEQLPPFPGPSLTQSQQPLEDLDAQLRRTLSPEMITVTSAVGPVSMAAPTAITEAGTQPQKGVSQVKEGPVLATSSGAGVFKMGRFQVSVAADGAQKEGKNKSEDAKSVHFESSTSESSVLSSSSPESTLVKPEPNGITIPGISSDVPESAHKTTASEAKSDTGQPTKVGRFQVTTTANKVGRFSVSKTEDKITDTKKEGPVASPPFMDLEQAVLPAVIPKKEKPELSEPSHLNGPSSDPEAAFLSRDVDDGSGSPHSPHQLSSKSLPSQNLSQSLSNSFNSSYMSSDNESDIEDEDLKLELRRLRDKHLKEIQDLQSRQKHEIESLYTKLGKVPPAVIIPPAAPLSGRRRRPTKSKGSKSSRSSSLGNKSPQLSGNLSGQSAASVLHPQQTLHPPGNIPESGQNQLLQPLKPSPSSDNLYSAFTSDGAISVPSLSAPGQGTSSTNTVGATVNSQAAQAQPPAMTSSRKGTFTDDLHKLVDNWARDAMNLSGRRGSKGHMNYEGPGMARKFSAPGQLCISMTSNLGGSAPISAASATSLGHFTKSMCPPQQYGFPATPFGAQWSGTGGPAPQPLGQFQPVGTASLQNFNISNLQKSISNPPGSNLRTT

SEQ ID NO: 9296 - protein, 2642 aa, Homo sapiens
MSGGAAEKQSSTPGSLFLSPPAPAPKNGSSSDSSVGEKLGAAAADAVTGRTEEYRRRRHTMDKDSRGAAATTTTTEHRFFRRSVICDSNATALELPGLPLSLPQPSIPAAVPQSAPPEPHREETVTATATSQVAQQPPAAAAPGEQAVAGPAPSTVPSSTSKDRPVSQPSLVGSKEEPPPARSGSGGGSAKEPQEERSQQQDDIEELETKAVGMSNDGRFLKFDIEIGRGSFKTVYKGLDTETTVEVAWCELQDRKLTKSERQRFKEEAEMLKGLQHPNIVRFYDSWESTVKGKKCIVLVTELMTSGTLKTYLKRFKVMKIKVLRSWCRQILKGLQFLHTRTPPIIHRDLKCDNIFITGPTGSVKIGDLGLATLKRASFAKSVIGTPEFMAPEMYEEKYDESVDVYAFGMCMLEMATSEYPYSECQNAAQIYRRVTSGVKPASFDKVAIPEVKEIIEGCIRQNKDERYSIKDLLNHAFFQEETGVRVELAEEDDGEKIAIKLWLRIEDIKKLKGKYKDNEAIEFSFDLERDVPEDVAQEMVESGYVCEGDHKTMAKAIKDRVSLIKRKREQRQLVREEQEKKKQEESSLKQQVEQSSASQTGIKQLPSASTGIPTASTTSASVSTQVEPEEPEADQHQQLQYQQPSISVLSDGTVDSGQGSSVFTESRVSSQQTVSYGSQHEQAHSTGTVPGHIPSTVQAQSQPHGVYPPSSVPQSMAHPCGGTPTYPESQIFFPTIHERPVSFSPPPTCPPKVAISQRRKSTSFLEAQTHHFQPLLRTVGQSLLPPGGSPTNWTPEAVVMLGTTASRVTGESCEIQVHPMFEPSQVYSDYRPGLVLPEEAHYFIPQEAVYVAGVHYQARVAEQYEGIPYNSSVLSSPMKQIPEQKPVQGGPTSSSVFEFPSGQAFLVGHLQNLRLDSGLGPGSPLSSISAPISTDATRLKFHPVFVPHSAPAVLTHNNESRSNCVFEFHVHTPSSSSGEGGGILPQRVYRNRQVAVDLNQEELPPQSVGLHGYLQPVTEEKHNYHAPELTVSVVEPIGQNWPIGSPEYSSDSSQITSSDPSDFQSPPPTGGAAAPFGSDVSMPFIHLPQTVLQESPLFFCFPQGTTSQQVLTASFSSGGSALHPQAQGQSQGQPSSSSLTGVSSSQPIQHPQQQQGIQQTAPPQQTVQYSLSQTSTSSEATTAQPVSQPQAPQVLPQVSAGKQGFPPRLPPQYPGDSNIAPSSNVASVCIHSTVLSPPMPTEVLATPGYFPTVVQPYVESNLLVPMGGVGGQVQVSQPGGSLAQAPTTSSQQAVLESTQGVSQVAPAEPVAVAQTQATQPTTLASSVDSAHSDVASGMSDGNENVPSSSGRHEGRTTKRHYRKSVRSRSRHEKTSRPKLRILNVSNKGDRVVECQLETHNRKMVTFKFDLDGDNPEEIATIMVNNDFILAIERESFVDQVREIIEKADEMLSEDVSVEPEGDQGLESLQGKDDYGFSGSQKLEGEFKQPIPASSMPQQIGIPTSSLTQVVHSAGRRFIVSPVPESRLRESKVFPSEITDTVAASTAQSPGMNLSHSASSLSLQQAFSELRRAQMTEGPNTAPPNFSHTGPTFPVVPPFLSSIAGVPTTAAATAPVPATSSPPNDISTSVIQSEVTVPTEEGIAGVATSTGVVTSGGLPIPPVSESPVLSSVVSSITIPAVVSISTTSPSLQVPTSTSEIVVSSTALYPSVTVSATSASAGGSTATPGPKPPAVVSQQAAGSTTVGATLTSVSTTTSFPSTASQLCIQLSSSTSTPTLAETVVVSAHSLDKTSHSSTTGLAFSLSAPSSSSSPGAGVSSYISQPGGLHPLVIPSVIASTPILPQAAGPTSTPLLPQVPSIPPLVQPVANVPAVQQTLIHSQPQPALLPNQPHTHCPEVDSDTQPKAPGIDDIKTLEEKLRSLFSEHSSSGAQHASVSLETSLVIESTVTPGIPTTAVAPSKLLTSTTSTCLPPTNLPLGTVALPVTPVVTPGQVSTPVSTTTSGVKPGTAPSKPPLTKAPVLPVGTELPAGTLPSEQLPPFPGPSLTQSQQPLEDLDAQLRRTLSPEMITVTSAVGPVSMAAPTAITEAGTQPQKGVSQVKEGPVLATSSGAGVFKMGRFQVSVAADGAQKEGKNKSEDAKSVHFESSTSESSVLSSSSPESTLVKPEPNGITIPGISSDVPESAHKTTASEAKSDTGQPTKVGRFQVTTTANKVGRFSVSKTEDKITDTKKEGPVASPPFMDLEQAVLPAVIPKKEKPELSEPSHLNGPSSDPEAAFLSRDVDDGSGSPHSPHQLSSKSLPSQNLSQSLSNSFNSSYMSSDNESDIEDEDLKLELRRLRDKHLKEIQDLQSRQKHEIESLYTKLGKVPPAVIIPPAAPLSGRRRRPTKSKGSKSSRSSSLGNKSPQLSGNLSGQSAASVLHPQQTLHPPGNIPESGQNQLLQPLKPSPSSDNLYSAFTSDGAISVPSLSAPGQGTSSTNTVGATVNSQAAQAQPPAMTSSRKGTFTDDLHKLVDNWARDAMNLSGRRGSKGHMNYEGPGMARKFSAPGQLCISMTSNLGGSAPISAASATSLGHFTKSMCPPQQYGFPATPFGAQWSGTGGPAPQPLGQFQPVGTASLQNFNISNLQKSISNPPGSNLRTT

SEQ ID NO: 9297 - protein, 2833 aa, Homo sapiens
MSGGAAEKQSSTPGSLFLSPPAPAPKNGSSSDSSVGEKLGAAAADAVTGRTEEYRRRRHTMDKDSRGAAATTTTTEHRFFRRSVICDSNATALELPGLPLSLPQPSIPAAVPQSAPPEPHREETVTATATSQVAQQPPAAAAPGEQAVAGPAPSTVPSSTSKDRPVSQPSLVGSKEEPPPARSGSGGGSAKEPQEERSQQQDDIEELETKAVGMSNDGRFLKFDIEIGRGSFKTVYKGLDTETTVEVAWCELQDRKLTKSERQRFKEEAEMLKGLQHPNIVRFYDSWESTVKGKKCIVLVTELMTSGTLKTYLKRFKVMKIKVLRSWCRQILKGLQFLHTRTPPIIHRDLKCDNIFITGPTGSVKIGDLGLATLKRASFAKSVIGTPEFMAPEMYEEKYDESVDVYAFGMCMLEMATSEYPYSECQNAAQIYRRVTSGVKPASFDKVAIPEVKEIIEGCIRQNKDERYSIKDLLNHAFFQEETGVRVELAEEDDGEKIAIKLWLRIEDIKKLKGKYKDNEAIEFSFDLERDVPEDVAQEMVESGYVCEGDHKTMAKAIKDRVSLIKRKREQRQLVREEQEKKKQEESSLKQQVEQSSASQTGIKQLPSASTGIPTASTTSASVSTQVEPEEPEADQHQQLQYQQPSISVLSDGTVDSGQGSSVFTESRVSSQQTVSYGSQHEQAHSTGTVPGHIPSTVQAQSQPHGVYPPSSVPQSMAHPCGGTPTYPESQIFFPTIHERPVSFSPPPTCPPKVAISQRRKSTSFLEAQTHHFQPLLRTVGQSLLPPGGSPTNWTPEAVVMLGTTASRVTGESCEIQVHPMFEPSQVYSDYRPGLVLPEEAHYFIPQEAVYVAGVHYQARVAEQYEGIPYNSSVLSSPMKQIPEQKPVQGGPTSSSVFEFPSGQAFLVGHLQNLRLDSGLGPGSPLSSISAPISTDATRLKFHPVFVPHSAPAVLTHNNESRSNCVFEFHVHTPSSSSGEGGGILPQRVYRNRQVAVDLNQEELPPQSVGLHGYLQPVTEEKHNYHAPELTVSVVEPIGQNWPIGSPEYSSDSSQITSSDPSDFQSPPPTGGAAAPFGSDVSMPFIHLPQTVLQESPLFFCFPQGTTSQQVLTASFSSGGSALHPQAQGQSQGQPSSSSLTGVSSSQPIQHPQQQQGIQQTAPPQQTVQYSLSQTSTSSEATTAQPVSQPQAPQVLPQVSAGKQLPVSQPVPTIQGEPQIPVATQPSVVPVHSGAHFLPVGQPLPTPLLPQYPVSQIPISTPHVSTAQTGFSSLPITMAAGITQPLLTLASSATTAAIPGVSTVVPSQLPTLLQPVTQLPSQVHPQLLQPAVQSMGIPANLGQAAEVPLSSGDVLYQGFPPRLPPQYPGDSNIAPSSNVASVCIHSTVLSPPMPTEVLATPGYFPTVVQPYVESNLLVPMGGVGGQVQVSQPGGSLAQAPTTSSQQAVLESTQGVSQVAPAEPVAVAQTQATQPTTLASSVDSAHSDVASGMSDGNENVPSSSGRHEGRTTKRHYRKSVRSRSRHEKTSRPKLRILNVSNKGDRVVECQLETHNRKMVTFKFDLDGDNPEEIATIMVNNDFILAIERESFVDQVREIIEKADEMLSEDVSVEPEGDQGLESLQGKDDYGFSGSQKLEGEFKQPIPASSMPQQIGIPTSSLTQVVHSAGRRFIVSPVPESRLRESKVFPSEITDTVAASTAQSPGMNLSHSASSLSLQQAFSELRRAQMTEGPNTAPPNFSHTGPTFPVVPPFLSSIAGVPTTAAATAPVPATSSPPNDISTSVIQSEVTVPTEEGIAGVATSTGVVTSGGLPIPPVSESPVLSSVVSSITIPAVVSISTTSPSLQVPTSTSEIVVSSTALYPSVTVSATSASAGGSTATPGPKPPAVVSQQAAGSTTVGATLTSVSTTTSFPSTASQLCIQLSSSTSTPTLAETVVVSAHSLDKTSHSSTTGLAFSLSAPSSSSSPGAGVSSYISQPGGLHPLVIPSVIASTPILPQAAGPTSTPLLPQVPSIPPLVQPVANVPAVQQTLIHSQPQPALLPNQPHTHCPEVDSDTQPKAPGIDDIKTLEEKLRSLFSEHSSSGAQHASVSLETSLVIESTVTPGIPTTAVAPSKLLTSTTSTCLPPTNLPLGTVALPVTPVVTPGQVSTPVSTTTSGVKPGTAPSKPPLTKAPVLPVGTELPAGTLPSEQLPPFPGPSLTQSQQPLEDLDAQLRRTLSPEMITVTSAVGPVSMAAPTAITEAGTQPQKGVSQVKEGPVLATSSGAGVFKMGRFQVSVAADGAQKEGKNKSEDAKSVHFESSTSESSVLSSSSPESTLVKPEPNGITIPGISSDVPESAHKTTASEAKSDTGQPTKVGRFQVTTTANKVGRFSVSKTEDKITDTKKEGPVASPPFMDLEQAVLPAVIPKKEKPELSEPSHLNGPSSDPEAAFLSRDVDDGSGSPHSPHQLSSKSLPSQNLSQSLSNSFNSSYMSSDNESDIEDEDLKLELRRLRDKHLKEIQDLQSRQKHEIESLYTKLGKVPPAVIIPPAAPLSGRRRRPTKSKGSKSSRSSSLGNKSPQLSGNLSGQSAASVLHPQQTLHPPGNIPESGQNQLLQPLKPSPSSDNLYSAFTSDGAISVPSLSAPGQGCAKFNCASEQVTFKPGGRRTRFLRKMVKKVCPCNQLCRTSSTNTVGATVNSQAAQAQPPAMTSSRKGTFTDDLHKLVDNWARDAMNLSGRRGSKGHMNYEGPGMARKFSAPGQLCISMTSNLGGSAPISAASATSLGHFTKSMCPPQQYGFPATPFGAQWSGTGGPAPQPLGQFQPVGTASLQNFNISNLQKSISNPPGSNLRTT

SEQ ID NO: 9298 - protein, 570 aa, Homo sapiens
MNVVFAVKQYISKMIEDSGPGMKVLLMDKETTGIVSMVYTQSEILQKEVYLFERIDSQNREIMKHLKAICFLRPTKENVDYIIQELRRPKYTIYFIYFSNVISKSDVKSLAEADEQEVVAEVQEFYGDYIAVNPHLFSLNILGCCQGRNWDPAQLSRTTQGLTALLLSLKKCPMIRYQLSSEAAKRLAECVKQVITKEYELFEFRRTEVPPLLLILDRCDDAITPLLNQWTYQAMVHELLGINNNRIDLSRVPGISKDLREVVLSAENDEFYANNMYLNFAEIGSNIKNLMEDFQKKKPKEQQKLESIADMKAFVENYPQFKKMSGTVSKHVTVVGELSRLVSERNLLEVSEVEQELACQNDHSSALQNIKRLLQNPKVTEFDAARLVMLYALHYERHSSNSLPGLMMDLRNKGVSEKYRKLVSAVVEYGGKRVRGSDLFSPKDAVAITKQFLKGLKGVENVYTQHQPFLHETLDHLIKGRLKENLYPYLGPSTLRDRPQDIIVFVIGGATYEEALTVYNLNRTTPGVRIVLGGTTVHNTKSFLEEVLASGLHSRSKESSQVTSRSASRR

SEQ ID NO: 9299 - protein, 538 aa, Homo sapiens
MVYTQSEILQKEVYLFERIDSQNREIMKHLKAICFLRPTKENVDYIIQELRRPKYTIYFIYFSNVISKSDVKSLAEADEQEVVAEVQQVITKEYELFEFRRTEVPPLLLILDRCDDAITPLLNQWTYQAMVHELLGINNNRIDLSRVPGISKDLREVVLSAENDEFYANNMYLNFAEIGSNIKNLMEDFQKKKPKEQQKLESIADMKAFVENYPQFKKMSGTVSKHVTVVGELSRLVSERNLLEVSEVEQELACQNDHSSALQNIKRLLQNPKVTEFDAARLVMLYALHYERHSSNSLPGLMMDLRNKGVSEKYRKLVSAVVEYGGKRVRGSDLFSPKDAVAITKQFLKGLKGVENVYTQHQPFLHETLDHLIKGRLKENLYPYLGPSTLRDRPQDIIVFVIGGATYEEALTVYNLNRTTPGVRIVLGGTTVHNTKRDGVSLCSPAWFRTPGLKRSTRLSLPKCWDYSFPRGSSGFWTAQPKQGELSSHIKVSEQKMKRWLGEGHSFLSCPHYRFSLLNKGVGEQLWVLCWLLELISR

SEQ ID NO: 9300 - protein, 837 aa, Homo sapiens
MGELFRSEEMTLAQLFLQSEAAYCCVSELGELGKVQFRDLNPDVNVFQRKFVNEVRRCEEMDRKLRFVEKEIRKANIPIMDTGENPEVPFPRDMIDLEANFEKIENELKEINTNQEALKRNFLELTELKFILRKTQQFFDEMADPDLLEESSSLLEPSEMGRGTPLRLGFVAGVINRERIPTFERMLWRVCRGNVFLRQAEIENPLEDPVTGDYVHKSVFIIFFQGDQLKNRVKKICEGFRASLYPCPETPQERKEMASGVNTRIDDLQMVLNQTEDHRQRVLQAAAKNIRVWFIKVRKMKAIYHTLNLCNIDVTQKCLIAEVWCPVTDLDSIQFALRRGTEHSGSTVPSILNRMQTNQTPPTYNKTNKFTYGFQNIVDAYGIGTYREINPAPYTIITFPFLFAVMFGDFGHGILMTLFAVWMVLRESRILSQKNENEMFSTVFSGRYIILLMGVFSMYTGLIYNDCFSKSLNIFGSSWSVRPMFTYNWTEETLRGNPVLQLNPALPGVFGGPYPFGIDPIWNIATNKLTFLNSFKMKMSVILGIIHMLFGVSLSLFNHIYFKKPLNIYFGFIPEIIFMTSLFGYLVILIFYKWTAYDAHTSENAPSLLIHFINMFLFSYPESGYSMLYSGQKGIQCFLVVVALLCVPWMLLFKPLVLRRQYLRRKHLGTLNFGGIRVGNGPTEEDAEIIQHDQLSTHSEDADEPSEDEVFDFGDTMVHQAIHTIEYCLGCISNTASYLRLWALSLAHAQLSEVLWTMVIHIGLSVKSLAGGLVLFFFFTAFATLTVAILLIMEGLSAFLHALRLHWVEFQNKFYSGTGFKFLPFSFEHIREGKFEE

SEQ ID NO: 9301 - protein, 831 aa, Homo sapiens
MGELFRSEEMTLAQLFLQSEAAYCCVSELGELGKVQFRDLNPDVNVFQRKFVNEVRRCEEMDRKLRFVEKEIRKANIPIMDTGENPEVPFPRDMIDLEANFEKIENELKEINTNQEALKRNFLELTELKFILRKTQQFFDEMADPDLLEESSSLLEPSEMGRGTPLRLGFVAGVINRERIPTFERMLWRVCRGNVFLRQAEIENPLEDPVTGDYVHKSVFIIFFQGDQLKNRVKKICEGFRASLYPCPETPQERKEMASGVNTRIDDLQMVLNQTEDHRQRVLQAAAKNIRVWFIKVRKMKAIYHTLNLCNIDVTQKCLIAEVWCPVTDLDSIQFALRRGTEHSGSTVPSILNRMQTNQTPPTYNKTNKFTYGFQNIVDAYGIGTYREINPAPYTIITFPFLFAVMFGDFGHGILMTLFAVWMVLRESRILSQKNENEMFSTVFSGRYIILLMGVFSMYTGLIYNDCFSKSLNIFGSSWSVRPMFTYNWTEETLRGNPVLQLNPALPGVFGGPYPFGIDPIWNIATNKLTFLNSFKMKMSVILGIIHMLFGVSLSLFNHIYFKKPLNIYFGFIPEIIFMTSLFGYLVILIFYKWTAYDAHTSENAPSLLIHFINMFLFSYPESGYSMLYSGQKGIQCFLVVVALLCVPWMLLFKPLVLRRQYLRRKHLGTLNFGGIRVGNGPTEEDAEIIQHDQLSTHSEDADEFDFGDTMVHQAIHTIEYCLGCISNTASYLRLWALSLAHAQLSEVLWTMVIHIGLSVKSLAGGLVLFFFFTAFATLTVAILLIMEGLSAFLHALRLHWVEFQNKFYSGTGFKFLPFSFEHIREGKFEE

SEQ ID NO: 9302 - protein, 838 aa, Homo sapiens
MGELFRSEEMTLAQLFLQSEAAYCCVSELGELGKVQFRDLNPDVNVFQRKFVNEVRRCEEMDRKLRFVEKEIRKANIPIMDTGENPEVPFPRDMIDLEANFEKIENELKEINTNQEALKRNFLELTELKFILRKTQQFFDEAELHHQQMADPDLLEESSSLLEPSEMGRGTPLRLGFVAGVINRERIPTFERMLWRVCRGNVFLRQAEIENPLEDPVTGDYVHKSVFIIFFQGDQLKNRVKKICEGFRASLYPCPETPQERKEMASGVNTRIDDLQMVLNQTEDHRQRVLQAAAKNIRVWFIKVRKMKAIYHTLNLCNIDVTQKCLIAEVWCPVTDLDSIQFALRRGTEHSGSTVPSILNRMQTNQTPPTYNKTNKFTYGFQNIVDAYGIGTYREINPAPYTIITFPFLFAVMFGDFGHGILMTLFAVWMVLRESRILSQKNENEMFSTVFSGRYIILLMGVFSMYTGLIYNDCFSKSLNIFGSSWSVRPMFTYNWTEETLRGNPVLQLNPALPGVFGGPYPFGIDPIWNIATNKLTFLNSFKMKMSVILGIIHMLFGVSLSLFNHIYFKKPLNIYFGFIPEIIFMTSLFGYLVILIFYKWTAYDAHTSENAPSLLIHFINMFLFSYPESGYSMLYSGQKGIQCFLVVVALLCVPWMLLFKPLVLRRQYLRRKHLGTLNFGGIRVGNGPTEEDAEIIQHDQLSTHSEDADEFDFGDTMVHQAIHTIEYCLGCISNTASYLRLWALSLAHAQLSEVLWTMVIHIGLSVKSLAGGLVLFFFFTAFATLTVAILLIMEGLSAFLHALRLHWVEFQNKFYSGTGFKFLPFSFEHIREGKFEE

SEQ ID NO: 9303 - protein, 697 aa, Homo sapiens
MAWREKSKKRLNMTSFNIAQGIHAFDYHSRLNLIATAGINNKVCLWNPYVVSKPVGVLWGHSASVIAVQFFVERKQLFSFSKDKVLRLWDIQHQLSIQRIACSFPKSQDFRCLFHFDEAHGRLFISFNNQLALLAMKSEASKRVKSHEKAVTCVLYNSILKQVISSDTGSTVSFWMIDTGQKIKQFTGCHGNAEISTMALDANETRLLTGSTDGTVKIWDFNGYCHHTLNVGQDGAVDISQILILKKKILVTGWERAITVFRPQNFNQFFIQPEEWKGGIQHHDDILCAAFLPPQTLVTGSYDGEIVLWNNSTENAHHVLHPDYQRLLKSKLDTKPQKLLSAGRSQPSHPMADHSTTGVRNFEIDTEGKNAVMRLCFLKARKNTAVTGGANLVSCGGSGYVRFWDIYKKQLLAEFLAHSGVGSIIMSTDKMNRYLTTGDLDGWLKIWNIEEYCLNSSKNKITKAPTLIRSFQPHEDRISSLEMCEPGGQLLIISSSADCSICVTGVCNAPVWIFGQAKHWHIENCLFLPKRDTNLVESEIQKEISLFSKEESCLDPTEHSLLNKKNKDDSTYNVRPSEDINLDIKYKERSTCMKETQKPYYGEVIKKSFSTFRSLNIGALEELPEVNKPAFLLDPEKYFRKEPEEERPQILEAPSLFKTLKAVFDEKNLFPKEILHHERKAKQLCQEKSCEVKKNKK

SEQ ID NO: 9304 - protein, 522 aa, Homo sapiens
MIDTGQKIKQFTGCHGNAEISTMALDANETRLLTGSTDGTVKIWDFNGYCHHTLNVGQDGAVDISQILILKKKILVTGWERAITVFRPQNFNQFFIQPEEWKGGIQHHDDILCAAFLPPQTLVTGSYDGEIVLWNNSTENAHHVLHPDYQRLLKSKLDTKPQKLLSAGRSQPSHPMADHSTTGVRNFEIDTEGKNAVMRLCFLKARKNTAVTGGANLVSCGGSGYVRFWDIYKKQLLAEFLAHSGVGSIIMSTDKMNRYLTTGDLDGWLKIWNIEEYCLNSSKNKITKAPTLIRSFQPHEDRISSLEMCEPGGQLLIISSSADCSICVTGVCNAPVWIFGQAKHWHIENCLFLPKRDTNLVESEIQKEISLFSKEESCLDPTEHSLLNKKNKDDSTYNVRPSEDINLDIKYKERSTCMKETQKPYYGEVIKKSFSTFRSLNIGALEELPEVNKPAFLLDPEKYFRKEPEEERPQILEAPSLFKTLKAVFDEKNLFPKEILHHERKAKQLCQEKSCEVKKNKK

SEQ ID NO: 9305 - protein, 194 aa, Homo sapiens
MDEDGLPLMGSGIDLTKVPAIQQKRTVAFLNQFVVHTVQFLNRFSTVCEEKLADLSLRIQQIETTLNILDAKLSSIPGLDDVTVEVSPLNVTSVTNGAHPEATSEQPQQNSTQDSGLQESEVSAENILTVAKDPRYARYLKMVQVGVPVMAIRNKMISEGLDPDLLERPDAPVPDGESEKTVEESSDSESSFSD

SEQ ID NO: 9306 - protein, 865 aa, Homo sapiens [sequence omitted]

SEQ ID NO: 9307 - protein, 638 aa, Homo sapiens
MVASARVQKLVRRYKLAIATALAILLLQGLVVWSFSGLEEDEAGEKGRQRKPRPLDPGEGSKDTDSSAGRRGSTGRRHGRWRGRAESPGVPVAKVVRAVTSRQRASRRVPPAPPPEAPGRQNLSGAAAGEALVGAAGFPPHGDTGSVEGAPQPTDNGFTPKCEIVGKDALSALARASTKQCQQEIANVVCLHQAGSLMPKAVPRHCQLTGKMSPGIQWDESQAQQPMDGPPVRIAYMLVVHGRAIRQLKRLLKAVYHEQHFFYIHVDKRSDYLHREVVELAQGYDNVRVTPWRMVTIWGGASLLRMYLRSMRDLLEVPGWAWDFFINLSATDYPTRTNEELVAFLSKNRDKNFLKSHGRDNSRFIKKQGLDRLFHECDSHMWRLGERQIPAGIVVDGGSDWFVLTRSFVEYVVYTDDPLVAQLRQFYTYTLLPAESFFHTVLENSLACETLVDNNLRVTNWNRKLGCKCQYKHIVDWCGCSPNDFKPQDFLRLQQVSRPTFFARKFESTVNQEVLEILDFHLYGSYPPGTPALKAYWENTYDAADGPSGLSDVMLTAYTAFARLSLHHAATAAPPMGTPLCRLALIGTPKSVFSGTLGGYWGRWTSLWPCSAGPGAPTSQPQWSGSTQPMWWPHLMTS

SEQ ID NO: 9308 - protein, 959 aa, Homo sapiens
MVAAPCARRLARRSHSALLAALTVLLLQTLVVWNFSSLDSGAGERRGGAAVGGGEQPPPAPAPRRERRDLPAEPAAARGGGGGGGGGGGGRGPQARARGGGPGEPRGQQPASRGALPARALDPHPSPLITLETQDGYFSHRPKEKVRTDSNNENSVPKDFENVDNSNFAPRTQKQKHQPELAKKPPSRQKELLKRKLEQQEKGKGHTFPGKGPGEVLPPGDRAAANSSHGKDVSRPPHARKTGGSSPETKYDQPPKCDISGKEAISALSRAKSKHCRQEIGETYCRHKLGLLMPEKVTRFCPLEGKANKNVQWDEDSVEYMPANPVRIAFVLVVHGRASRQLQRMFKAIYHKDHFYYIHVDKRSNYLHRQVLQVSRQYSNVRVTPWRMATIWGGASLLSTYLQSMRDLLEMTDWPWDFFINLSAADYPIRTNDQLVAFLSRYRDMNFLKSHGRDNARFIRKQGLDRLFLECDAHMWRLGDRRIPEGIAVDGGSDWFLLNRRFVEYVTFSTDDLVTKMKQFYSYTLLPAESFFHTVLENSPHCDTMVDNNLRITNWNRKLGCKCQYKHIVDWCGCSPNDFKPQDFHRFQQTARPTFFARKFEAVVNQEIIGQLDYYLYGNYPAGTPGLRSYWENVYDEPDGIHSLSDVTLTLYHSFARLGLRRAETSLHTDGENSCRYYPMGHPASVHLYFLADRFQGFLIKHHATNLAVSKLETLETWVMPKKVFKIASPPSDFGRLQFSEVGTDWDAKERLFRNFGGLLGPMDEPVGMQKWGKGPNVTVTVIWVDPVNVIAATYDILIESTAEFTHYKPPLNLPLRPGVWTVKILHHWVPVAETKFLVAPLTFSNRQPIKPEEALKLHNGPLRNAYMEQSFQSLNPVLSLPINPAQVEQARRNAASTGTALEGWLDSLVGGMWTAMDICATGPTACPVMQTCSQTAWSSFSPDPKSELGAVKPDGRLR

SEQ ID NO: 9309 - protein, 257 aa, Homo sapiens
MSGFENLNTDFYQTSYSIDDQSQQSYDYGGSGGPYSKQYAGYDYSQQGRFVPPDMMQPQQPYTGQIYQPTQAYTPASPQPFYGNNFEDEPPLLEELGINFDHIWQKTLTVLHPLKVADGSIMNETDLAGPMVFCLAFGATLLLAGKIQFGYVYGISAIGCLGMFCLLNLMSMTGVSFGCVASVLGYCLLPMILLSSFAVIFSLQGMVGIILTAGIIGWCSFSASKIFISALAMEGQQLLVAYPCALLYGVFALISVF

SEQ ID NO: 9310 - protein, 203 aa, Homo sapiens
MMQPQQPYTGQIYQPTQAYTPASPQPFYGNNFEDEPPLLEELGINFDHIWQKTLTVLHPLKVADGSIMNETDLAGPMVFCLAFGATLLLAGKIQFGYVYGISAIGCLGMFCLLNLMSMTGVSFGCVASVLGYCLLPMILLSSFAVIFSLQGMVGIILTAGIIGWCSFSASKIFISALAMEGQQLLVAYPCALLYGVFALISVF

SEQ ID NO: 9311 - protein, 265 aa, Homo sapiens
MSGFENLNTDFYQTSYSIDDQSQQSYDYGGSGGPYSKQYAGYDYSQQGRFVPPDMMQPQQPYTGQIYQPTQAYTPASPQPFYGNNFEDEPPLLEELGINFDHIWQKTLTVLHPLKVADGSIMNETDLAGPMVFCLAFGATLLLAGKIQFGYVYGISAIGCLGMFCLLNLMSMTGVSFGCVASVLGYCLLPMILLSSFAVIFSLQGMVGIILTAGIIGWCSFSASKIFISALAMEGQQLLVALQPNITYGSNYFLFCCLPYPQQHF

SEQ ID NO: 9312 - protein, 163 aa, Homo sapiens
MGVPRAREGRGAGSQSPPRGRCLHPFRWGSQDRGRGEGLALSPLLPGVPPPPAMGVPRDRGGRGAGSQSTPRGGCLLPPRLGSQQPAGEEGLVLSPRLAGDASPCCDGSPKSQGVKRGWLSVPTSRGVPPPPAIGVLIARGGRGAGSQSLPRGWSFTPLRWGS

SEQ ID NO: 9313 - protein, 215 aa, Homo sapiens
MASGRWASPGPAWASRRPLQAQVVLKSASPGPAPASQQASSFGSAPAQLPPAFVDPELSPAMLLSPTCLPVACTGPGLAGEQPLQAPLLPPRGISRPSSGLTAASRDQVPACLPAACVRPSSSVTVACSGPTHASGTLSRGVSPCLTLASLTLREFSVGPCLTLASLTLREVSMSPCLTLVSLTLRAILPHAGLLRPSSCLCWPFQAQPLPVGGL

SEQ ID NO: 9314 - protein, 765 aa, Homo sapiens
MPRSPGTRLKPAKYIPVATAAALLVGSSTLFFVFTCPWLTRAVSPAVPVYNGIIFLFVLANFSMATFMDPGVFPRADEDEDKEDDFRAPLYKNVDVRGIQVRMKWCATCHFYRPPRCSHCSVCDNCVEDFDHHCPWVNNCIGRRNYRYFFLFLLSLSAHMVGVVAFGLVYVLNHAEGLGAAHTTITMAVMCVAGLFFIPVIGLTGFHVVLVTRGRTTNEQVTGKFRGGVNPFTRGCCGNVEHVLCSPLAPRYVVEPPRLPLAVSLKPPFLRPELLDRAAPLKVKLSDNGLKAGLGRSKSKGSLDRLDEKPLDLGPPLPPKIEAGTFSSDLQTPRPGSAESALSVQRTSPPTPAMYKFRPAFPTGPKVPFCGPGEQVPGPDSLTLGDDSIRSLDFVSEPSLDLPDYGPGGLHAAYPPSPPLSASDAFSGALRSLSLKASSRRGGDHVALQPLRSEGGPPTPHRSIFAPHALPNRNGSLSYDSLLNPGSPGGHACPAHPAVGVAGYHSPYLHPGATGDPPRPLPRSFSPVLGPRPREPSPVRYDNLSRTIMASIQERKDREERERLLRSQADSLFGDSGVYDAPSSYSLQQASVLSEGPRGPALRYGSRDDLVAGPGFGGARNPALQTSLSSLSSSVSRAPRTSSSSLQADQASSNAPGPRPSSGSHRSPARQGLPSPPGTPHSPSYAGPKAVAFIHTDLPEPPPSLTVQRDHPQLKTPPSKLNGQSPGLARLGPATGPPGPSASPTRHTLVKKVSGVGGTTYEISV

SEQ ID NO: 9315 - protein, 673 aa, Homo sapiens
MPRSPGTRLKPAKYIPVATAAALLVGSSTLFFVFTCPWLTRAVSPAVPVYNGIIFLFVLANFSMATFMDPGVFPRADEDEDKEDDFRAPLYKNVDVRGIQVRMKWCATCHFYRPPRCSHCSVCDNCVEVTGKFRGGVNPFTRGCCGNVEHVLCSPLAPRYVVEPPRLPLAVSLKPPFLRPELLDRAAPLKVKLSDNGLKAGLGRSKSKGSLDRLDEKPLDLGPPLPPKIEAGTFSSDLQTPRPGSAESALSVQRTSPPTPAMYKFRPAFPTGPKVPFCGPGEQVPGPDSLTLGDDSIRSLDFVSEPSLDLPDYGPGGLHAAYPPSPPLSASDAFSGALRSLSLKASSRRGGDHVALQPLRSEGGPPTPHRSIFAPHALPNRNGSLSYDSLLNPGSPGGHACPAHPAVGVAGYHSPYLHPGATGDPPRPLPRSFSPVLGPRPREPSPVRYDNLSRTIMASIQERKDREERERLLRSQADSLFGDSGVYDAPSSYSLQQASVLSEGPRGPALRYGSRDDLVAGPGFGGARNPALQTSLSSLSSSVSRAPRTSSSSLQADQASSNAPGPRPSSGSHRSPARQGLPSPPGTPHSPSYAGPKAVAFIHTDLPEPPPSLTVQRDHPQLKTPPSKLNGQSPGLARLGPATGPPGPSASPTRHTLVKKVSGVGGTTYEISV

SEQ ID NO: 9316 - protein, 778 aa, Homo sapiens
MPRSPGTRLKPAKYIPVATAAALLVGSSTLFFVFTCPWLTRAVSPAVPVYNGIIFLFVLANFSMATFMDPGVFPRADEDEDKEDDFRAPLYKNVDVRGIQVRMKWCATCHFYRPPRCSHCSVCDNCVEDFDHHCPWVNNCIGRRNYRYFFLFLLSLSAHMVGVVAFGLVYVLNHAEGLGAAHTTITMAVMCVAGLFFIPVIGLTGFHVVLVTRGRTTNEQVTGKFRGGVNPFTRGCCGNVEHVLCSPLAPRYVVEPPRLPLAVSLKPPFLRPELLDRAAPLKVKLSDNGLKAGLGRSKSKGSLDRLDEKPLDLGPPLPPKIEAGTFSSDLQTPRPGSAESALSVQRTSPPTPAMYKFRPAFPTGPKVPFCGPGEQVPGPDSLTLGDDSIRSLDFVSEPSLDLPDYGPGGLHAAYPPSPPLSASDAFSGALRSLSLKASSRRGGDHVALQPLRSEGGPPTPHRSIFAPHALPNRNGSLSYDSLLNPGSPGGHACPAHPAVGVAGYHSPYLHPGATGDPPRPLPRSFSPVLGPRPREPSPVRYDNLSRTIMASIQERKDREERERLLRSQADSLFGDSGVYDAPSSYSLQQASVLSEGPRGPALRYGSRDDLVAGPGFGGARNPALQTSLSSLSSSVSRAPRTSSSSLQADQASSNAPGPRPSSGSHRSPARQGLPSPPGTPHSPSYAGPKAVAFIHTDLPEPPPSLTVQRGRIGTCTRGWGRRGQPWVPPGLHLCHLGRPEDRPPLRAPWSQAAGAPPRGAMCRLHLAASSLFPSLSGP

SEQ ID NO: 9317 - protein, 627 aa, Homo sapiens
MAAAVLTDRAQVSVTFDDVAVTFTKEEWGQLDLAQRTLYQEVMLENCGLLVSLGCPVPKAELICHLEHGQEPWTRKEDLSQDTCPGDKGKPKTTEPTTCEPALSEGISLQGQVTQGNSVDSQLGQAEDQDGLSEMQEGHFRPGIDPQEKSPGKMSPECDGLGTADGVCSRIGQEQVSPGDRVRSHNSCESGKDPMIQEEENNFKCSECGKVFNKKHLLAGHEKIHSGVKPYECTECGKTFIKSTHLLQHHMIHTGERPYECMECGKAFNRKSYLTQHQRIHSGEKPYKCNECGKAFTHRSNFVLHNRRHTGEKSFVCTECGQVFRHRPGFLRHYVVHSGENPYECLECGKVFKHRSYLMWHQQTHTGEKPYECSECGKVFLESAALIHHYVIHTGEKPFECLECGKAFNHRSYLKRHQRIHTGEKPFVCSECGKAFTHCSTFILHKRAHTGEKPFECKECGKAFSNRKDLIRHFSIHTGEKPYECVECGKAFTRMSGLTRHKRIHSGEKPYECVECGKSFCWSTNLIRHAIIHTGEKPYKCSECGKAFSRSSSLTQHQRMHTGKNPISVTDVGRPFTSGQTSVTLRELLLGKDFLNVTTEANILPEETSSSASDQPYQRETPQVSSL

SEQ ID NO: 9318 - protein, 124 aa, Homo sapiens
MYVSISFLLGLSHLVLCCLLTFIVNFYLPPESIDFEFMAHNWSKGRSPSSTLGLSWFKAGFRFSDGWSMFYSSGLPGVALPGSPPRSHLLPGTQILIRSFQPCESAKHSARLSSLLTTTSYSVS

SEQ ID NO: 9319 - protein, 355 aa, Homo sapiens
MQRNAMYLKNVAETACNFQLTQYQISHANQKPYECQICGKPFRKRAHLTQHNRIHTGGKPYECKECGKVFICCSTLIQHKRTHTSEKPYECLECRKTFRRSAHLIRHQRIHTGEKPYKCKQCWKAFASVSDLIDIGKFTLMRDFTNVQNVGRHLTIAQLLFSIREFTLVRSPLNVRNVAKHSIIAQHLLNTRELILMRNLMNVRNVKRLLGKVHILLNIKEFILVRNHMSVSNVGRLSLVFLILIDIREFTLVKNPMNVKNVVELLTIVQLLFNTREFTLVRRLMNISSVGRFLSPVQHLFNIREHILMKNLMNVSNARRPSSIMHILFDIKEFILVRNLINVSNVGRPLLLFLI

SEQ ID NO: 9320 - protein, 327 aa, Homo sapiens
MQRNAMYLKNVAETACNFQLTQYQISHANQKPYECQICGKPFRKRAHLTQHNRIHTGGKPYECKECGKVFICCSTLIQHKRTHTSEKPYECLECRKTFRRSAHLIRHQRIHTGEKPYKCKQCWKAFASVSDLIDIGKFTLMRDFTNVQNVGRHLTIAQLLFSIREFTLVRSPLNVRNVAKHSIIAQHLLNTRELILMRNLMNVRNVKRLLGKVHILLNIKEFILVRNHMSVSNVGRLSLVFLILIDIREFTLVKNPMNVKNVVELLTIVQLLFNTREFTLVRRLMNISSVGRFLSPVQHLFNIREHILMKNLMNVSNARRPSSIMHI

SEQ ID NO: 9321 - protein, 584 aa, Homo sapiens
MALSQGLFTFKDVAIEFSQEEWECLDPAQRALYRDVMLENYRNLLSLDEDNIPPEDDISVGFTSKGLSPKENNKEELYHLVILERKESHGINNFDLKEVWENMPKFDSLWDYDVKNYKGMPLTCNKNLTHRKDQQHNKSSIHFSLKQSVSIRDSAHQYFIHDKPFIRNLLKLKNNIRYAGNKYVKCFENKIGLSLQAQLAELQRFQTGEKMYECNPVEKSINSSSVSPLPPCVKNICNKYRKILKYPLLHTQYGRTHIREKSYKCNDCGKAFSKSSNLTNHQRIHSGQRPYKCNECGKAFNQCSNLTRHQRVHTGEKPYQCNICGKVCSQNSNLASHQRMHTGEKPYKCNECGKAFIQRSHLWGHERIHTGEKPYKCNECDKAFAERSSLTQHKRIHTGEKPYICNECGKAFKQCSHLTRHQNIHPGEKPHKCNVCGRAFIQSSSLVEHQRIHTGEKPYKCNKCDKAFIKRSHLWGHQRTHTGEKPYKCTECGKAFTERSNLTQHKKIHTGEKPYKCTECGKAFTQFANLTRHQKIHIEKKHCKHNIHGNALFQSSNLGDHQKSYNREKHIKYNETKIKYSSCT

SEQ ID NO: 9322 - protein, 616 aa, Homo sapiens
MGLLTFRDVAIEFSLEEWQCLDTAQKNLYRNVMLENYRNLAFLGIAVSKPDLIICLEKEKEPWNMKRDEMVDEPPGICPHFAQDIWPEQGVEDSFQKVILRRFEKCGHENLQLRKGCKSVDECKVHKEGYNGLNQCFTTTQGKASQCGKYLKVFYKFINLNRYKIRHTRKKPFKCKNCVKSFCMFSHKTQHKSIYTTEKSYKCKECGKTFNWSSTLTNHKKTHTEEKPYKCEEYGKAFNQSSNYTTHKVTHTGEKPYKCEECGKAFSQSSTLTIHKRIHTGEKPCKCEECGKAFSQPSALTIHKRMHIGEKPYKCEECGKAFVWSSTLTRHKRLHSGEKPYKCEECAKAFSQFGHLTTHRIIHTGEKPYKCEECGKAFIWPSTLTKHKRIHTGEKPYKCEECGKAFHRSSNLTKHKIIHTGEKPYKCEECGKAFIWSSNLTEHKKIHTREKPYKCEECSKAFSRSSALTTHKRMHTGEKPYKCEECGKAFSQSSTLTAHKIIHTGEKPYKCEECGKAFILSSTLSKHKRIHTGEKPYKCEECGKTFNQSSNLSTHKIIHTGEKPYKCEECGKAFNRSSNLSTHKIIHTGEKPYKCDECGKSFIWSSTLFKHKRIHT

SEQ ID NO: 9323 - protein, 77 aa, Homo sapiens
MGLLTFRDVAIEFSLEEWQCLDTAQKNLYRNVMLENYRNLAFLGIAVSKPDLIICLEKEKEPWNMKRDEMVDEPPGI

SEQ ID NO: 9324 - protein, 1059 aa, Homo sapiens
MNMSQASVSFQDVTVEFTREEWQHLGPVERTLYRDVMLENYSHLISVGYCITKPKVISKLEKGEEPWSLEDEFLNQRYPGYFKVDHIKGIREKQEKPLWQEIFISDADKTLSKEGQKVLEKPFNLEIAPELSEKISCKCDSHRMNLPVASQLIISERKYSRKKTEYMNVCEKLQLDIKHEKAHAEEKSYEHGENAKAFSYKKDQHWKFQTLEESFECDGSGQGLYDKTICITPQSFLTGEKSCKDDEFRKNFDKITLFNHMRTDTRGKCSDLNEYGTSCDKTTAVEYNKVHMAMTHYECNERGINFSRKSPLTQSQRTITGWSAFESNKCEENFSQSSAHIVHQKTQAGDKFGEHNECTDALYQKLDFTAHQRIHTEDKFYLSDEHGKCRKSFYRKAHLIQHQRPHSGEKTYQYEECAKSFCSSSHPIQHPGTYVGFKLYECNECGKAFCQNSNLSKHLRIHTKEKPCDNNGCGRSYKSPLIGHQKTDAEMELCGGSEYGKTSHLKGHQRILMGEKPYECIECGKTFSKTSHLRAHQRIHTGEKPYECVECEKTFSHKTHLSVHQRVHTGEKPYECNDCGKSFTYNSALRAHQRIHTGEKPYECSDCEKTFAHNSALRAHHRIHTGEKPYECNECGRSFAHISVLKAHQRIHTGEKPYECNECGRSFTYNSALRAHQRIHTGRKPYECSDCEKTFAHNSALKIHQRIHTGEKPYECNECEKTFAHNSALRAHQNIHTGEKLYECSECGKTFFQKTRLSTHRRIHTGEKPYECSKCGKTFSQKSYLSGHERIHTGEKPYECNVCGKTFVYKAALIVHQRIHTGEKPYECNQCGKTFSQRTHLCAHQRIHTGEKPYECNECGKTFADNSALRAHHRIHTGEKPYECNDCGKTFSKTSHLRAHLRTRSGEKPYECSECGKTFSEKSYVSAHQRVHTGEKPYECNVCGKPFAHNSTLRVHQRIHTGEKSYECNDCGKTFSQKSHLSAHQRIHTGEKPYECNECGKAFAQNSTLRVHQRIHTGEKPYECDECGKTFVRKAALRVHHTRMHTREKTLACNGFGKS

SEQ ID NO: 9325 - protein, 617 aa, Homo sapiens
MNMSQASVSFQDVTVEFTREEWQHLGPVERTLYRDVMLENYSHLISVGYCITKPKVISKLEKGEEPWSLEDEFLNQRYPGYFKVDHIKGIREKQEKPLWQEIFISDADKTLSKEGQKVLEKPFNLEIAPELSEKISCKCDSHRMNLPVASQLIISERKYSRKKTEYMNVCEKLQLDIKHEKAHAEEKSYEHGENAKAFSYKKDQHWKFQTLEESFECDGSGQGLYDKTICITPQSFLTGEKSCKDDEFRKNFDKITLFNHMRTDTRGKCSDLNEYGTSCDKTTAVEYNKVHMAMTHYECNERGINFSRKSPLTQSQRTITGWSAFESNKCEENFSQSSAHIVHQKTQAGDKFGEHNECTDALYQKLDFTAHQRIHTEDKFYLSDEHGKCRKSFYRKAHLIQHQRPHSGEKTYQYEECAKSFCSSSHPIQHPGTYVGFKLYECNECGKAFCQNSNLSKHLRIHTKEKPCDNNGCGRSYKSPLIGHQKTDAEMELCGGSEYGKTSHLKGHQRILMGEKPYECIECGKTFSKTSHLRAHQRIHTGEKPYECVECEKTFSHKTHLSVHQRVHTGEKPYECNDCGKSFTYNSALRAHQRIHTGLAVCHVGILMATKSLFHQS

SEQ ID NO: 9326 - protein, 421 aa, Homo sapiens
MAGEAEAQLDPSLQGLVMFEDVTVYFSREEWGLLNVTQKGLYRDVMLENFALVSSLGLAPSRSPVFTQLEDDEQSWVPSWVDVTPVSRAEARRGFGLDGLCRVEDERAHPEHLKSYRVIQHQDTHSEGKPRRHTEHGAAFPPGSSCGQQQEVHVAEKLFKCSDCGKVFLKAFALLDHLITHSEERPFRCPTGRSAFKKSAHINPRKIHTGETAHVCNECGKAFSYPSKLRKHQKVHTGIKPFKCSDCGKTFNRKDALVLHQRIHTGERPYECSKCGKTFSVLSTLIRHRKVHIGERPYECTECGKFFKYNNSFILHQRVHTGERPFECKQCGKGYVTRSGLYQHWKVHTGERPYECSLCGKTFTTRSYRNRHQQFHTEERSYECTECGKAFKHSSTLLQHKKVHTPERRQEDRAHGKVVSC

SEQ ID NO: 9327 - protein, 320 aa, Homo sapiens
MEMRNTTPDFILLGLFNHTRAHQVLFMMVLSIVLTSLFGNSLMILLIHWDHRLHTPMYFLLSQLSLMDMMLVSTTVPKMAADYLTGSKAISRAGCGVQIFFLPTLGGGECFLLAAMAYDRYAAVCHPLRYPTLMSWQLCLRMTMSCWLLGAADGLLQAVVTLSFPYCGAHEIDHFFCETPVLVRLACADTSVFENAMYICCVLMLLVPFSLILSSYGLILAAVLHMRSTEARKKAFATCSSHVAVVGLFYGAAIFTYMRPKSHRSTNHDKVVSAFYTMFTPLLNPLIYSVKNSEVKGALKRWLGTCVNIKHQQNEAHRSR

SEQ ID NO: 9328 - protein, 313 aa, Homo sapiens
METANYTKVTEFVLTGLSQTREVQLVLFVIFLSFYLFILPGNILIICTIRLDPHLTSPMYFLLANLALLDIWYSSITAPKMLIDFFVERKIISFGGCIAQLFFLHFVGASEMFLLTVMAYDRYAAICRPLHYATIMNRRLCCILVALSWMGGFIHSIIQVALIVRLPFCGPNELDSYFCDITQVVRIACANTFPEELVMICSSGLISVVCFIALLMSYAFLLALLKKHSGSGENTNRAMSTCYSHITIVVLMFGPSIYIYARPFDSFSLDKVVSVFHTVIFPLLNPIIYTLRNKEVKAAMRKVVTKYILCEEK

SEQ ID NO: 9329 - protein, 328 aa, Homo sapiens
MKLWMESHLIVPETRPSPRMMSNQTLVTEFILQGFSEHPEYRVFLFSCFLFLYSGALTGNVLITLAITFNPGLHAPMYFFLLNLATMDIICTSSIMPKALASLVSEESSISYGGCMAQLYFLTWAASSELLLLTVMAYDRYAAICHPLHYSSMMSKVFCSGLATAVWLLCAVNTAIHTGLMLRLDFCGPNVIIHFFCEVPPLLLLSCSSTYVNGVMIVLADAFYGIVNFLMTIASYGFIVSSILKVKTAWGRQKAFSTCSSHLTVVCMYYTAVFYAYISPVSGYSAGKSKLAGLLYTVLSPTLNPLIYTLRNKEVKAALRKLFPFFRN

SEQ ID NO: 9330 - protein, 315 aa, Homo sapiens
MFSPNHTIVTEFILLGLTDDPVLEKILFGVFLAIYLITLAGNLCMILLIRTNSHLQTPMYFFLGHLSFVDICYSSNVTPNMLHNFLSEQKTISYAGCFTQCLLFIALVITEFYILASMALDRYVAICSPLHYSSRMSKNICVCLVTIPYMYGFLSGFSQSLLTFHLSFCGSLEINHFYCADPPLIMLACSDTRVKKMAMFVVAGFNLSSSLFIILLSYLFIFAAIFRIRSAEGRHKAFSTCASHLTIVTLFYGTLFCMYVRPPSEKSVEESKITAVFYTFLSPMLNPLIYSLRNTDVILAMQQMIRGKSFHKIAV

SEQ ID NO: 9331 - protein, 399 aa, Homo sapiens
MARRFQEELAAFLFEYDTPRMVLVRNKKVGVIFRLIQLVVLVYVIGWVFLYEKGYQTSSGLISSVSVKLKGLAVTQLPGLGPQVWDVADYVFPAQGDNSFVVMTNFIVTPKQTQGYCAEHPEGGICKEDSGCTPGKAKRKAQGIRTGKCVAFNDTVKTCEIFGWCPVEVDDDIPRPALLREAENFTLFIKNSISFPRFKVNRRNLVEEVNAAHMKTCLFHKTLHPLCPVFQLGYVVQESGQNFSTLAEKGGVVGITIDWHCDLDWHVRHCRPIYEFHGLYEEKNLSPGFNFRFARHFVENGTNYRHLFKVFGIRFDILVDGKAGKFDIIPTMTTIGSGIGIFGVATVLCDLLLLHILPKRHYYKQKKFKYAEDMGPGAAERDLAATSSTLGLQENMRTS

SEQ ID NO: 9332 - protein, 320 aa, Homo sapiens
MGKDNASYLQAFILVGSSDRPGLEKILFAVILIFCILTLVGNTAIILLLVMDVRLHTPMYFFLGNLSFLDLCFTASIAPQLLWNLGGPEKTITYHGCVAQLYIYMMLGSTECVLLVVMSHDRYVAVCRSLHYMAVMRPHLCLQLVTVAWCCGFLNSFIMCPQTMQLSRCGRRRVDHFLCEMPALIAMSCEETMLVEAIHLCPGGGSPPGAALPHPHLLWRDCSRGAEDEVSSRAKESLPHLLFSPHSGLSLLRNHHLRVPEAGQQLLPRSGEVPDSLLHHRHSQHQPPHLHFEEQGCEGDHEETSGVGERGWGASTRGTL

SEQ ID NO: 9333 - protein, 202 aa, Homo sapiens
MATLIYVDKENGEPGTRVVAKDGLKLGSGPSIKALDGRSQVSTPRFGKTFDAPPALPKATRKALGTVNRATEKSVKTKGPLKQKQPSFSAKKMTEKTVKAKSSVPASDDAYPEIEKFFPFNPLDFESFDLPEEHQIAHLPLSGVPLMILDEERELEKLFQLGPPSPVKMPSPPWESNLLQSPSSILSTLDVELPPVCCDIDI

SEQ ID NO: 9334 - protein, 449 aa, Homo sapiens
MLPAATASLLGPLLTACALLPFAQGQTPNYTRPVFLCGGDVKGESGYVASEGFPNLYPPNKECIWTITVPEGQTVSLSFRVFDLELHPACRYDALEVFAGSGTSGQRLGRFCGTFRPAPLVAPGNQVTLRMTTDEGTGGRGFLLWYSGRATSGTEHQFCGGRLEKAQGTLTTPNWPESDYPPGISCSWHIIAPPDQVIALTFEKFDLEPDTYCRYDSVSVFNGAVSDDSRRLGKFCGDAVPGSISSEGNELLVQFVSDLSVTADGFSASYKTLPRGTAKEGQGPGPKRGTEPKVKLPPKSQPPEKTEESPSAPDAPTCPKQCRRTGTLQSNFCASSLVVTATVKSMVREPGEGLAVTVSLIGAYKTGGLDLPSPPTGASLKFYVPCKQCPPMKKGVSYLLMGQVEENRGPVLPPESFVVLHRPNQDQILTNLSKRKCPSQPVRAAASQD

SEQ ID NO: 9335 - protein, 312 aa, Homo sapiens
MNGMNHSVVSEFVFMGLTNSREIQLLLFVFSLLFYFASMMGNLVIVFTVTMDAHLHSPMYFLLANLSIIDMAFCSITAPKMICDIFKKHKAISFRGCITQIFFSHALGGTEMVLLIAMAFDRYMAICKPLHYLTIMSPRMCLYFLATSSIIGLIHSLVQLVFVVDLPFCGPNIFDSFYCDLPRLLRLACTNTQELEFMVTVNSGLISVGSFVLLVISYIFILFTVWKHSSGGLAKALSTLSAHVTVVILFFGPLMFFYTWPSPTSHLDKYLAIFDAFITPFLNPVIYTFRNKDMKVAMRRLCSRLAHFTKIL

SEQ ID NO: 9336 - protein, 738 aa, Homo sapiens
MTSSGPGPRFLLLLPLLLPPAASASDRPRGRDPVNPEKLLVITVATAETEGYLRFLRSAEFFNYTVRTLGLGEEWRGGDVARTVGGGQKVRWLKKEMEKYADREDMIIMFVDSYDVILAGSPTELLKKFVQSGSRLLFSAESFCWPEWGLAEQYPEVGTGKRFLNSGGFIGFATTIHQIVRQWKYKDDDDDQLFYTRLYLDPGLREKLSLNLDHKSRIFQNLNGALDEVVLKFDRNRVRIRNVAYDTLPIVVHGNGPTKLQLNYLGNYVPNGWTPEGGCGFCNQDRRTLPGGQPPPRVFLAVFVEQPTPFLPRFLQRLLLLDYPPDRVTLFLHNNEVFHEPHIADSWPQLQDHFSAVKLVGPEEALSPGEARDMAMDLCRQDPECEFYFSLDADAVLTNLQTLRILIEENRKVIAPMLSRHGKLWSNFWGALSPDEYYARSEDYVELVQRKRVGVWNVPYISQAYVIRGDTLRMELPQRDVFSGSDTDPDMAFCKSFRDKGIFLHLSNQHEFGRLLATSRYDTEHLHPDLWQIFDNPVDWKEQYIHENYSRALEGEGIVEQPCPDVYWFPLLSEQMCDELVAEMEHYGQWSGGRHEDSRLAGGYENVPTVDIHMKQVGYEDQWLQLLRTYVGPMTESLFPGYHTKARAVMNFVVRYRPDEQPSLRPHHDSSTFTLNVALNHKGLDYEGGGCRFLRYDCVISSPRKGWALLHPGRLTHYHEGLPTTWGTRYIMVSFVDP

SEQ ID NO: 9337 - protein, 141 aa, Homo sapiens
MNARGLGSELKDSIPVTELSASGPFESHDLLRKGFSCVKNELLPSHPLELSEKNFQLNQDKMNFSTLRNIQGLFAPLKLQMEFKAVQQVQRLPFLSSSNLSLDVLRGNDETIGFEDILNDPSQSEVMGEPHLMVEYKLGLL

SEQ ID NO: 9338 - protein, 862 aa, Homo sapiens
MASEVPYASGMPIKKIGHRSVDSSGGTTSSALKGAIQLGITHTVGSLSTKPESDVLMQDFHMVESIFFPSEGSNLTPAHHYNAFRFKTYAPVAFRYFWELFGIRPDDYLYSLCSEPLIELCSSGASGSLFYVSSDDEFIVKTVRHKEAEFLQKLLPGYYINLNQNPRTLLPKFYGLYCVQTGGKNIRIVVMNNLLPRSVKMHIKYDLKGSTYRRRASQKEREKPLPTFKDLDFLQDIPDGLFLDADVHNALCKTLQRDCLVLQSFKIMDYSLLMSIHNIDHAQREPLSSETQYSVDTRRPAPQKALYSTAMESIQGEARRGGTMETDDHMGGIPARNSKGERLLLYIGIIDILQSYRFVKKLEHSWKALIHDGDTVSVHRPGFYAEWFQRFMCNTVFKKIPLKPSPSKKLRSGSSFSQRAGSSGNSCITYQPLVSGEHKAQVTTKAEVEPGVHLGCPDVLPQTPPLEEISEGSPTPDPSFSPLVEETLQMLTTSVDNSEYMGNGDFLPTRLQAQQDAVNTVCHSKTRSNPENNVGLITLDNDCEVLTTLTPDTGRILSKLHTVQPKGKITFCMGIHVAHLALKHRQGNNHKIRIIAFVGNPVEDNEKNLVKLAKCLKKEKVNVDIINFGEEEVNTEKLTAFVNTLNGKDGTGSHLVTVPPGPSLADALISFPILAGEGGAMMGLGASDFEFGVDPSADPELALVLRVFMEEQRQRQEEEARQAAAASAAEAGIATTGTEDSDDALLKMTISQQEFGHTGLPDLSSMTEEEKIVCAMQMSLQGAEFGLAESADIDASSAMDTSEPAKEEDDYDVMQDPEFLQSVLENLPGVDPNNEAIRNAVGSLASQATKDSKKDKKEEDKK

SEQ ID NO: 9339 - protein, 763 aa, Homo sapiens
MQRAGSSGGRGECDISGAGRLGLEEAARLSCAVHTSPGGGRRPGQAAGMSAKERPKGKVIKDSVTLLPCFYFVELPILASSVVSLYFLELTDVFKPVHSGFSCYDRSLSMPYIEPTQEAIPFLMLLSLAFAGPAITIMVGEGILYCCLSKRRNGVGLEPNINAGGCNFNSFLRRAVRFVGVHVFGLCSTALITDIIQLSTGYQAPYFLTVCKPNYTSLNVSCKENSYIVEDICSGSDLTVINSGRKSFPSQHATLAAFAAVYVSMYFNSTLTDSSKLLKPLLVFTFIICGIICGLTRITQYKNHPVDVYCGFLIGGGIALYLGLYAVGNFLPSDESMFQHRDALRSLTDLNQDPNRLLSAKNGSSSDGIAHTEGILNRNHRDASSLTNLKRANADVEIITPRSPMGKENMVTFSNTLPRANTPSVEDPVRRNASIHASMDSARSKQLLTQWKNKNESRKLSLQVIEPEPGQSPPRSIEMRSSSEPSRVGVNGDHHGPGNQYLKIQPGAVPGCNNSMPGGPRVSIQSRPGSSQLVHIPEETQENISTSPKSSSARAKWLKAAEKTVACNRSNSQPRIMQVIAMSKQQGVLQSSPKNTEGSTVSCTGSIRYKTLTDHEPSGIVRVEAHPENNRPIIQIPSTEGEGSGSWKWKAPEKGSLRQTYELNDLNRDSESCESLKDSFGSGDRKRSNIDSNEHHHHGITTIRVTPVEGSEIGSETLSISSSRDSTLRRKGNIILIPERSNSPENTRNIFYKGTSPTRAYKD

SEQ ID NO: 9340 - protein, 577 aa, Homo sapiens
MQRAGSSGGRGECDISGAGRLGLEEAARLSCAVHTSPGGGRRPGQAAGMSAKERPKGKVIKDSVTLLPCFYFVELPILASSVVSLYFLELTDVFKPVHSGFSCYDRSLSMPYIEPTQEAIPFLMLLSLAFAGPAITIMVGEGILYCCLSKRRNGVGLEPNINAGGCNFNSFLRRAVRFVGVHVFGLCSTALITDIIQLSTGYQAPYFLTVCKPNYTSLNVSCKENSYIVEDICSGSDLTVINSGRKSFPSQHATLAAFAAVYVSMYFNSTLTDSSKLLKPLLVFTFIICGIICGLTRITQYKNHPVDVYCGFLIGGGIALYLGLYAVGNFLPSDESMFQHRDALRSLTDLNQDPNRLLSAKNGSSSDGIAHTEGILNRNHRDASSLTNLKRANADVEIITPRSPMGKENMVTFSNTLPRANTPSVEDPVRRNASIHASMDSARSKQLLTQWKNKNESRKLSLQVIEPEPGQSPPRSIEMRSSSEPSRVGVNGDHHGPGNQYLKIQPGAVPGCNNSMPGGPRVSIQSRPGSSQLVHIPEETQENISTSPKSSRVSSKAAPRTLKAARSPALAPSAIKP

SEQ ID NO: 9341 - protein, 705 aa, Homo sapiens
MQRAGSSGGRGECDISGAGRLGLEEAARLSCAVHTSPGGGRRPGQAAGMSAKERPKGKVIKDSVTLLPCFYFVELPILASSVVSLYFLELTDVFKPVHSGFSCYDRSLSMPYIEPTQEAIPFLMLLSLAFAGPAITIMVGEGILYCCLSKRRNGVGLEPNINAGGCNFNSFLRRAVRFVGVHVFGLCSTALITDIIQLSTGYQAPYFLTVCKPNYTSLNVSCKENSYIVEDICSGSDLTVINSGRKSFPSQHATLAAFAAVYVSGLYAVGNFLPSDESMFQHRDALRSLTDLNQDPNRLLSAKNGSSSDGIAHTEGILNRNHRDASSLTNLKRANADVEIITPRSPMGKENMVTFSNTLPRANTPSVEDPVRRNASIHASMDSARSKQLLTQWKNKNESRKLSLQVIEPEPGQSPPRSIEMRSSSEPSRVGVNGDHHGPGNQYLKIQPGAVPGCNNSMPGGPRVSIQSRPGSSQLVHIPEETQENISTSPKSSSARAKWLKAAEKTVACNRSNSQPRIMQVIAMSKQQGVLQSSPKNTEGSTVSCTGSIRYKTLTDHEPSGIVRVEAHPENNRPIIQIPSTEGEGSGSWKWKAPEKGSLRQTYELNDLNRDSESCESLKDSFGSGDRKRSNIDSNEHHHHGITTIRVTPVEGSEIGSETLSISSSRDSTLRRKGNIILIPERSNSPENTRNIFYKGTSPTRAYKD

SEQ ID NO: 9342 - protein, 364 aa, Homo sapiens
MALALLEDWCRIMSVDEQKSLMVTGIPADFEEAEIQEVLQETLKSLGRYRLLGKIFRKQENANAVLLELLEDTDVSAIPSEVQGKGGVWKVIFKTPNQDTEFLERLNLFLEKEGQTVSGMFRALGQEGVSPATVPCISPELLAHLLGQAMAHAPQPLLPMRYRKLRVFSGSAVPAPEEESFEVWLEQATEIVKEWPVTEAEKKRWLAESLRGPALDLMHIVQADNPSISVEECLEAFKQVFGSLESRRTAQVRYLKTYQEEGEKVSAYVLRLETLLRRAVEKRAIPRRIADQVRLEQVMAGATLNQMLWCRLRELKDQGPPPSFLELMKVIREEEEEEASFENESIEEPEERDGYGRWNHEGDD

SEQ ID NO: 9343 - protein, 193 aa, Homo sapiens
MHAADLEKPMVEKQDQSPSLRTGEEKRDVSISRLREAFSLRHTTENKPHSPKTPEPRRSPLGQKRGMSSSSTSDAISDRGVLRPQKEAVSSSQGPSDPTDRAEVEKDSGHGSTSVDSEGFSIPDTGSHCSSECVASTPGDRGSQEHVDSQEKAPETDDSFSDVDCHSNQEDTGCKFQVLPQPTNLTSPNTKVF

SEQ ID NO: 9344 - protein, 442 aa, Homo sapiens
MGLAMEHGGSYARAGGSSRGCWYYLRYFFLFVSLIQFLIILGLVLFMVYGNVHVSTESNLQATERRAEGLYSQLLGLTASQSNLTKELNFTTRAKDAIMQMWLNARRDLDRINASFRQCQGDRVIYTNNQRYMAAIILSEKQCRDQFKDMNKSCDALLFMLNQKVKTLEVEIAKEKTICTKDKESVLLNKRVAEEQLVECVKTRELQHQERQLAKEQLQKVQALCLPLDKDKFEMDLRNLWRDSIIPRSLDNLGYNLYHPLGSELASIRRACDHMPSLMSSKVEELARSLRADIERVARENSDLQRQKLEAQQGLRASQEAKQKVEKEAQAREAKLQAECSRQTQLALEEKAVLRKERDNLAKELEEKKREAEQLRMELAIRNSALDTCIKTKSQPMMPVSRPMGPVPNPQPIDPASLEEFKRKILESQRPPAGIPVAPSSG

SEQ ID NO: 9345 - protein, 1271 aa, Homo sapiens
MEALRNPMPLGSSEEALGDLACSSLTGASRDLGTGAVASGTQEETSGPRGDPQQTPSLEKERHTPSRTGPGAAGRTLPRRSRSWERAPRSSRGAQAAACHTSHHSAGSRPGGHLGGQAVGTPNCVPVEGPGCTKEEDVLASSACVSTDGGSLHCHNPSGPSDVPARQPHPEQEGWPPGTGDFPSQVPKQVLDVSQELLQSGVVTLPGTRDRHGRAVVQVRTRSLLWTREHSSCAELTRLLLYFHSIPRKEVRDLGLVVLVDARRSPAAPAVSQALSGLQNNTSPIIHSILLLVDKESAFRPDKDAIIQCEVVSSLKAVHKFVDSCQLTADLDGSFPYSHGDWICFRQRLEHFAANCEEAIIFLQNSFCSLNTHRTPRTAQEVAELIDQHETMMKLVLEDPLLVSLRLEGGTVLARLRREELGTEDSRDTLEAATSLYDRVDEEVHRLVLTSNNRLQQLEHLRELASLLEGNDQQSCQKGLQLAKENPQRTEEMVQDFRRGLSAVVSQAECREGELARWTRSSELCETVSSWMGPLDPEACPSSPVAECLRSCHQEATSVAAEAFPGAGVAVLKPHALGKPWASQQDLWLQYPQTRLRLEEALSEAAPDPSLPPLAQSPPKHERAQEAMRRHQKPPSFPSTDSGGGAWEPAQPLSGLPGRALLCGQDGETLRPGLCALWDPLSLLRGLPGAGATTAHLEDSSACSSEPTQTLASRPRKHPQKKMIKKTQSFEIPQPDSGPRDSCQPDHTSVFSKGLEVTSTVATEKKLPLWQHARSPPVTQSRSLSSPSGLHPAEEDGRQQVGSSRLRHIMAEMIATEREYIRCLGYVIDNYFPEMERMDLPQGLRGKHHVIFGNLEKLHDFHQQHFLRELERCQHCPLAVGRSFLRHEEQFGMYVIYSKNKPQSDALLSSHGNAFFKDKQRELGDKMDLASYLLRPVQRVAKYALLLQDLLKEASCGLAQGQELGELRAAEVVVCFQLRHGNDLLAMDAIRGCDVNLKEQGQLRCRDEFIVCCGRKKYLRHVFLFEDLILFSKTQKVEGSHDVYLYKQSFKTAEIGMTENVGDSGLRFEIWFRRRRKSQDTYILQASSAEVKSAWTDVIGRILWRQALKSRELRIQEMASMGIGNQPFMDVKPRDRTPDCAVISDRAPKCAVMSDRVPDSIVKGTESQMRGSTAVSSSDHAAPFKRPHSTISDSSTSSSSSQSSSILGSLGLLVSSSPAHPGLWSPAHSPWSSDIRACVEEDEPEPELETGTQAAVCEGAPAVLLSRTRQA

SEQ ID NO: 9346 - protein, 1075 aa, Homo sapiens
MVVEVDSMPAASSVKKPFGLRSKMGKWCCRCFPCYRESGKSNVGTSGDHDDSAMKTLRSKMGKWCHHCFPCCRGSGKSNVGASGDHDDSAMKTLRNKMGKWCCHCFPCCRGSGKSKVGAWGDYDDSAFMEPRYHVRGEDLDKLHRAAWWGKVPRKDLIVMLRDTDVNKKDKQKRTALHLASANGNSEVVKLLLDRRCQLNVLDNKKRTALIKAVQCQEDECALMLLEHGTDPNIPDEYGNTTLHYAIYNEDKLMAKALLLYGADIESKNKHGLTPLLLGVHEQKQQVVKFLIKKKANLNALDRYGRTALILAVCCGSASIVSLLLEQNIDVSSQDLSGQTAREYAVSSHHHVICQLLSDYKEKQMLKISSENSNPEQELKLTSEEESQRFKGSENSQPEKMSQELEINKDGDREVEEEMKKHESNNVGLLENLTNGVTAGNGDNGLIPQRKSRTPENQQFPDNESEEYHRICELLSDYKEKQMPKYSSENSNPEQDLKLTSEEESQRLKGSENGQPEKRSQEPEINKDGDRELENFMAIEEMKKHGSTHVGFPENLTNGATAGNGDDGLIPPRKSRTPESQQFPDTENEEYHSDEQNDTQKQFCEEQNTGILHDEILIHEEKQIEVVEKMNSELSLSCKKEKDVLHENSTLREEIAMLRLELDTMKHQSQLREKKYLEDIESVKKKNDNLLKALQLNELTMDDDTAVLVIDNGSGMCKAGFAGDDAPRAVFPSIVGRPRQQGMMGGMHQKESYVGKEAQSKRGILTLKYPMEHGIITNWDDMEKIWHHTFYNELRVAPEEHPILLTEAPLNPKANREKMTQIMFETFNTPAMYVAIQAVPSLYTSGRTTGIVMDSGDGVTHTVPIYEGNALPHATLRLDLAGRELPDYLMKILTERGYRFTTMAEREIVRDIKEKLCYVALDFEQEMATAASSSSLEKSYELPDGQVITIGNERFRCPEALFQPCFLGMESCGIHETTFNSIMKSDVDIRKDLYTNTVLSGGTTMYPGMAHRMQKEIAALAPSMMKIRIIAPPKRKYSVWVGGSILASLSTFQQMWISKQEYDESGPSIVHRKCF

SEQ ID NO: 9347 - protein, 394 aa, Homo sapiens
MVVEVDSMPAASSVKKPFGLRSKMGKWCCRCFPCYRESGKSNVGTSGDHDDSAMKTLRSKMGKWCHHCFPCCRGSGKSNVGASGDHDDSAMKTLRNKMGKWCCHCFPCCRGSGKSKVGAWGDYDDSAFMEPRYHVRGEDLDKLHRAAWWGKVPRKDLIVMLRDTDVNKKDKQKRTALHLASANGNSEVVKLLLDRRCQLNVLDNKKRTALIKVCSSQLYQHEAVQCQEDECALMLLEHGTDPNIPDEYGNTTLHYAIYNEDKLMAKALLLYGADIESKNKHGLTPLLLGVHEQKQQVVKFLIKKKANLNALDRYGRTALILAVCCGSASIVSLLLEQNIDVSSQDLSGQTAREYAVSSHHHVICQLLSDYKEKQMLKISSENSNPENVSRTRNK

SEQ ID NO: 9348 - protein, 376 aa, Homo sapiens
MVVEVDSMPAASSVKKPFGLRSKMGKWCCRCFPCYRESGKSNVGTSGDHDDSAMKTLRSKMGKWCHHCFPCCRGSGKSNVGASGDHDDSAMKTLRNKMGKWCCHCFPCCRGSGKSKVGAWGDYDDSAFMEPRYHVRGEDLDKLHRAAWWGKVPRKDLIVMLRDTDVNKKDKQKRTALHLASANGNSEVVKLLLDRRCQLNVLDNKKRTALIKAVQCQEDECALMLLEHGTDPNIPDEYGNTTLHYAIYNEDKLMAKALLLYGADIESKNKHGLTPLLLGVHEQKQQVVKFLIKKKANLNALDRYGRTALILAVCCGSASIVSLLLEQNIDVSSQDLSGQTAREYAVSSHHHVICQLLSDYKEKQMLKISSENSNPG

SEQ ID NO: 9349 - protein, 235 aa, Homo sapiens
METTLLFFSQINMCESKEKTFFKLIHGSGKEETSKEAKIRAKEKRNRLSLLVQKPEFHEDTRSSRSGHLAKETRVSPEEAVKWGESFDKLLSHRDGLEAFTRFLKTEFSEENIEFWIACEDFKKSKGPQQIHLKAKAIYEKFIQTDAPKEVNLDFHTKEVITNSITQPTLHSFDAAQSRVYQLMEQDSYTRFLKSDIYLDLMEGRPQRPTNLRRRSRSFTCNEFQDVQSDVAIWL

SEQ ID NO: 9350 - protein, 790 aa, Homo sapiens
MKAFGPPHEGPLQGLVASRIETYGGRHRASAQSTAGRLYPRGYPVLDPSRRRLQQYVPFARGSGQARGLSPMRLRDPEPEKRHGGHVGAGLLHSPKLKELTKAHELEVRLHTFSMFGMPRLPPEDRRHWEIGEGGDSGLTIEKSWRELVPGHKEMSQELCHQQEALWELLTTELIYVRKLKIMTDLLAAGLLNLQRVGLLMEVSAETLFGNVPSLIRTHRSFWDEVLGPTLEETRASGQPLDPIGLQSGFLTFGQRFHPYVQYCLRVKQTMAYAREQQETNPLFHAFVQWCEKHKRSGRQMLCDLLIKPHQRITKYPLLLHAVLKRSPEARAQEALNAMIEAVESFLRHINGQVRQGEEQESLAAAAQRIGPYEVLEPPSDEVEKNLRPFSTLDLTSPMLGVASEHTRQLLLEGPVRVKEGREGKLDVYLFLFSDVLLVTKPQRKADKAKVIRPPLMLEKLVCQPLRDPNSFLLIHLTEFQCVSSALLVHCPSPTDRAQWLEKTQQAQAALQKLKAEEYVQQKRELLTLYRDQDRESPSTRPSTPSLEGSQSSAEGRTPEFSTIIPHLVVTEDTDEDAPLVPDDTSDSGYGTLIPGTPTGSRSPLSRLRQRALRRDPRLTFSTLELRDIPLRPHPPDPQAPQRRSAPELPEGILKGGSLPQEDPPTWSEEEDGASERGNVVVETLHRARLRGQLPSSPTHADSAGESPWESSGEEEEEGPLFLKAGHTSLRPMRAEDMLREIREELASQRIEGAEEPRDSRPRKLTRAQLQRMRGPHIIQLDTPLSASEV

SEQ ID NO: 9351 - protein, 758 aa, Homo sapiens
MGCRLHAPGEKAAHDPSRRRLQQYVPFARGSGQARGLSPMRLRDPEPEKRHGGHVGAGLLHSPKLKELTKAHELEVRLHTFSMFGMPRLPPEDRRHWEIGEGGDSGLTIEKSWRELVPGHKEMSQELCHQQEALWELLTTELIYVRKLKIMTDLLAAGLLNLQRVGLLMEVSAETLFGNVPSLIRTHRSFWDEVLGPTLEETRASGQPLDPIGLQSGFLTFGQRFHPYVQYCLRVKQTMAYAREQQETNPLFHAFVQWCEKHKRSGRQMLCDLLIKPHQRITKYPLLLHAVLKRSPEARAQEALNAMIEAVESFLRHINGQVRQGEEQESLAAAAQRIGPYEVLEPPSDEVEKNLRPFSTLDLTSPMLGVASEHTRQLLLEGPVRVKEGREGKLDVYLFLFSDVLLVTKPQRKADKAKVIRPPLMLEKLVCQPLRDPNSFLLIHLTEFQCVSSALLVHCPSPTDRAQWLEKTQQAQAALQKLKAEEYVQQKRELLTLYRDQDRESPSTRPSTPSLEGSQSSAEGRTPEFSTIIPHLVVTEDTDEDAPLVPDDTSDSGYGTLIPGTPTGSRSPLSRLRQRALRRDPRLTFSTLELRDIPLRPHPPDPQAPQRRSAPELPEGILKGGSLPQEDPPTWSEEEDGASERGNVVVETLHRARLRGQLPSSPTHADSAGESPWESSGEEEEEGPLFLKAGHTSLRPMRAEDMLREIREELASQRIEGAEEPRDSRPRKLTRAQLQRMRGPHIIQLDTPLSASEV

SEQ ID NO: 9352 - protein, 320 aa, Homo sapiens
MCPREGGRASTIHQKTEKAFGQLLCQPLGEPKIQHPLKAALQKLKAEEYVQQKRELLTLYRDQDRESPSTRPSTPSLEGSQSSAEGRTPEFSTIIPHLVVTEDTDEDAPLVPDDTSDSGYGTLIPGTPTGSRSPLSRLRQRALRRDPRLTFSTLELRDIPLRPHPPDPQAPQRRSAPELPEGILKGGSLPQEDPPTWSEEEDGASERGNVVVETLHRARLRGQLPSSPTHADSAGESPWESSGEEEEEGPLFLKAGHTSLRPMRAEDMLREIREELASQRIEGAEEPRDSRPRKLTRAQLQRMRGPHIIQLDTPLSASEV

SEQ ID NO: 9353 - protein, 222 aa, Homo sapiens
MKLPLLLALLFGAVSALHLRSETSTFETPLGAKTLPEDEETPEQEMEETPCRELEEEEEWGSGSEDASKKDGAVESISVPDMVDKNLTCPEEEDTVKVVGIPGCQTCRYLLVRSLQTFSQAWFTCRRCYRGNLVSIHNFNINYRIQCSVSALNQGQVWIGGRITGSGRCRRFQWVDGSRWNFAYWAAHQPWSRGGHCVALCTRGGHWRRAHCLRRLPFICSY

SEQ ID NO: 9354 - protein, 211 aa, Homo sapiens
MKLPLLLALLFGAVSALHLRSETSTFETPLGAKTLPEDEETPEQEMEETPCRELEEEEEWGSGSEDASKKDGAVESISVPDMVDKNLTCPEEEDTVKVVGIPGCQTCRYLLFTCRRCYRGNLVSIHNFNINYRIQCSVSALNQGQVWIGGRITGSGRCRRFQWVDGSRWNFAYWAAHQPWSRGGHCVALCTRGGHWRRAHCLRRLPFICSY

SEQ ID NO: 9355 - protein, 474 aa, Homo sapiens
MSIRAPPRLLELARQRLLRDQALAISTMEELPRELFPTLFMEAFSRRRCETLKTMVQAWPFTRLPLGSLMKSPHLESLKSVLEGVDVLLTQEVRPRQSKLQVLDLRNVDENFCDIFSGATASFPEALSQKQTADNCPGTGRQQPFMVFIDLCLKNRTLDECLTHLLEWGKQRKGLLHVCCKELQVFGMPIHSIIEVLNMVELDCIQEVEVCCPWELSTLVKFAPYLGQMRNLRKLVLFNIRASACIPPDNKGQFIARFTSQFLKLDYFQNLSMHSVSFLEGHLDQLLRCLQASLEMVVMTDCLLSESDLKHLSWCPSIRQLKELDLRGVTLTHFSPEPLTGLLEQVVATLQTLDLEDCGIMDSQLSAILPVLSRCSQLSTFSFCGNLISMAALENLLRHTVGLSKLSLELYPAPLESYDTQGALCWGRFAELGAELMNTLRDLRQPKIIVFCTVPCPRCGIRASYDLEPSHCLC

SEQ ID NO: 9356 - protein, 933 aa, Homo sapiens
MTELKAKGPRAPHVAGGPPSPEVGSPLLCRPAAGPFPGSQTSDTLPEVSAIPISLDGLLFPRPCQGQDPSDEKTQDQQSLSDVEGAYSRAEATRGAGGSSSSPPEKDSGLLDSVLDTLLAPSGPGQSQPSPPACEVTSSWCLFGPELPEDPPAAPATQRVLSPLMSRSGCKVGDSSGTAAAHKVLPRGLSPARQLLLPASESPHWSGAPVKPSPQAAAVEVEEEDGSESEESAGPLLKGKPRALGGAAAGGGAAAVPPGAAAGGVALVPKEDSRFSAPRVALVEQDAPMAPGRSPLATTVMDFIHVPILPLNHALLAARTRQLLEDESYDGGAGAASAFAPPRSSPCASSTPVAVGDFPDCAYPPDAEPKDDAYPLYSDFQPPALKIKEEEEGAEASARSPRSYLVAGANPAAFPDFPLGPPPPLPPRATPSRPGEAAVTAAPASASVSSASSSGSTLECILYKAEGAPPQQGPFAPPPCKAPGASGCLLPRDGLPSTSASAAAAGAAPALYPALGLNGLPQLGYQAAVLKEGLPQVYPPYLNYLRPDSEASQSPQYSFESLPQKICLICGDEASGCHYGVLTCGSCKVFFKRAMEGQHNYLCAGRNDCIVDKIRRKNCPACRLRKCCQAGMVLGGRKFKKFNKVRVVRALDAVALPQPVGVPNESQALSQRFTFSPGQDIQLIPPLINLLMSIEPDVIYAGHDNTKPDTSSSLLTSLNQLGERQLLSVVKWSKSLPGFRNLHIDDQITLIQYSWMSLMVFGLGWRSYKHVSGQMLYFAPDLILNEQRMKESSFYSLCLTMWQIPQEFVKLQVSQEEFLCMKVLLLLNTIPLEGLRSQTQFEEMRSSYIRELIKAIGLRQKGVVSSSQRFYQLTKLLDNLHDLVKQLHLYCLNTFIQSRALSVEFPEMMSEVIAAQLPKILAGMVKPLLFHKK

SEQ ID NO: 9357 - protein, 769 aa, Homo sapiens
MSRSGCKVGDSSGTAAAHKVLPRGLSPARQLLLPASESPHWSGAPVKPSPQAAAVEVEEEDGSESEESAGPLLKGKPRALGGAAAGGGAAAVPPGAAAGGVALVPKEDSRFSAPRVALVEQDAPMAPGRSPLATTVMDFIHVPILPLNHALLAARTRQLLEDESYDGGAGAASAFAPPRSSPCASSTPVAVGDFPDCAYPPDAEPKDDAYPLYSDFQPPALKIKEEEEGAEASARSPRSYLVAGANPAAFPDFPLGPPPPLPPRATPSRPGEAAVTAAPASASVSSASSSGSTLECILYKAEGAPPQQGPFAPPPCKAPGASGCLLPRDGLPSTSASAAAAGAAPALYPALGLNGLPQLGYQAAVLKEGLPQVYPPYLNYLRPDSEASQSPQYSFESLPQKICLICGDEASGCHYGVLTCGSCKVFFKRAMEGQHNYLCAGRNDCIVDKIRRKNCPACRLRKCCQAGMVLGGRKFKKFNKVRVVRALDAVALPQPVGVPNESQALSQRFTFSPGQDIQLIPPLINLLMSIEPDVIYAGHDNTKPDTSSSLLTSLNQLGERQLLSVVKWSKSLPGFRNLHIDDQITLIQYSWMSLMVFGLGWRSYKHVSGQMLYFAPDLILNEQRMKESSFYSLCLTMWQIPQEFVKLQVSQEEFLCMKVLLLLNTIPLEGLRSQTQFEEMRSSYIRELIKAIGLRQKGVVSSSQRFYQLTKLLDNLHDLVKQLHLYCLNTFIQSRALSVEFPEMMSEVIAAQLPKILAGMVKPLLFHKK

SEQ ID NO: 9358 - protein, 339 aa, Homo sapiens
MEGQHNYLCAGRNDCIVDKIRRKNCPACRLRKCCQAGMVLGGRKFKKFNKVRVVRALDAVALPQPVGVPNESQALSQRFTFSPGQDIQLIPPLINLLMSIEPDVIYAGHDNTKPDTSSSLLTSLNQLGERQLLSVVKWSKSLPGFRNLHIDDQITLIQYSWMSLMVFGLGWRSYKHVSGQMLYFAPDLILNEQRMKESSFYSLCLTMWQIPQEFVKLQVSQEEFLCMKVLLLLNTIPLEGLRSQTQFEEMRSSYIRELIKAIGLRQKGVVSSSQRFYQLTKLLDNLHDLVKQLHLYCLNTFIQSRALSVEFPEMMSEVIAAQLPKILAGMVKPLLFHKK

SEQ ID NO: 9359 - protein, 314 aa, Homo sapiens
MEFIYIYMNFFFFFSVGRKFKKFNKVRVVRALDAVALPQPVGVPNESQALSQRFTFSPGQDIQLIPPLINLLMSIEPDVIYAGHDNTKPDTSSSLLTSLNQLGERQLLSVVKWSKSLPGFRNLHIDDQITLIQYSWMSLMVFGLGWRSYKHVSGQMLYFAPDLILNEQRMKESSFYSLCLTMWQIPQEFVKLQVSQEEFLCMKVLLLLNTIPLEGLRSQTQFEEMRSSYIRELIKAIGLRQKGVVSSSQRFYQLTKLLDNLHDLVKQLHLYCLNTFIQSRALSVEFPEMMSEVIAAQLPKILAGMVKPLLFHKK

SEQ ID NO: 9360 - protein, 831 aa, Homo sapiens
MTELKAKGPRAPHVAGGPPSPEVGSPLLCRPAAGPFPGSQTSDTLPEVSAIPISLDGLLFPRPCQGQDPSDEKTQDQQSLSDVEGAYSRAEATRGAGGSSSSPPEKDSGLLDSVLDTLLAPSGPGQSQPSPPACEVTSSWCLFGPELPEDPPAAPATQRVLSPLMSRSGCKVGDSSGTAAAHKVLPRGLSPARQLLLPASESPHWSGAPVKPSPQAAAVEVEEEDGSESEESAGPLLKGKPRALGGAAAGGGAAAVPPGAAAGGVALVPKEDSRFSAPRVALVEQDAPMAPGRSPLATTVMDFIHVPILPLNHALLAARTRQLLEDESYDGGAGAASAFAPPRSSPCASSTPVAVGDFPDCAYPPDAEPKDDAYPLYSDFQPPALKIKEEEEGAEASARSPRSYLVAGANPAAFPDFPLGPPPPLPPRATPSRPGEAAVTAAPASASVSSASSSGSTLECILYKAEGAPPQQGPFAPPPCKAPGASGCLLPRDGLPSTSASAAAAGAAPALYPALGLNGLPQLGYQAAVLKEGLPQVYPPYLNYLRPDSEASQSPQYSFESLPQKICLICGDEASGCHYGVLTCGSCKVFFKRAMEGQHNYLCAGRNDCIVDKIRRKNCPACRLRKCCQAGMVLGGFRNLHIDDQITLIQYSWMSLMVFGLGWRSYKHVSGQMLYFAPDLILNEQRMKESSFYSLCLTMWQIPQEFVKLQVSQEEFLCMKVLLLLNTIPLEGLRSQTQFEEMRSSYIRELIKAIGLRQKGVVSSSQRFYQLTKLLDNLHDLVKQLHLYCLNTFIQSRALSVEFPEMMSEVIAAQLPKILAGMVKPLLFHKK

SEQ ID NO: 9361 - protein, 273 aa, Homo sapiens
MLKPALEPRGGFSFENCQRNASLERVLPGLKVPHARKTGTTIAGLVFQDGVILGADTRATNDSVVADKSCEKIHFIAPKIYCCGAGVAADAEMTTRMVASKMELHALSTGREPRVATVTRILRQTLFRYQGHVGASLIVGGVDLTGPQLYGVHPHGSYSRLPFTALGSGQDAALAVLEDRFQPNMTLEAAQGLLVEAVTAGILGDLGSGGNVDACVITKTGAKLLRTLSSPTEPVKRSGRYHFVPGTTAVLTQTVKPLTLELVEETVQAMEVE

SEQ ID NO: 9362 - protein, 944 aa, Homo sapiens
MDKKSFEMVLDEIRKAVLTEYKLKAIEYVHGYFSSEQVVDLLRYFSWAEPQLKAMKALQHKMVAVQPTEVVNILNCFTFSKDKLVALELLASNIIDAQNSRPIEDLFRVNMSEKKRCKRILEQAFKGGCKAPHAMISSCGTIPGNPYPKGRPSRINGIFPGTPLKKDGEECTNEGKGIAARILGPSKPPPSTYNPHKPVPYPIPPCRPHATIAPSAYNNAGLVPLANVIAPPPPPYTPNPVGTENEDLSNPSKPIQNQTFSTPASQLFSPHGSNPSTPAATPVPTASPVKAINHPSASAAATVSGMNLLNTVLPVFPGQVSSAVHTPQPSIPNPTVIRTPSLPTAPVTSIHSTTTTPVPSIFSGLVSLPGPSATPTAATPTPGPTPRSTLGSSEAFASTSAPFTSLPFSTSSSAASTSNPNSASLSSVFAGLPLPLPPTSQGLSNPTPVIAGGSTPSVAGPLGVNSPLLSALKGFLTSNDTNLINSSALSSAVTSGLASLSSLTLQNSDSSASAPNKCYAPSAIPTPQRTSTPGLALFPGLPSPVANSTSTPLTLPVQSPLATAASASTSVPVSCGSSASLLRGPHPGTSDLHISSTPAATTLPVMIKTEPTSPTPSAFKGPSHSGNPSHGTLGLSGTLGRAYTSTSVPISLSACLNPALSGLSSLSTPLNGSNPLSSISLPPHGSSTPIAPVFTALPSFTSLTNNFPLTGNPSLNPSVSLPGSLIATSSTAATSTSLPHPSSTAAVLSGLSASAPVSAAPFPLNLSTAVPSLFSVTQGPLSSSNPSYPGFSVSNTPSVTPALPSFPGLQAPSTVAAVTPLPVAATAPSPAPVLPGFASAFSSNFNSALVAQAGLSSGLQAAGSSVFPGLLSLPGIPGFPQNPSQSSLQELQHNAAAQSALLQQVHSASALESYPAQPDGFPSYPSAPGTPFSLQPSLSQSGWQ

SEQ ID NO: 9363 - protein, 922 aa, Homo sapiens
MDKKSFEMVLDEIRKVVDLLRYFSWAEPQLKAMKALQHKMVAVQPTEVVNILNCFTFSKDKLVALELLASNIIDAQNSRPIEDLFRVNMSEKKRCKRILEQAFKGGCKAPHAMISSCGTIPGNPYPKGRPSRINGIFPGTPLKKDGEECTNEGKGIAARILGPSKPPPSTYNPHKPVPYPIPPCRPHATIAPSAYNNAGLVPLANVIAPPPPPYTPNPVGTENEDLSNPSKPIQNQTFSTPASQLFSPHGSNPSTPAATPVPTASPVKAINHPSASAAATVSGMNLLNTVLPVFPGQVSSAVHTPQPSIPNPTVIRTPSLPTAPVTSIHSTTTTPVPSIFSGLVSLPGPSATPTAATPTPGPTPRSTLGSSEAFASTSAPFTSLPFSTSSSAASTSNPNSASLSSVFAGLPLPLPPTSQGLSNPTPVIAGGSTPSVAGPLGVNSPLLSALKGFLTSNDTNLINSSALSSAVTSGLASLSSLTLQNSDSSASAPNKCYAPSAIPTPQRTSTPGLALFPGLPSPVANSTSTPLTLPVQSPLATAASASTSVPVSCGSSASLLRGPHPGTSDLHISSTPAATTLPVMIKTEPTSPTPSAFKGPSHSGNPSHGTLGLSGTLGRAYTSTSVPISLSACLNPALSGLSSLSTPLNGSNPLSSISLPPHGSSTPIAPVFTALPSFTSLTNNFPLTGNPSLNPSVSLPGSLIATSSTAATSTSLPHPSSTAAVLSGLSASAPVSAAPFPLNLSTAVPSLFSVTQGPLSSSNPSYPGFSVSNTPSVTPALPSFPGLQAPSTVAAVTPLPVAATAPSPAPVLPGFASAFSSNFNSALVAQAGLSSGLQAAGSSVFPGLLSLPGIPGFPQNPSQSSLQELQHNAAAQSALLQQVHSASALESYPAQPDGFPSYPSAPGTPFSLQPSLSQSGWQ

SEQ ID NO: 9364 - protein, 579 aa, Homo sapiens
MSAAIAALAASYGSGSGSESDSDSESSRCPLPAADSLMHLTKSPSSKPSLAVAVDSAPEVAVKEDLETGVHLDPAVKEVQYNPTYETMFAPEFGPENPFRTQQMAAPRNMLSGYAEPAHINDFMFEQQRRTFATYGYALDPSLDNHQVSAKYIGSVEEAEKNQGLTVFETGQKKTEKRKKFKENDASNIDGFLGPWAKYVDEKDVAKPSEEEQKELDEITAKRQKKGKQEEEKPGEEKTILHVKEMYDYQGRSYLHIPQDVGVNLRSTMPPEKCYLPKKQIHVWSGHTKGVSAVRLFPLSGHLLLSCSMDCKIKLWEVYGERRCLRTFIGHSKAVRDICFNTAGTQFLSAAYDRYLKLWDTETGQCISRFTNRKVPYCVKFNPDEDKQNLFVAGMSDKKIVQWDIRSGEIVQEYDRHLGAVNTIVFVDENRRFVSTSDDKSLRVWEWDIPVDFKYIAEPSMHSMPAVTLSPNGKWLACQSMDNQILIFGAQNRFRLNKKKIFKGHMVAGYACQVDFSPDMSYVISGDGNGKLNIWDWKTTKLYSRFKAHDKVCIGAVWHPHETSKVITCGWDGLIKLWD

SEQ ID NO: 9365 - protein, 21 aa, Homo sapiens
MAAACRCLSLLLLSTCVALLL

SEQ ID NO: 9366 - protein, 546 aa, Homo sapiens
MANNSPALTGNSQPQHQAAAAAAQQQQQCGGGGATKPAVSGKQGNVLPLWGNEKTMNLNPMILTNILSSPYFKVQLYELKTYHEVVDEIYFKVTHVEPWEKGSRKTAGQTGMCGGVRGVGTGGIVSTAFCLLYKLFTLKLTRKQVMGLITHTDSPYIRALGFMYIRYTQPPTDLWDWFESFLDDEEDLDVKAGGGCVMTIGEMLRSFLTKLEWFSTLFPRIPVPVQKNIDQQIKTRPRKIKKDGKEGAEEIDRHVERRRSRSPRRSLSPRRSPRRSRSRSHHREGHGSSSFDRELEREKERQRLEREAKEREKERRRSRSIDRGLERRRSRSRERHRSRSRSRDRKGDRRDRDREREKENERGRRRDRDYDKERGNEREKERERSRERSKEQRSRGEVEEKKHKEDKDDRRHRDDKRDSKKEKKHSRSRSRERKHRSRSRSRNAGKRSRSRSKEKSSKHKNESKEKSNKRSRSGSQGRTDSVEKSKKREHSPSKEKSRKRSRSKERSHKRDHSDSKDQSDKHDRRRSQSIEQESQEKQHKNKDETV

SEQ ID NO: 9367 - protein, 190 aa, Homo sapiens
MANNSPALTGNSQPQHQAAAAAAQQQQQCGGGGATKPAVSGKQGNVLPLWGNEKTMNLNPMILTNILSSPYFKVQLYELKTYHEVVDEIYFKVTHVEPWEKGSRKTAGQTGMCGGVRGVGTGGIVSTAFCLLYKLFTLKLTRKQVMGLITHTDSPYIRALGFMYIRYTQPPTDLWDWFESFLDDEEFFTL

SEQ ID NO: 9368 - protein, 263 aa, Homo sapiens
MALASVLERPLPVNQRGFFGLGGRADLLDLGPGSLSDGLSLAAPGWGVPEEPGIEMLHGTTTLAFKFRHGVIVAADSRATAGAYIASQTVKKVIEINPYLLGTMAGGAADCSFWERLLARQCRIYELRNKERISVAAASKLLANMVYQYKGMGLSMGTMICGWDKRGPGLYYVDSEGNRISGATFSVGSGSVYAYGVMDRGYSYDLEVEQAYDLARRAIYQATYRDAYSGGAVNLYHVREDGWIRVSSDNVADLHEKYSGSTP

SEQ ID NO: 9369 - protein, 203 aa, Homo sapiens
MALASVLERPLPVNQRGFFGLGGRADLLDLGPGSLSDGLSLAAPGWGVPEEPGIEMLHGTTTLAFKFRHGVIVAADSRATAGAYIASQTVKKVIEINPYLLGTMAGGAADCSFWERLLARQCRIYELRNKERISVAAASKLLANMVYQYKGMGLSMGTMICGWDKRGPVSEVLCLKPKSFGMYLFCGCAERIGNMARPLLRGQ

SEQ ID NO: 9370 - protein, 160 aa, Homo sapiens
MAGGAADCSFWERLLARQCRIYELRNKERISVAAASKLLANMVYQYKGMGLSMGTMICGWDKRGPGLYYVDSEGNRISGATFSVGSGSVYAYGVMDRGYSYDLEVEQAYDLARRAIYQATYRDAYSGGAVNLYHVREDGWIRVSSDNVADLHEKYSGSTP

SEQ ID NO: 9371 - protein, 532 aa, Homo sapiens
MQGPWVLLLLGLRLQLSLGIIPVEEENPDFWNRQAAEALGAAKKLQPAQTAAKNLIIFLGDGMGVSTVTAARILKGQKKDKLGPETFLAMDRFPYVALSKTYSVDKHVPDSGATATAYLCGVKGNFQTIGLSAAARFNQCNTTRGNEVISVMNRAKKAGKSVGVVTTTRVQHASPAGAYAHTVNRNWYSDADVPASARQEGCQDIATQLISNMDIDVILGGGRKYMFPMGTPDPEYPDDYSQGGTRLDGKNLVQEWLAKHQGARYVWNRTELLQASLDPSVTHLMGLFEPGDMKYEIHRDSTLDPSLMEMTEAALLLLSRNPRGFFLFVEGGRIDHGHHESRAYRALTETIMFDDAIERAGQLTSEEDTLSLVTADHSHVFSFGGYPLRGSSIFGLAPGKARDRKAYTVLLYGNGPGYVLKDGARPDVTESESGSPEYRQQSAVPLDGETHAGEDVAVFARGPQAHLVHGVQEQTFIAHVMAFAACLEPYTACDLAPRAGTTDAAHPGPSVVPALLPLLAGTLLLLGTATAP

SEQ ID NO: 9372 - protein, 1664 aa, Homo sapiens
MAARRGRRDGVAPPPSGGPGPDPGGGARGSGWGSRSQAPYGTLGAVSGGEQVLLHEEAGDSGFVSLSRLGPSLRDKDLEMEELMLQDETLLGTMQSYMDASLISLIEDFGSLGESRLSLEDQNEVSLLTALTEILDNADSENLSPFDSIPDSELLVSPREGSSLHKLLTLSRTPPERDLITPVDPLGPSTGSSRGSGVEMSLPDPSWDFSPPSFLETSSPKLPSWRPPRSRPRWGQSPPPQQRSDGEEEEEVASFSGQILAGELDNCVSSIPDFPMHLACPEEEDKATAAEMAVPAAGDESISSLSELVRAMHPYCLPNLTHLASLEDELQEQPDDLTLPEGCVVLEIVGQAATAGDDLEIPVVVRQVSPGPRPVLLDDSLETSSALQLLMPTLESETEAAVPKVTLCSEKEGLSLNSEEKLDSACLLKPREVVEPVVPKEPQNPPANAAPGSQRARKGRKKKSKEQPAACVEGYARRLRSSSRGQSTVGTEVTSQVDNLQKQPQEELQKESGPLQGKGKPRAWARAWAAALENSSPKNLERSAGQSSPAKEGPLDLYPKLADTIQTNPIPTHLSLVDSAQASPMPVDSVEADPTAVGPVLAGPVPVDPGLVDLASTSSELVEPLPAEPVLINPVLADSAAVDPAVVPISDNLPPVDAVPSGPAPVDLALVDPVPNDLTPVDPVLVKSRPTDPRRGAVSSALGGSAPQLLVESESLDPPKTIIPEVKEVVDSLKIESGTSATTHEARPRPLSLSEYRRRRQQRQAETEERSPQPPTGKWPSLPETPTGLADIPCLVIPPAPAKKTALQRSPETPLEICLVPVGPSPASPSPEPPVSKPVASSPTEQVPSQEMPLLARPSPPVQSVSPAVPTPPSMSAALPFPAGGLGMPPSLPPPPLQPPSLPLSMGPVLPDPFTHYAPLPSWPCYPHVSPSGYPCLPPPPTVPLVSGTPGAYAVPPTCSVPWAPPPAPVSPYSSTCTYGPLGWGPGPQHAPFWSTVPPPPLPPASIGRAVPQPKMESRGTPAGPPENVLPLSMAPPLSLGLPGHGAPQTEPTKVEVKPVPASPHPKHKVSALVQSPQMKALACVSAEGVTVEEPASERLKPETQETRPREKPPLPATKAVPTPRQSTVPKLPAVHPARLRKLSFLPTPRTQGSEDVVQAFISEIGIEASDLSSLLEQFEKSEAKKECPPPAPADSLAVGNSGGVDIPQEKRPLDRLQAPELANVAGLTPPATPPHQLWKPLAAVSLLAKAKSPKSTAQEGTLKPEGVTEAKHPAAVRLQEGVHGPSRVHVGSGDHDYCVRSRTPPKKMPALVIPEVGSRWNVKRHQDITIKPVLSLGPAAPPPPCIAASREPLDHRTSSEQADPSAPCLAPSSLLSPEASPCRNDMNTRTPPEPSAKQRSMRCYRKACRSASPSSQGWQGRRGRNSRSVSSGSNRTSEASSSSSSSSSSSRSRSRSLSPPHKRWRRSSCSSSGRSRRCSSSSSSSSSSSSSSSSSSSSRSRSRSPSPRRRSDRRRRYSSYRSHDHYQRQRVLQKERAIEERRVVFIGKIPGRMTRSELKQRFSVFGEIEECTIHFRVQGDNYGFVTYRYAEEAFAAIESGHKLRQADEQPFDLCFGGRRQFCKRSYSDLDSNREDFDPAPVKSKFDSLDFDTLLKQAQKNLRR

SEQ ID NO: 9373 - protein, 1542 aa, Homo sapiens
MRHCWGPCRATWMPPLSPSLRILGALESIPDSELLVSPREGSSLHKLLTLSRTPPERDLITPVDPLGPSTGSSRGSGVEMSLPDPSWDFSPPSFLETSSPKLPSWRPPRSRPRWGQSPPPQQRSDGEEEEEVASFSGQILAGELDNCVSSIPDFPMHLACPEEEDKATAAEMAVPAAGDESISSLSELVRAMHPYCLPNLTHLASLEDELQEQPDDLTLPEGCVVLEIVGQAATAGDDLEIPVVVRQVSPGPRPVLLDDSLETSSALQLLMPTLESETEAAVPKVTLCSEKEGLSLNSEEKLDSACLLKPREVVEPVVPKEPQNPPANAAPGSQRARKGRKKKSKEQPAACVEGYARRLRSSSRGQSTVGTEVTSQVDNLQKQPQEELQKESGPLQGKGKPRAWARAWAAALENSSPKNLERSAGQSSPAKEGPLDLYPKLADTIQTNPIPTHLSLVDSAQASPMPVDSVEADPTAVGPVLAGPVPVDPGLVDLASTSSELVEPLPAEPVLINPVLADSAAVDPAVVPISDNLPPVDAVPSGPAPVDLALVDPVPNDLTPVDPVLVKSRPTDPRRGAVSSALGGSAPQLLVESESLDPPKTIIPEVKEVVDSLKIESGTSATTHEARPRPLSLSEYRRRRQQRQAETEERSPQPPTGKWPSLPETPTGLADIPCLVIPPAPAKKTALQRSPETPLEICLVPVGPSPASPSPEPPVSKPVASSPTEQVPSQEMPLLARPSPPVQSVSPAVPTPPSMSAALPFPAGGLGMPPSLPPPPLQPPSLPLSMGPVLPDPFTHYAPLPSWPCYPHVSPSGYPCLPPPPTVPLVSGTPGAYAVPPTCSVPWAPPPAPVSPYSSTCTYGPLGWGPGPQHAPFWSTVPPPPLPPASIGRAVPQPKMESRGTPAGPPENVLPLSMAPPLSLGLPGHGAPQTEPTKVEVKPVPASPHPKHKVSALVQSPQMKALACVSAEGVTVEEPASERLKPETQETRPREKPPLPATKAVPTPRQSTVPKLPAVHPARLRKLSFLPTPRTQGSEDVVQAFISEIGIEASDLSSLLEQFEKSEAKKECPPPAPADSLAVGNSGGVDIPQEKRPLDRLQAPELANVAGLTPPATPPHQLWKPLAAVSLLAKAKSPKSTAQEGTLKPEGVTEAKHPAAVRLQEGVHGPSRVHVGSGDHDYCVRSRTPPKKMPALVIPEVGSRWNVKRHQDITIKPVLSLGPAAPPPPCIAASREPLDHRTSSEQADPSAPCLAPSSLLSPEASPCRNDMNTRTPPEPSAKQRSMRCYRKACRSASPSSQGWQGRRGRNSRSVSSGSNRTSEASSSSSSSSSSSRSRSRSLSPPHKRWRRSSCSSSGRSRRCSSSSSSSSSSSSSSSSSSSSRSRSRSPSPRRRSDRRRRSYRSHDHYQRQRVLQKERAIEERRVVFIGKIPGRMTRSELKQRFSVFGEIEECTIHFRVQGDNYGFVTYRYAEEAFAAIESGHKLRQADEQPFDLCFGGRRQFCKRSYSDLDSNREDFDPAPVKSKFDSLDFDTLLKQAQKNLRR

SEQ ID NO: 9374 - protein, 234 aa, Homo sapiens
MAERGYSFSLTTFSPSGKLVQIEYALAAVAGGAPSVGIKAANGVVLATEKKQKSILYDERSVHKVEPITKHIGLVYSGMGPDYRVLVHRARKLAQQYYLVYQEPIPTAQLVQRVASVMQEYTQSGGVRPFGVSLLICGWNEGRPYLFQSDPSGAYFAWKATAMGKNYVNGKTFLEKRYNEDLELEDAIHTAILTLKESFEGQMTEDNIEVGICNEAGFRRLTPTEVKDYLAAIA

SEQ ID NO: 9375 - protein, 161 aa, Homo sapiens
MSVTLHTDVGDIKIEVFCERTPKTCENFLALCASNYYNGCIFHRNIKGFMVQTGDPTGTGRGGNSIWGKKFEDEYSEYLKHNVRGVVSMANNGPNTNGSQFFITYGKQPHLDMKYTVFGKVIDGLETLDELEKLPVNEKTYRPLNDVHIKDITIHANPFAQ

SEQ ID NO: 9376 - protein, 165 aa, Homo sapiens
MSVTLHTDVGDIKIEVFCERTPKTCEMESRCVPQAGVQWRDLGSLQPPPPGFKQVFCLSLPRTGRGGNSIWGKKFEDEYSEYLKHNVRGVVSMANNGPNTNGSQFFITYGKQPHLDMKYTVFGKVIDGLETLDELEKLPVNEKTYRPLNDVHIKDITIHANPFAQ

SEQ ID NO: 9377 - protein, 281 aa, Homo sapiens
MFPAQEEADRTVFVGNLEARVREEILYELFLQAGPLTKVTICKDREGKPKSFGFVCFKHPESVSYAIALLNGIRLYGRPINVQYRFGSSRSSEPANQSFESCVKINSHNYRNEEMLVGRSSFPMQYFPINNTSLPQEYFLFQKMQWHVYNPVLQLPYYEMTAPLPNSASVSSSLNHVPDLEAGPSSYKWTHQQPSDSDLYQMTAPLPNSASVSSSLNHVPDLEAGPSSYKWTHQQPSDSDLYQMNKRKRQKQTSDSDSSTDNNRGNECSQKFRKSKKKKRY

SEQ ID NO: 9378 - protein, 233 aa, Homo sapiens
LRPRPEDVPCSGGGRQDRVCWEFRGPSSGRDSVRAVPSGSSRSSEPANQSFESCVKINSHNYRNEEMLVGRSSFPMQYFPINNTSLPQEYFLFQKMQWHVYNPVLQLPYYEMTAPLPNSASVSSSLNHVPDLEAGPSSYKWTHQQPSDSDLYQMTAPLPNSASVSSSLNHVPDLEAGPSSYKWTHQQPSDSDLYQMNKRKRQKQTSDSDSSTDNNRGNECSQKFRKSKKKKRY

SEQ ID NO: 9379 - protein, 106 aa, Homo sapiens
MVNVPKTRRTFCKKCGKHQPHKVTQYKKGKDSLYAQGRRRYDRKQSGYGGQTKPIFRKKAKTTKKIVLRLECVEPNCRSKRMLAIKRCKHFELGGDKKRKGQVIQF

SEQ ID NO: 9380 - protein, 303 aa, Homo sapiens
MRAWIFFLLCLAGRALAAPQQEALPDETEVVEETVAEVTEVSVGANPVQVEVGEFDDGAEETEEEVVAENPCQNHHCKHGKVCELDENNTPMCVCQDPTSCPAPIGEFEKVCSNDNKTFDSSCHFFATKCTLEGTKKGHKLHLDYIGPCKYIPPCLDSELTEFPLRMRDWLKNVLVTLYERDEDNNLLTEKQKLRVKKIHENEKRLEAGDHPVELLARDFEKNYNMYIFPVHWQFGQLDQHPIDGYLSHTELAPLRAPLIPMEHCTTRFFETCDLDNDKYIALDEWAGCFGIKQKDIDKDLVI

SEQ ID NO: 9381 - protein, 289 aa, Homo sapiens
MSFVAYEELIKEGDTAILSLGHGAMVAVRVQRGAQTQTRHGVLRHSVDLIGRPFGSKVTCGRGGWVYVLHPTPELWTLNLPHRTQILYSTDIALITMMLELRPGSVVCESGTGSGSVSHAIIRTIAPTGHLHTVEFHQQRAEKAREEFQEHRVGRWVTVRTQDVCRSGFGVSHVADAVFLDIPSPWEAVGHAWDALKVEGGRFCSFSPCIEQVQRTCQALAARGFSELSTLEVLPQVYNVRTVSLPPPDLGTGTDGPAGSDTSPFRSGTPMKEAVGHTGYLTFATKTPG

SEQ ID NO: 9382 - protein, 468 aa, Homo sapiens
MGTQEGWCLLLCLALSGAAETKPHPAEGQWRAVDVVLDCFLAKDGAHRGALASSEDRARASLVLKQVPVLDDGSLEDFTDFQGGTLAQDDPPIIFEASVDLVQIPQAEALLHADCSGKEVTCEISRYFLQMTETTVKTAAWFMANMQVSGGGPSISLVMKTPRVTKNEALWHPTLNLPLSPQGTVRTAVEFQVMTQTQSLSFLLGSSASLDCGFSMAPGLDLISVEWRLQHKGRGQLVYSWTAGQGQAVRKGATLEPAQLGMARDASLTLPGLTIQDEGTYICQITTSLYRAQQIIQLNIQASPKVRLSLANEALLPTLICDIAGYYPLDVVVTWTREELGGSPAQVSGASFSSLRQSVAGTYSISSSLTAEPGSAGATYTCQVTHISLEEPLGASTQVVPPERRTALGVIFASSLFLLALMFLGLQRRQAPTGLGLLQAERWETTSCADTQSSHLHEDRTARVSQPS

SEQ ID NO: 9383 - protein, 508 aa, Homo sapiens
MGTQEGWCLLLCLALSGAAETKPHPAEGQWRAVDVVLDCFLAKDGAHRGALASSEDRARASLVLKQVPVLDDGSLEDFTDFQGGTLAQDDPPIIFEASVDLVQIPQAEALLHADCSGKEVTCEISRYFLQMTETTVKTAAWFMANMQVSGGGPSISLVMKTPRVTKNEALWHPTLNLPLSPQGTVRTAVEFQVMTQTQSLSFLLGSSASLDCGFSMAPGLDLISVEWRLQHKGRGQLVYSWTAGQGQAVRKGATLEPAQLGMARDASLTLPGLTIQDEGTYICQITTSLYRAQQIIQLNIQASPKVRLSLANEALLPTLICDIAGYYPLDVVVTWTREELGGSPAQVSGASFSSLRQSVAGTYSISSSLTAEPGSAGATYTCQVTHISLEEPLGASTQVVPPERRTALGVIFASSLFLLALMFLGLQRRQEASAFLHCAPWAHAPRQRTGRSEGTRRRQNVQMEDKTKEPAPTGLGLLQAERWETTSCADTQSSHLHEDRTARVSQPS

SEQ ID NO: 9384 - protein, 367 aa, Homo sapiens
MGTQEGWCLLLCLALSGAAETKPHPAEGQWRAVDVVLDCFLAKDGAHRGALASSEDRARASLVLKQVPVLDDGSLEDFTDFQGGTLAQDDPPIIFEASVDLVQIPQAEALLHADCSGKEVTCEISRYFLQMTETTVKTAAWFMANMQVSGGGPSISLVMKTPRVTKNEALWHPTLNLPLSPQGTVRTAVEFQVMTQTQSLSFLLGSSASLDCGFSMAPGLDLISVEWRLQHKGRGQLVYSWTAGQGQAVRKGATLEPAQLGMARDASLTLPGLTIQDEGTYICQITTSLYRAQQIIQLNIQERRTALGVIFASSLFLLALMFLGLQRRQAPTGLGLLQAERWETTSCADTQSSHLHEDRTARVSQPS

SEQ ID NO: 9385 - protein, 262 aa, Homo sapiens
MGTQEGWCLLLCLALSGAAETKPHPAEGQWRAVDVVLDCFLAKDGAHRGALASSEDRARASLVLKQVPVLDDGSLEDFTDFQGGTLAQDDPPIIFEASVDLVQIPQAEALLHADCSGKEVTCEISRYFLQMTETTVKTAAWFMANMQVSGGGPSISLVMKTPRVTKNEALWHPTLNLPLSPQGTVRTAVEFQVMTQTQSLSFLLGSSASLDCGFSMAPGLDLISVEWRLQHKGRGRGDLHLPDHHLSVPSSADHPAQHPSFP

SEQ ID NO: 9386 - protein, 254 aa, Homo sapiens
MGTQEGWCLLLCLALSGAAETKPHPAEGQWRAVDVVLDCFLAKDGAHRGALASSEDRARASLVLKQVPVLDDGSLEDFTDFQGGTLAQDDPPIIFEASVDLVQIPQAEALLHADCSGKEVTCEISRYFLQMTETTVKTAAWFMANMQVSGGGPSISLVMKTPRVTKNEALWHPTLNLPLSPQGTVRTAERRTALGVIFASSLFLLALMFLGLQRRQAPTGLGLLQAERWETTSCADTQSSHLHEDRTARVSQPS

SEQ ID NO: 9387 - protein, 297 aa, Homo sapiens
MGTQEGWCLLLCLALSGAAETKPHPAEGQWRAVDVVLDCFLAKDGAHRGALASSEDRARASLVLKQVPVLDDGSLEDFTDFQGGTLAQDDPPIIFEASVDLVQIPQAEALLHADCSGKEVTCEISRYFLQMTETTVKTAAWFMANMQVSGGGPSISLVMKTPRVTKNEALWHPTLNLPLSPQGTVRTAVEFQVMTQTQSLSFLLGSSASLDCGFSMAPGLDLISVEWRLQHKGRGRGDLHLPDHHLSVPSSADHPAQHPRAENSLGSHLCQQSLPSCTDVPGASETASTYRTWAASG

SEQ ID NO: 9388 - protein, 509 aa, Homo sapiens
MGTQEGWCLLLCLALSGAAETKPHPAEGQWRAVDVVLDCFLAKDGAHRGALASSEDRARASLVLKQVPVLDDGSLEDFTDFQGGTLAQDDPPIIFEASVDLVQIPQAEALLHADCSGKEVTCEISRYFLQMTETTVKTAAWFMANMQVSGGGPSISLVMKTPRVTKNEALWHPTLNLPLSPQGTVRTAVEFQVMTQTQSLSFLLGSSASLDCGFSMAPGLDLISVEWRLQHKGRGQLVYSWTAGQGQAVRKGATLEPAQLGMARDASLTLPGLTIQDEGTYICQITTSLYRAQQIIQLNIQASPKVRLSLANEALLPTLICDIAGYYPLDVVVTWTREELGGSPAQVSGASFSSLRQSVAGTYSISSSLTAEPGSAGATYTCQVTHISLEEPLGASTQVVPPERRTALGVIFASSLFLLALMFLGLQRRQEASAFLHCAPWAHAPRQRTGRSEGTRRRQNVQMEDKTKEPGWWCDGRKTKLEEMEKEQVRDNEAWVGAGLPLPNSALSK

SEQ ID NO: 9389 - protein, 289 aa, Homo sapiens
MEPAAGIQRRSSQGPTVPPPPRGHAPPAAAPGPAPLSSPVREPPQLEEERQVRISESGQFSDGLEDRGLLESSTRLKPHEAQNYRKKALWVSWFSIIVTLALAVAAFTVSVMRYSASAFGFAFDAILDVLSSAIVLWRYSNAAAVHSAHREYIACVILGVIFLLSSICIVVKAIHDLSTRLLPEVDDFLFSVSILSGILCSILAVLKFMLGKVLTSRALITDGFNSLVGGVMGFSILLSAEVFKHDSAVWYLDGSIGVLIGLTIFAYGVKLLIDMVPRVRQTRHYEMFE

SEQ ID NO: 9390 - protein, 102 aa, Homo sapiens
MLPVSRTCLLESSTRLKPHEAQNYRKKALWVSWFSIIVTLALAVAAFTVSVMRYSASAFGFAFDAILDVLSSAIVLWRYSNAAAVHSAHREYMTISCSVSPF

SEQ ID NO: 9391 - protein, 81 aa, Homo sapiens
MLGKVLTSRALITDGFNSLVGGVMGFSILLSAEVFKHDSAVWYLDGSIGVLIGLTIFAYGVKLLIDMVPRVRQTRHYEMFE

SEQ ID NO: 9392 - protein, 370 aa, Homo sapiens
MSASAATGVFVLSLSAIPVTYVFNHLAAQHDSWTIVGVAALILFLVALLARVLVKRKPPRDPLFYVYAVFGFTSVVNLIIGLEQDGIIDGFMTHYLREGEPYLNTAYGHMICYWDGSAHYLMYLVMVAAIAWEETYRTIGLYWVGSIIMSVVVFVPGNIVGKYGTRICPAFFLSIPYTCLPVWAGFRIYNQPSENYNYPSKVIQEAQAKDLLRRPFDLMLVVCLLLATGFCLFRGLIALDCPSELCRLYTQFQEPYLKDPAAYPKIQMLAYMFYSVPYFVTALYGLVVPGCSWMPDITLIHAGGLAQAQFSHIGASLHARTAYVYRVPEEAKILFLALNIAYGVLPQLLAYRCIYKPEFFIKTKAEEKVE

SEQ ID NO: 9393 - protein, 339 aa, Homo sapiens
MSASAATGVFVLSLSAIPVTYVFNHLAAQHDSWTIVGVAALILFLVALLARVLVKRKPPRDPLFYVYAVFGFTSVVNLIIGLEQDGIIDGFMTHYLREGEPYLNTAYGHMICYWDGSAHYLMYLVMVAAIAWEETYRTIGLYWVGSIIMSVVVFVPGNIVGKYGTRICPAFFLSIPYTCLPVWAGFRIYNQPSENYNYPSKVIQEAQAKDLLRRPFDLMLVVCLLLATGFCLFRGLMLAYMFYSVPYFVTALYGLVVPGCSWMPDITLIHAGGLAQAQFSHIGASLHARTAYVYRVPEEAKILFLALNIAYGVLPQLLAYRCIYKPEFFIKTKAEEKVE

SEQ ID NO: 9394 - protein, 266 aa, Homo sapiens
MEGSPAGPIEQKEARWESSWEEQPDWTLGCLSPESQFRIPGLPGCILSFQLKVCFLPVMWLFILLSLALISDAMVMDEKVKRSFVLDTASAICNYNAHYKNHPKYWCRGYFRDYCNIIAFSPNSTNHVALRDTGNQLIVTMSCLTKEDTGWYWCGIQRDFARDDMDFTELIVTDDKGTLANDFWSGKDLSGNKTRSCKAPKVVRKADRSRTSILIICILITGLGIISVISHLTKRRRSQRNRRVGNTLKPFSRVLTPKEMAPTEQM

SEQ ID NO: 9395 - protein, 347 aa, Homo sapiens
MPNNSTALSLANVTYITMEIFIGLCAIVGNVLVICVVKLNPSLQTTTFYFIVSLALADIAVGVLVMPLAIVVSLGITIHFYSCLFMTCLLLIFTHASIMSLLAIAVDRYLRVKLTVRFRIPGLPGCILSFQLKVCFLPVMWLFILLSLALISDAMVMDEKVKRSFVLDTASAICNYNAHYKNHPKYWCRGYFRDYCNIIAFSPNSTNHVALRDTGNQLIVTMSCLTKEDTGWYWCGIQRDFARDDMDFTELIVTDDKGTLANDFWSGKDLSGNKTRSCKAPKVVRKADRSRTSILIICILITGLGIISVISHLTKRRRSQRNRRVGNTLKPFSRVLTPKEMAPTEQM

SEQ ID NO: 9396 - protein, 321 aa, Homo sapiens
MALGACGLLLLLAVPGVSLRTLQPGCGRPQVSDAGGRIVGGHAAPAGAWPWQASLRLRRMHVCGGSLLSPQWVLTAAHCFSGSLNSSDYQVHLGELEITLSPHFSTVRQIILHSSPSGQPGTSGDIALVELSVPVTLSSRILPVCLPEASDDFCPGIRCWVTGWGYTREGEPLPPPYSLREVKVSVVDTETCRRDYPGPGGSILQPDMLCARGPGDACQDDSGGPLVCQVNGAWVQAGTVSWGEGCGRPNRPGVYTRVPAYVNWIRRHITASGGSESGYPRLPLLAGLFLPGLFLLLVSCVLLAKCLLHPSADGTPFPAPD

SEQ ID NO: 9397 - protein, 1077 aa, Homo sapiens
MPRRKQQAPRRSAAYVPEEELKAAEIDEEHVEDDGLSLDIQESEYMCNEETEIKEAQSYQNSPVSSATNQDAGYGSPFSESSDQLAHFKGSSSREEKEDPQCPDSVSYPQDSLAQIKAVYANLFSESCWSSLALDLKKSGSTTSTNDASQKESSAPTPTPPTCPVSTTGPTTSTPSTSCSSSTSHSSTTSTSSSSGYDWHQAALAKTLQQTSSYGLLPEPSLFSTVQLYRQNNKLYGSVFTGASKFRCKDCSAAYDTLVELTVHMNETGHYRDDNRDKDSEKTKRWSKPRKRSLMEMEGKEDAQKVLKCMYCGHSFESLQDLSVHMIKTKHYQKVPLKEPVPAITKLVPSTKKRALQDLAPPCSPEPAGMAAEVALSESAKDQKAANPYVTPNNRYGYQNGASYTWQFEARKAQILKCMECGSSHDTLQQLTAHMMVTGHFLKVTTSASKKGKQLVLDPVVEEKIQSIPLPPTTHTRLPASSIKKQPDSPAGSTTSEEKKEPEKEKPPVAGDAEKIKEESEDSLEKFEPSTLYPYLREEDLDDSPKGGLDILKSLENTVSTAISKAQNGAPSWGGYPSIHAAYQLPGTVKPLPAAVQSVQVQPSYAGGVKSLSSAEHNALLHSPGSLTPPPHKSNVSAMEELVEKVTGKVNIKKEERPPEKEKSSLAKAASPIAKENKDFPKTEEVSGKPQKKGPEAETGKAKKEGPLDVHTPNGTEPLKAKVTNGCNNLGIIMDHSPEPSFINPLSALQSIMNTHLGKVSKPVSPSLDPLAMLYKISNSMLDKPVYPATPVKQADAIDRYYYENSDQPIDLTKSKNKPLVSSVADSVASPLRESALMDISDMVKNLTGRLTPKSSTPSTVSEKSDADGSSFEEALDELSPVHKRKGRQSNWNPQHLLILQAQFASSLRETTEGKYIMSDLGPQERVHISKFTGLSMTTISHWLANVKYQLRRTGGTKFLKNLDTGHPVFFCNDCASQFRTASTYISHLETHLGFSLKDLSKLPLNQIQEQQNVSKVLTNKTLGPLGATEEDLGSTFQCKLCNRTFASKHAVKLHLSKTHGKSPEDHLIYVTELEKQ

SEQ ID NO: 9398 - protein, 1032 aa, Homo sapiens
MCNEETEIKEAQSYQNSPVSSATNQDAGYGSPFSESSDQLAHFKGSSSREEKEDPQCPDSVSYPQDSLAQIKAVYANLFSESCWSSLALDLKKSGSTTSTNDASQKESSAPTPTPPTCPVSTTGPTTSTPSTSCSSSTSHSSTTSTSSSSGYDWHQAALAKTLQQTSSYGLLPEPSLFSTVQLYRQNNKLYGSVFTGASKFRCKDCSAAYDTLVELTVHMNETGHYRDDNRDKDSEKTKRWSKPRKRSLMEMEGKEDAQKVLKCMYCGHSFESLQDLSVHMIKTKHYQKVPLKEPVPAITKLVPSTKKRALQDLAPPCSPEPAGMAAEVALSESAKDQKAANPYVTPNNRYGYQNGASYTWQFEARKAQILKCMECGSSHDTLQQLTAHMMVTGHFLKVTTSASKKGKQLVLDPVVEEKIQSIPLPPTTHTRLPASSIKKQPDSPAGSTTSEEKKEPEKEKPPVAGDAEKIKEESEDSLEKFEPSTLYPYLREEDLDDSPKGGLDILKSLENTVSTAISKAQNGAPSWGGYPSIHAAYQLPGTVKPLPAAVQSVQVQPSYAGGVKSLSSAEHNALLHSPGSLTPPPHKSNVSAMEELVEKVTGKVNIKKEERPPEKEKSSLAKAASPIAKENKDFPKTEEVSGKPQKKGPEAETGKAKKEGPLDVHTPNGTEPLKAKVTNGCNNLGIIMDHSPEPSFINPLSALQSIMNTHLGKVSKPVSPSLDPLAMLYKISNSMLDKPVYPATPVKQADAIDRYYYENSDQPIDLTKSKNKPLVSSVADSVASPLRESALMDISDMVKNLTGRLTPKSSTPSTVSEKSDADGSSFEEALDELSPVHKRKGRQSNWNPQHLLILQAQFASSLRETTEGKYIMSDLGPQERVHISKFTGLSMTTISHWLANVKYQLRRTGGTKFLKNLDTGHPVFFCNDCASQFRTASTYISHLETHLGFSLKDLSKLPLNQIQEQQNVSKVLTNKTLGPLGATEEDLGSTFQCKLCNRTFASKHAVKLHLSKTHGKSPEDHLIYVTELEKQ

SEQ ID NO: 9399 - protein, 729 aa, Homo sapiens
MGGFLPKAEGPGSQLQKLLPSFLVREQDWDQHLDKLHMLQQKRILESPLLRASKENDLSVLRQLLLDCTCDVRQRGALGETALHIAALYDNLEAALVLMEAAPELVFEPTTCEAFAGQTALHIAVVNQNVNLVRALLTRRASVSARATGTAFRRSPRNLIYFGEHPLSFAACVNSEEIVRLLIEHGADIRAQDSLGNTVLHILILQPNKTFACQMYNLLLSYDGHGDHLQPLDLVPNHQGLTPFKLAGVEGNTVMFQHLMQKRRHIQWTYGPLTSILYDLTEIDSWGEELSFLELVVSSDKREARQILEQTPVKELVSFKWNKYGRPYFCILAALYLLYMICFTTCCVYRPLKFRGGNRTHSRDITILQQKLLQEAYETREDIIRLVGELVSIVGAVIILLLEIPDIFRVGASRYFGKTILGGPFHVIIITYASLVLVTMVMRLTNTNGEVVPMSFALVLGWCSVMYFTRGFQMLGPFTIMIQKMIFGDLMRFCWLMAVVILGFASAFYIIFQTEDPTSLGQFYDYPMALFTTFELFLTVIDAPANYDVDLPFMFSIVNFAFAIIATLLMLNLFIAMMGDTHWRVAQERDELWRAQVVATTVMLERKLPRCLWPRSGICGCEFGLGDRWFLRVENHNDQNPLRVLRYVEVFKNSDKEDDQEHPSEKQPSGAESGTLARASLALPTSSLSRTASQSSSHRGWEILRQNTLGHLNLGLNLSEGDGEEVYHF

SEQ ID NO: 9400 - protein, 381 aa, Homo sapiens [sequence omitted]

SEQ ID NO: 9401 - protein, 839 aa, Homo sapiens
MGPRAKTISSLFFLLWVLAEPAENSDFYLPGDYLLGGLFSLHANMKGIVHLNFLQVPMCKEYEVKVIGYNLMQAMRFAVEEINNDSSLLPGVLLGYEIVDVCYISNNVQPVLYFLAHEDNLLPIQEDYSNYISRVVAVIGPDNSESVMTVANFLSLFLLPQITYSAISDELRDKVRFPALLRTTPSADHHIEAMVQLMLHFRWNWIIVLVSSDTYGRDNGQLLGERVARRDICIAFQETLPTLQPNQNMTSEERQRLVTIVDKLQQSTARVVVVFSPDLTLYHFFNEVLRQNFTGAVWIASESWAIDPVLHNLTELRHLGTFLGITIQSVPIPGFSEFREWGPQAGPPPLSRTSQSYTCNQECDNCLNATLSFNTILRLSGERVVYSVYSAVYAVAHALHSLLGCDKSTCTKRVVYPWQLLEEIWKVNFTLLDHQIFFDPQGDVALHLEIVQWQWDRSQNPFQSVASYYPLQRQLKNIQDISWHTINNTIPMSMCSKRCQSGQKKKPVGIHVCCFECIDCLPGTFLNHTEDEYECQACPNNEWSYQSETSCFKRQLVFLEWHEAPTIAVALLAALGFLSTLAILVIFWRHFQTPIVRSAGGPMCFLMLTLLLVAYMVVPVYVGPPKVSTCLCRQALFPLCFTICISCIAVRSFQIVCAFKMASRFPRAYSYWVRYQGPYVSMAFITVLKMVIVVIGMLATGLSPTTRTDPDDPKITIVSCNPNYRNSLLFNTSLDLLLSVVGFSFAYMGKELPTNYNEAKFITLSMTFYFTSSVSLCTFMSAYSGVLVTIVDLLVTVLNLLAISLGYFGPKCYMILFYPERNTPAYFNSMIQGYTMRRD

SEQ ID NO: 9402 - protein, 524 aa, Homo sapiens
  MOD_RES (523)..(523): Selenocysteine
MAAMAVALRGLGGRFRWRTQAVAGGVRGAARGAAAGQRDYDLLVVGGGSGGLACAKEAAQLGRKVAVVDYVEPSPQGTRWGLGGTCVNVGCIPKKLMHQAALLGGLIQDAPNYGWEVAQPVPHDWRKMAEAVQNHVKSLNWGHRVQLQDRKVKYFNIKASFVDEHTVCGVAKGGKEILLSADHIIIATGGRPRYPTHIEGALEYGITSDDIFWLKESPGKTLVVGASYVALECAGFLTGIGLDTTIMMRSIPLRGFDQQMSSMVIEHMASHGTRFLRGCAPSRVRRLPDGQLQVTWEDSTTGKEDTGTFDTVLWAIGRVPDTRSLNLEKAGVDTSPDTQKILVDSREATSVPHIYAIGDVVEGRPELTPIAIMAGRLLVQRLFGGSSDLMDYDNVPTTVFTPLEYGCVGLSEEEAVARHGQEHVEVYHAHYKPLEFTVAGRDASQCYVKMVCLREPPQLVLGLHFLGPNAGEVTQGFALGIKCGASYAQVMRTVGIHPTCSEEVVKLRISKRSGLDPTVTGCXG

SEQ ID NO: 9403 - protein, 498 aa, Homo sapiens
  MOD_RES (497)..(497): Selenocysteine
MEDQRGAAAGQRDYDLLVVGGGSGGLACAKEAAQLGRKVAVVDYVEPSPQGTRWGLGGTCVNVGCIPKKLMHQAALLGGLIQDAPNYGWEVAQPVPHDWRKMAEAVQNHVKSLNWGHRVQLQDRKVKYFNIKASFVDEHTVCGVAKGGKEILLSADHIIIATGGRPRYPTHIEGALEYGITSDDIFWLKESPGKTLVVGASYVALECAGFLTGIGLDTTIMMRSIPLRGFDQQMSSMVIEHMASHGTRFLRGCAPSRVRRLPDGQLQVTWEDSTTGKEDTGTFDTVLWAIGRVPDTRSLNLEKAGVDTSPDTQKILVDSREATSVPHIYAIGDVVEGRPELTPIAIMAGRLLVQRLFGGSSDLMDYDNVPTTVFTPLEYGCVGLSEEEAVARHGQEHVEVYHAHYKPLEFTVAGRDASQCYVKMVCLREPPQLVLGLHFLGPNAGEVTQGFALGIKCGASYAQVMRTVGIHPTCSEEVVKLRISKRSGLDPTVTGCXG

SEQ ID NO: 9404 - protein, 428 aa, Homo sapiens
  MOD_RES (427)..(427): Selenocysteine
MHQAALLGGLIQDAPNYGWEVAQPVPHDWRKMAEAVQNHVKSLNWGHRVQLQDRKVKYFNIKASFVDEHTVCGVAKGGKEILLSADHIIIATGGRPRYPTHIEGALEYGITSDDIFWLKESPGKTLVVGASYVALECAGFLTGIGLDTTIMMRSIPLRGFDQQMSSMVIEHMASHGTRFLRGCAPSRVRRLPDGQLQVTWEDSTTGKEDTGTFDTVLWAIGRVPDTRSLNLEKAGVDTSPDTQKILVDSREATSVPHIYAIGDVVEGRPELTPIAIMAGRLLVQRLFGGSSDLMDYDNVPTTVFTPLEYGCVGLSEEEAVARHGQEHVEVYHAHYKPLEFTVAGRDASQCYVKMVCLREPPQLVLGLHFLGPNAGEVTQGFALGIKCGASYAQVMRTVGIHPTCSEEVVKLRISKRSGLDPTVTGCXG

SEQ ID NO: 9405 - protein, 277 aa, Homo sapiens
  MOD_RES (276)..(276): Selenocysteine
MRSIPLRGFDQQMSSMVIEHMASHGTRFLRGCAPSRVRRLPDGQLQVTWEDSTTGKEDTGTFDTVLWAIGRVPDTRSLNLEKAGVDTSPDTQKILVDSREATSVPHIYAIGDVVEGRPELTPIAIMAGRLLVQRLFGGSSDLMDYDNVPTTVFTPLEYGCVGLSEEEAVARHGQEHVEVYHAHYKPLEFTVAGRDASQCYVKMVCLREPPQLVLGLHFLGPNAGEVTQGFALGIKCGASYAQVMRTVGIHPTCSEEVVKLRISKRSGLDPTVTGCXG

SEQ ID NO: 9406 - protein, 765 aa, Homo sapiens
MGPLQGDGGPALGGADVAPRLSPVRVWPRPQAPKEPALHPMGLSLPKEKGLILCLWSKFCRWFQRRESWAQSRDEQNLLQQKRIWESPLLLAAKDNDVQALNKLLKYEDCKVHQRGAMGETALHIAALYDNLEAAMVLMEAAPELVFEPMTSELYEGQTALHIAVVNQNMNLVRALLARRASVSARATGTAFRRSPCNLIYFGEHPLSFAACVNSEEIVRLLIEHGADIRAQDSLGNTVLHILILQPNKTFACQMYNLLLSYDRHGDHLQPLDLVPNHQGLTPFKLAGVEGNTVMFQHLMQKRKHTQWTYGPLTSTLYDLTEIDSSGDEQSLLELIITTKKREARQILDQTPVKELVSLKWKRYGRPYFCMLGAIYLLYIICFTMCCIYRPLKPRTNNRTSPRDNTLLQQKLLQEAYMTPKDDIRLVGELVTVIGAIIILLVEVPDIFRMGVTRFFGQTILGGPFHVLIITYAFMVLVTMVMRLISASGEVVPMSFALVLGWCNVMYFARGFQMLGPFTIMIQKMIFGDLMRFCWLMAVVILGFASAFYIIFQTEDPEELGHFYDYPMALFSTFELFLTIIDGPANYNVDLPFMYSITYAAFAIIATLLMLNLLIAMMGDTHWRVAHERDELWRAQIVATTVMLERKLPRCLWPRSGICGREYGLGDRWFLRVEDRQDLNRQRIQRYAQAFHTRGSEDLDKDSVEKLELGCPFSPHLSLPMPSVSRSTSRSSANWERLRQGTLRRDLRGIINRGLEDGESWEYQI

SEQ ID NO: 9407 - protein, 597 aa, Homo sapiens
MGPLQGDGGPALGGADVAPRLSPVRVWPRPQAPKEPALHPMGLSLPKEKGLILCLWSKFCRWFQDSLGNTVLHILILQPNKTFACQMYNLLLSYDRHGDHLQPLDLVPNHQGLTPFKLAGVEGNTVMFQHLMQKRKHTQWTYGPLTSTLYDLTEIDSSGDEQSLLELIITTKKREARQILDQTPVKELVSLKWKRYGRPYFCMLGAIYLLYIICFTMCCIYRPLKPRTNNRTSPRDNTLLQQKLLQEAYMTPKDDIRLVGELVTVIGAIIILLVEVPDIFRMGVTRFFGQTILGGPFHVLIITYAFMVLVTMVMRLISASGEVVPMSFALVLGWCNVMYFARGFQMLGPFTIMIQKMIFGDLMRFCWLMAVVILGFASAFYIIFQTEDPEELGHFYDYPMALFSTFELFLTIIDGPANYNVDLPFMYSITYAAFAIIATLLMLNLLIAMMGDTHWRVAHERDELWRAQIVATTVMLERKLPRCLWPRSGICGREYGLGDRWFLRVEDRQDLNRQRIQRYAQAFHTRGSEDLDKDSVEKLELGCPFSPHLSLPMPSVSRSTSRSSANWERLRQGTLRRDLRGIINRGLEDGESWEYQI

SEQ ID NO: 9408 - protein, 698 aa, Homo sapiens
MMRSRSKSPRRPSPTARGANCDVELLKTTTRDREELKCMLEKYERHLAEIQGNVKVLKSERDKIFLLYEQAQEEITRLRREMMKSCKSPKSTTAHAILRRVETERDVAFTDLRRMTTERDSLRERLKIAQETAFNEKAHLEQRIEELECTVHNLDDERMEQMSNMTLMKETISTVEKEMKSLARKAMDTESELGRQKAENNSLRLLYENTEKDLSDTQRHLAKKKYELQLTQEKIMCLDEKIDNFTRQNIAQREEISILGGTLNDLAKEKECLQACLDKKSENIASLGESLAMKEKTISGMKNIIAEMEQASRQCTEALIVCEQDVSRMRRQLDETNDELAQIARERDILAHDNDNLQEQFAKAKQENQALSKKLNDTHNELNDIKQKVQDTNLEVNKLKNILKSEESENRQMMEQLRKANEDAENWENKARQSEADNNTLKLELITAEAEGNRLKEKVDSLNREVEQHLNAERSYKSQISTLHKSVVKMEEELQKVQFEKVSALADLSSTRELCIKLDSSKELLNRQLVAKDQEIEMRENELDSAHSEIELLRSQMANERISMQNLEALLVANRDKEYQSQIALQEKESEIQLLKEHLCLAENKMAIQSRDVAQFRNVVTQLEADLDITKRQLGTERFERERAVQELRRQNYSSNAYHMSSTMKPNTKCHSPERAHHRSPDRGLDRSLEENLCYRDF

SEQ ID NO: 9409 - protein, 297 aa, Homo sapiens
MMRSRSKSPRRPSPTARGANCDVELLKTTTRDREELKCMLEKYERHLAEIQGNVKVLKSERDKIFLLYEQAQEEITRLRREMMKSCKSPKSTTAHAILRRVETERDVAFTDLRRMTTERDSLRERLKIAQETAFNEKAHLEQRIEELECTVHNLDDERMEQMSNMTLMKETISTVEKEMKSLARKAMDTESELGRQKAENNSLRLLYENTEKDLSDTQRHLAKKKYELQLTQEKIMCLDEKIDNFTRQNIAQREEISILGGTLNDLAKEKECLQACLDKKSENIASLGESLAMKTVY

SEQ ID NO: 9410 - protein, 189 aa, Homo sapiens
MGTPNDQAVLQAIFNPDTPFGDIVGLDLGEEAEKEEREEDEVFPQAQLEQSKALELQGVMAAEAGDLSTALERFGQAICLLPERASAYNNRAQARRLQGDVAGALEDLERAVELSGGRGRAARQSFVQRGLLARLQGRDDDARRDFERAARLGSPFARRQLVLLNPYAALCNRMLADMMGQLRRPRDSR

SEQ ID NO: 9411 - protein, 130 aa, Homo sapiens
MAAEAGDLSTALERFGQAICLLPERASAYNNRAQARRLQGDVAGALEDLERAVELSGGRGRAARQSFVQRGLLARLQGRDDDARRDFERAARLGSPFARRQLVLLNPYAALCNRMLADMMGQLRRPRDSR

SEQ ID NO: 9412 - protein, 387 aa, Homo sapiens
MEQPGQDPTSDDVMDSFLEKFQSQPYRGGFHEDQWEKEFEKVPLFMSRAPSEIDPRENPDLACLQSIIFDEERSPEEQAKTYKDEGNDYFKEKDYKKAVISYTEGLKKKCADPDLNAVLYTNRAAAQYYLGNFRSALNDVTAARKLKPCHLKAIIRGALCHLELKHFAEAVNWCDEGLQIDAKEKKLLEMRAKADKLKRIEQRDVRKANLKEKKERNQNEALLQAIKARNIRLSEAACEDEDSASEGLGELFLDGLSTENPHGARLSLDGQGRLSWPVLFLYPEYAQSDFISAFHEDSRFIDHLMVMFGETPSWDLEQKYCPDNLEVYFEDEDRAELYRVPAKSTLLQVLQHQRYFVKALTPAFLVCVGSSPFCKNFLRGRKVYQIR

SEQ ID NO: 9413 - protein, 308 aa, Homo sapiens
MRPEGSLTYRVPERLRQGSCGVGRAAQALVCASAKEGTAFRMEAVQEGAAGVESEQAALGEEAVLLLDDIMAEVEVVAEEEGLVERREEAQRAQQAVPGPGPMTPESALEELLAVQVELEPVNAQARKAFSRQREKMERRRKPHLDRRGAVIQSVPGFWANVIANHPQMSALITDEDEDMLSYMVSLEVEEEKHRVHLCKIMLFFRSNPYFQNKVITKEYLVNITEYRASHSTPIEWYPDYEVEAYRRRHHNSSLNFFNWFSDHNFAGSNKIAEILCKDLWRNPLQYYKRMKPPEEGTETSGDSQLLS

SEQ ID NO: 9414 - protein, 414 aa, Homo sapiens
MSGLDGGNKLPLAQTGGLAAPDHASGDPDRDQCQGLREETEATQVMANTGGGSLETVAEGGASQDPVDCGPALRVPVAGSRGGAATKAGQEDAPPSTKGLEAASAAEAADSSQKNGCQLGEPRGPAGQKALEACGAGGLGSQMIPGKKAKEVTTKKRAISAAVEKEGEAGAAMEEKKVVQKEKKVAGGVKEETRPRAPKINNCMDSLEAIDQELSNVNAQADRAFLQLERKFGRMRRLHMQRRSFIIQNIPGFWVTAFRNHPQLSPMISGQDEDMLRYMINLEVEELKHPRAGCKFKFIFQGNPYFRNEGLVKEYERRSSGRVVSLSTPIRWHRGQDPQAHIHRNREGNTIPSFFNWFSDHSLLEFDRIAEIIKGELWPNPLQYYLMGEGPRRGIRGPPRQPVESARSFRFQSG

SEQ ID NO: 9415 - protein, 328 aa, Homo sapiens
MGKGDVLEAAPTTTAYHSLMDEYGYEVGKAIGHGSYGSVYEAFYTKQKVMVAVKIISKKKASDDYLNKFLPREIQVMKVLRHKYLINFYRAIESTSRVYIILELAQGGDVLEWIQRYGACSEPLAGKWFSQLTLGIAYLHSKSIVHRDLKLENLLLDKWENVKISDFGFAKMVPSNQPVGCSPSYRQVNCFSHLSQTYCGSFAYACPEILRGLPYNPFLSDTWSMGVILYTLVVAHLPFDDTNLKKLLRETQKEVTFPANHTISQECKNLILQMLRQATKRATILDIIKDSWVLKFQPEQPTHEIRLLEAMCQLHNTTKQHQSLQITT

SEQ ID NO: 9416 - protein, 338 aa, Homo sapiens
MGKGDVLEAAPTTTAYHSLMDEYGYEVGKAIGHGSYGSVYEAFYTKQKVMVAVKIISKKKASDDYLNKFLPREIQVMKVLRHKYLINFYRAIESTSRVYIILELAQGGDVLEWIQRYGACSEPLAGKWFSQLTLGIAYLHSKSIVHRLMPSLSAAGRDLKLENLLLDKWENVKISDFGFAKMVPSNQPVGCSPSYRQVNCFSHLSQTYCGSFAYACPEILRGLPYNPFLSDTWSMGVILYTLVVAHLPFDDTNLKKLLRETQKEVTFPANHTISQECKNLILQMLRQATKRATILDIIKDSWVLKFQPEQPTHEIRLLEAMCQLHNTTKQHQSLQITT

SEQ ID NO: 9417 - protein, 252 aa, Homo sapiens
MKVLRHKYLINFYRAIESTSRVYIILELAQGGDVLEWIQRYGACSEPLAGKWFSQLTLGIAYLHSKSIVHRDLKLENLLLDKWENVKISDFGFAKMVPSNQPVGCSPSYRQVNCFSHLSQTYCGSFAYACPEILRGLPYNPFLSDTWSMGVILYTLVVAHLPFDDTNLKKLLRETQKEVTFPANHTISQECKNLILQMLRQATKRATILDIIKDSWVLKFQPEQPTHEIRLLEAMCQLHNTTKQHQSLQITT

SEQ ID NO: 9418 - protein, 530 aa, Homo sapiens
MEEDSLYLGGEWQFNHFSKLTSSRLDAAFAEIQRTSLPEKSPLSCETRVDLCDDLVPEARQLAPREKLPLSSRRPAAVGAGLQNMGNTCYVNASLQCLTYTPPLANYMLSREHSQTCHRHKGCMLCTMQAHITRALHNPGHVIQPSQALAAGFHRGKQEDAHEFLMFTVDAMKKACLPGHKQVDHPSKDTTLIHQIFGGYWRSQIKCLHCHGISDTFDPYLDIALDIQAAQSVQQALEQLVKPEELNGENAYHCGVCLQRAPASKTLTLHTSAKVLILVLKRFSDVTGNKIAKNVQYPECLDMQPYMSQQNTGPLVYVLYAVLVHAGWSCHNGHYFSYVKAQEGQWYKMDDAEVTAASITSVLSQQAYVLFYIQKSEWERHSESVSRGREPRALGAEDTDRRATQGELKRDHPCLQAPELDEHLVERATQESTLDRWKFLQEQNKTKPEFNVRKVEGTLPPDVLVIHQSKYKCGMKNHHPEQQSSLLNLSSSTPTHQESMNTGTLASLRGRARRSKGKNKHSKRALLVCQ

SEQ ID NO: 9419 - protein, 161 aa, Homo sapiens
MLMPVHFLLLLLLLLGGPRTGLPHKFYKAKPIFSCLNTALSEAEKGQWEDASLLSKRSFHYLRSRDASSGEEEEGKEKKTFPISGARGGARGTRYRYVSQAQPRGKPRQDTAKSPHRTKFTLSLDVPTNIMNLLFNIAKAKNLRAQAAANAHLMAQIGRKK

SEQ ID NO: 9420 - protein, 309 aa, Homo sapiens
MVGFKATDVPPTATVKFLGAGTAACIADLITFPLDTAKVRLQIQGESQGPVRATASAQYRGVMGTILTMVRTEGPRSLYNGLVAGLQRQMSFASVRIGLYDSVKQFYTKGSEHASIGSRLLAGSTTGALAVAVAQPTDVVKVRFQAQARAGGGRRYQSTVNAYKTIAREEGFRGLWKGTSPNVARNAIVNCAELVTYDLIKDALLKANLMTDDLPCHFTSAFGAGFCTTVIASPVDVVKTRYMNSALGQYSSAGHCALTMLQKEGPRAFYKGFMPSFLRLGSWNVVMFVTYEQLKRALMAACTSREAPF

SEQ ID NO: 9421 - protein, 127 aa, Homo sapiens
MVQIIKDTNEFKTFLTAAGHKLAVVQFSSKRCGPCKRMFPVFHAMSVKYQNVFFANVDVNNSPELAETCHIKTIPTFQMFKKSQKVTLFSRIKRIICCYRSGFMSNLIFEFCGADAKKLEAKTQELM

SEQ ID NO: 9422 - protein, 115 aa, Homo sapiens
MVQIIKDTNEFKTFLTAAGHKLAVVQFSSKRCGPCKRMFPVFHAMSVKYQNVFFANVDVNNSPELAETCHIKTIPTFQMFKKSQKVTLFSRIKRIICCYRSGFMSNLCLADDGNE

SEQ ID NO: 9423 - protein, 154 aa, Homo sapiens [sequence omitted]

SEQ ID NO: 9424 - protein, 122 aa, Homo sapiens
MAASRRLMKDNPPYDKGAFRIEINFPAEYPFKPPKITFKTKIYHPNIDEKGQVCLPVISAENWKPATKTDQVIQSLIALVNDPQPEHPLRADLAEEYSKDRKKFCKNAEEFTKKYGEKRPVD

SEQ ID NO: 9425 - protein, 212 aa, Homo sapiens
MQVAAGTRGDTRLQEVALLPQLFDLLVLGQRRARLLRQVPSALAGKDLAQLQAGATLAGYRRAHGPEELEEIRKCGMKNFRNIQVDEANLLTWQGLIVPDNPPYDKGAFRIEINFPAEYPFKPPKITFKTKIYHPNIDEKGQVCLPVISAENWKPATKTDQVIQSLIALVNDPQPEHPLRADLAEEYSKDRKKFCKNAEEFTKKYGEKRPVD

SEQ ID NO: 9426 - protein, 177 aa, Homo sapiens
MSVNMDELKHQVMINQFVLTAGCAADQAKQLLQAAHWQFETALSAFFQETNIPYSHHHHQMMCTPANTPATPPNFPDALTMFSRLKASESFHSGGSGSPMAATATSPPPHFPHAATSSSAASSWPTAASPPGGPQHHQPQPPLWTPTPPSPASDWPPLAPQQATSEPRAHPAMEAER

SEQ ID NO: 9427 - protein, 212 aa, Homo sapiens
MKLLTLQPPGMLWLMERGGLGKPRGPRHRGLLRVRLGRFISRLLLWEPLGGGQAWGSGEGTQSLPRMGQPRISPWEAVGAPPGRGAHPISPLFPSQMCTPANTPATPPNFPDALTMFSRLKASESFHSGGSGSPMAATATSPPPHFPHAATSSSAASSWPTAASPPGGPQHHQPQPPLWTPTPPSPASDWPPLAPQQATSEPRAHPAMEAER

SEQ ID NO: 9428 - protein, 530 aa, Homo sapiens
MEDDSLYLGGDWQFNHFSKLTSSRLDAAFAEIQRTSLSEKSPLSSETRFDLCDDLAPVARQLAPREKLPLSSRRPAAVGAGLQKIGNTFYVNVSLQCLTYTLPLSNYMLSREDSQTCHLHKCCMFCTMQAHITWALHSPGHVIQPSQVLAAGFHRGEQEDAHEFLMFTVDAMKKACLPGHKQLDHHSKDTTLIHQIFGAYWRSQIKYLHCHGVSDTFDPYLDIALDIQAAQSVKQALEQLVKPKELNGENAYHCGLCLQKAPASKTLTLPTSAKVLILVLKRFSDVTGNKLAKNVQYPKCRDMQPYMSQQNTGPLVYVLYAVLVHAGWSCHNGHYFSYVKAQEGQWYKMDDAEVTASGITSVLSQQAYVLFYIQKSEWERHSESVSRGREPRALGAEDTDRPATQGELKRDHPCLQVPELDEHLVERATQESTLDHWKFPQEQNKTKPEFNVRKVEGTLPPNVLVIHQSKYKCGMKNHHPEQQSSLLNLSSTKPTDQESMNTGTLASLQGSTRRSKGNNKHSKRSLLVCQ

SEQ ID NO: 9429 - protein, 530 aa, Homo sapiens
MARTGWTSPIPLCVSLLLTCGFAEAGKLLVVPMDGSHWFTMQSVVEKLILRGHEVVVVMPEVSWQLGKSLNCTVKTYSTSYTLEDLDREFMDFADAQWKAQVRSLFSLFLSSSNGFFNLFFSHCRSLFNDRKLVEYLKESSFDAVFLDPFDACGLIVAKYFSLPSVVFARGIACHYLEEGAQCPAPLSYVPRILLGFSDAMTFKERVRNHIMHLEEHLFCQYFSKNALEIASEILQTPVTAYDLYSHTSIWLLRTDFVLDYPKPVMPNMIFIGGINCHQGKPLPMEFEAYINASGEHGIVVFSLGSMVSEIPEKKAMAIADALGKIPQTVLWRYTGTRPSNLANNTILVKWLPQNDLLGHPMTRAFITHAGSHGVYESICNGVPMVMMPLFGDQMDNAKRMETKGAGVTLNVLEMTSEDLENALKAVINDKSYKENIMRLSSLHKDRPVEPLDLAVFWVEFVMRHKGAPHLRPAAHDLTWYQYHSLDVIGFLLAVVLTVAFITFKCCAYGYRKCLGKKGRVKKAHKSKTH

SEQ ID NO: 9430 - protein, 441 aa, Homo sapiens
MARTGWTSPIPLCVSLLLTCGFAEAGKLLVVPMDGSHWFTMQSVVEKLILRGHEVVVVMPEVSWQLGKSLNCTVKTYSTSYTLEDLDREFMDFADAQWKAQVRSLFSLFLSSSNGFFNLFFSHCRSLFNDRKLVEYLKESSFDAVFLDPFDACGLIVAKYFSLPSVVFARGIACHYLEEGAQCPAPLSYVPRILLGFSDAMTFKERVRNHIMHLEEHLFCQYFSKNALEIASEILQTPVTAYDLYSHTSIWLLRTDFVLDYPKPVMPNMIFIGGINCHQGKPLPMEFEAYINASGEHGIVVFSLGSMVSEIPEKKAMAIADALGKIPQTVLWRYTGTRPSNLANNTILVKWLPQNDLLGHPMTRAFITHAGSHGVYESICNGVPMVMMPLFGDQMDNAKRMETKGAGVTLNVLEMTSEDLENALKAVINDKRKKQQSGRQM

SEQ ID NO: 9431 - protein, 649 aa, Homo sapiens
MAQYGHPSPLGMAAREELYSKVTPRRNRQQRPGTIKHGSALDVLLSMGFPRARAQKALASTGGRSVQAACDWLFSHVGDPFLDDPLPREYVLYLRPTGPLAQKLSDFWQQSKQICGKNKAHNIFPHITLCQFFMCEDSKVDALGEALQTTVSRWKCKFSAPLPLELYTSSNFIGLFVKEDSAEVLKKFAADFAAEAASKTEVHVEPHKKQLHVTLAYHFQASHLPTLEKLAQNIDVKLGCDWVATIFSRDIRFANHETLQVIYPYTPQNDDELELVPGDFIFMSPMEQTSTSEGWIYGTSLTTGCSGLLPENYITKADECSTWIFHGSYSILNTSSSNSLTFGDGVLERRPYEDQGLGETTPLTIICQPMQPLRVNSQPGPQKRCLFVCRHGERMDVVFGKYWLSQCFDAKGRYIRTNLNMPHSLPQRSGGFRDYEKDAPITVFGCMQARLVGEALLESNTIIDHVYCSPSLRCVQTAHNILKGLQQENHLKIRVEPGLFEWTKWVAGSTLPAWIPPSELAAANLSVDTTYRPHIPISKLVVSESYDTYISRSFQVTKEIISECKSKGNNILIVAHASSLEACTCQLQGLSPQNSKDFVQMVRKIPYLGFCSCEELGETGIWQLTDPPILPLTHGPTGGFNWRETLLQE

SEQ ID NO: 9432 - protein, 703 aa, Homo sapiens
MSARATRPRSRRGRHAPPGELDPVAESSEEVEAASGSSKPSFAPPPVSSGLEQLGPMEEVSGQGLGSRTDKKMDGGSGRELASAPEVPHKPAVEAHQAPEAALQYKETVPPGNGAPDVFQTLQHTLSSLEAAAAAWRHQPPSHSGPMEFEGTSEGGAGSLGKQEGAGSCQREAARLAERNAWLRLALSSREDELVRTQASLEAIRAEKETLQKEVQELQDSLLRLEPCPHLSHNQAGGSGSGSSSSEADREPWETQDSFSLAHPLLRRLRSHSSTQILGSLPNQPLSPEMHIMEAQMEQLRGSIEKLKCFNRLLSAVLQGYKGRCEGLSMQLGQREAEATALHLALQYSEHCEEAYRVLLALREADSGAGDEAPMSDLQAAEKEAWRLLAQEEAAMDAGAQQNPQPSPEGSSVDKPTPQEVAFQLRSYVQRLQERRSLMKILSEPGPTLAPMPTVPRAEAMVQAILGTQAGPALPRLEKTQIQQDLVAAREALADLMLRLQLVRREKRGLELREAALRALGPAHVLLLEQLRWERAELQAGGANSSGGHSSGGGSSGDEEEWYQGLPAVPGGTSGIDGGQVGRAWDPEKLAQELAASLTRTLDLQEQLQSLRRELEQVAQKGRARRSQSAELNRDLCKAHSALVLAFRGAHRKQEEQRRKLEQQMALMEAQQAEEVAVLEATARALGKPRPPLPPPQLGDTFL

SEQ ID NO: 9433 - protein, 68 aa, Homo sapiens
MSARATRPRSRRGRHAPPGELDPVAESSEEVEAASGSSKPSFAPPPVSSGLEQLGPMEEVSGQGLGSR

SEQ ID NO: 9434 - protein, 226 aa, Homo sapiens
MALSDADVQKQIKHMMAFIEQEANEKAEEIDAKAEEEFNIEKGRLVQTQRLKIMEYYEKKEKQIEQQKKIQMSNLMNQARLKVLRARDDLITDLLNEAKQRLSKVVKDTTRYQVLLDGLVLQGLYQLLEPRMIVRCRKQDFPLVKAAVQKAIPMYKIATKNDVDVQIDQESYLPEDIAGGVEIYNGDRKIKVSNTLESRLDLIAQQMMPEVRGALFGANANRKFLD

SEQ ID NO: 9435 - protein, 204 aa, Homo sapiens
MALSDADVQKQAEEEFNIEKGRLVQTQRLKIMEYYEKKEKQIEQQKKIQMSNLMNQARLKVLRARDDLITDLLNEAKQRLSKVVKDTTRYQVLLDGLVLQGLYQLLEPRMIVRCRKQDFPLVKAAVQKAIPMYKIATKNDVDVQIDQESYLPEDIAGGVEIYNGDRKIKVSNTLESRLDLIAQQMMPEVRGALFGANANRKFLD

SEQ ID NO: 9436 - protein, 196 aa, Homo sapiens
MALSDADVQKQIKHMMAFIEQEANEKAEEIDAKAEEEFNIEKGRLVQTQRLKIMEYYEKKEKQIEQQKKIQMSNLMNQARLKVLRARDDLITGLYQLLEPRMIVRCRKQDFPLVKAAVQKAIPMYKIATKNDVDVQIDQESYLPEDIAGGVEIYNGDRKIKVSNTLESRLDLIAQQMMPEVRGALFGANANRKFLD

SEQ ID NO: 9437 - protein, 615 aa, Homo sapiens
MKALRLSASALFCLLLINGLGAAPPGRPEAQPPPLSSEHKEPVAGDAVPGPKDGSAPEVRGARNSEPQDEGELFQGVDPRALAAVLLQALDRPASPPAPSGSQQGPEEEAAEALLTETVRSQTHSLPAPESPEPAAPPRPQTPENGPEASDPSEELEALASLLQELRDFSPSSAKRQQETAAAETETRTHTLTRVNLESPGPERVWRASWGEFQARVPERAPLPPPAPSQFQARMPDSGPLPETHKFGEGVSSPKTHLGEALAPLSKAYQGVAAPFPKARRPESALLGGSEAGERLLQQGLAQVEAGRRQAEATRQAAAQEERLADLASDLLLQYLLQGGARQRGLGGRGLQEAAEERESAREEEEAEQERRGGEERVGEEDEEAAEAEAEAEEAERARQNALLFAEEEDGEAGAEDKRSQEETPGHRRKEAEGTEEGGEEEDDEEMDPQTIDSLIELSTKLHLPADDVVSIIEEVEEKRKRKKNAPPEPVPPPRAAPAPTHVRSPQPPPPAPAPARDELPDWNEVLPPWDREEDEVYPPGPYHPFPNYIRPRTLQPPSALRRRHYHHALPPSRHYPGREAQARRAQEEAEAEERRLQEQEELENYIEHVLLRRP

SEQ ID NO: 9438 - protein, 186 aa, Homo sapiens
MSPKPRASGPPAKATEAGKRKSSSQPSPSDPKKKTTKVAKKGKAVRRGRRGKKGAATKMAAVTAPEAESGPAAPGPSDQPSQELPQHELPPEEPVSEGTQHDPLSQESELEEPLSQESEVEEPLSQESQVEEPLSQESEVEEPLSQESQVEEPLSQESEVEEPLSQESQVEEPLSQESEMEELPSV

SEQ ID NO: 9439 - protein, 217 aa, Homo sapiens
MSSDFEGYEQDFAVLTAEITSKIARVPRLPPDEKKQMVANVEKQLEEAKELLEQMDLEVREIPPQSRGMYSNRMRSYKQEMGKLETDFKRSRIAYSDEVRNELLGDDGNSSENQRAHLLDNTERLERSSRRLEAGYQIAVETEQIGQEMLENLSHDREKIQRARERLRETDANLGKSSRILTGMLRRIIQNRILLVILGIIVVITILMAITFSVRRH

SEQ ID NO: 9440 - protein, 203 aa, Homo sapiens
MSSDFEGYEQDFAVLTAEITSKIARVPRLPPDEKKQMVANVEKQLEEAKELLEQMDLEVREIPPQSRGMYSNRMRSYKQEMGKLETDFKRSRIAYSDEVRNELLGDDGNSSENQRAHLLDNTERLERSSRRLEAGYQIAVETEQIGQEMLENLSHDREKIQRARERLRETDANLGKSSRILTGMLRRGCSVKKQCNLSLAPKA

SEQ ID NO: 9441 - protein, 79 aa, Homo sapiens
MAPQTLLPVLVLCVLLLQAQGGYRDKKRMQKTQLSPEIKVCQQQPKLYLCKHLCESHRDCQANNICCSTYCGNVCMSIL

SEQ ID NO: 9442 - protein, 352 aa, Homo sapiens
MAPLGYFLLLCSLKQALGSYPIWWSLAVGPQYSSLGSQPILCASIPGLVPKQLRFCRNYVEIMPSVAEGIKIGIQECQHQFRGRRWNCTTVHDSLAIFGPVLDKATRESAFVHAIASAGVAFAVTRSCAEGTAAICGCSSRHQGSPGKGWKWGGCSEDIEFGGMVSREFADARENRPDARSAMNRHNNEAGRQAIASHMHLKCKCHGLSGSCEVKTCWWSQPDFRAIGDFLKDKYDSASEMVVEKHRESRGWVETLRPRYTYFKVPTERDLVYYEASPNFCEPNPETGSFGTRDRTCNVSSHGIDGCDLLCCGRGHNARAERRREKCRCVFHWCCYVSCQECTRVYDVHTCK

SEQ ID NO: 9443 - protein, 385 aa, Homo sapiens
MAPLGYFLLLCSLKQALGSYPIWWSLAVGPQYSSLGSQPILCASIPGLVPKQLRFCRNYVEIMPSVAEGIKIGIQECQHQFRGRRWNCTTVHDSLAIFGPVLDKATRESAFVHAIASAGVAFAVTRSCAEGTAAICGCSSRHQGSPGKGWKWGGCSEDIEFGGMVSREFADARENRPDARSAMNRHNNEAGRQAIASHMHLKCKCHGLSGSCEVKTCWWSQPDFRAIGDFLKDKYDSASEMVVEKHRESRGWVETLRPRYTYFKVPTERDLVYYEASPNFCEPNPETGSFGTRDRTCNVSSHGIDGCDLLCCGRGHNARAERRREKCRCVFHWCCYVSCQECTRVYDVHTCKNPGSRAGNSAHQPPHPQPPVRFHPPLRRAGKVP

SEQ ID NO: 9444 - protein, 459 aa, Homo sapiens
METVFEEMDEESTGGVSSSKEEIVLGQRLHLSFPFSIIFSTVLYCGEVAFGLYMFEIYRKANDTFWMSFTISFIIVGAILDQIILMFFNKDLRRNKAALLFWHILLLGPIVRCLHTIRNYHKWLKNLKQEKEETQVSITKRNTMLEREIAFSIRDNFMQQKAFKYMSVIQAFLGSVPQLILQMYISLTIREWPLNRALLMTFSLLSVTYGAIRCNILAIQISNDDTTIKLPPIEFFCVVMWRFLEVISRVVTLAFFIASLKLKSLPVLLIIYFVSLLAPWLEFWKSGAHLPGNKENNSNMVGTVLMLFLITLLYAAINFSCWSAVKLQLSDDKIIDGRQRWGHRILHYSFQFLENVIMILVFRFFGGKTLLNCCDSLIAVQLIISYLLATGFMLLFYQYLYPWQSGKVLPGRTENQPEAPYYYVNIEKTEKNKNKQLRNYCHSCNRVGYFSIRKSMTCS

SEQ ID NO: 9445 - protein, 1320 aa, Homo sapiens
MMNRTTPDQELVPASEPVWERPWSVEEIRRSSQSWSLAADAGLLQFLQEFSQQTISRTHEIKKQVDGLIRETKATDCRLHNVFNDFLMLSNTQFIENRVYDEEVEEPVLKAEAEKTEQEKTREQKEVDLIPKVQEAVNYGLQVLDSAFEQLDIKAGNSDSEEDDANGRVELILEPKDLYIDRPLPYLIGSKLFMEQEDVGLGELSSEEGSVGSDRGSIVDTEEEKEEEESDEDFAHHSDNEQNQHTTQMSDEEEDDDGCDLFADSEKEEEDIEDIEENTRPKRSRPTSFADELAARIKGDAMGRVDEEPTTLPSGEAKPRKTLKEKKERRTPSDDEEDNLFAPPKLTDEDFSPFGSGGGLFSGGKGLFDDEDEESDLFTEASQDRQAGASVKEESSSSKPGKKIPAGAVSVFLGDTDVFGAASVPSLKEPQKPEQPTPRKSPYGPPPTGLFDDDDGDDDDDFFSAPHSKPSKTRKVQSTADIFGDEEGDLFKEKAVASPEATVSQTDENKARAEKKVTLSYSKNLKPSSETKTQKGLFSDEEDSEDLFSSQSASNLKGASLLPGKLPTSVSLFDDEDEEDNLFGGTAAKKQTLSLQAQREEKAKASELSKKKASALLFSSDEEDQWNIPASQTHLASDSRSKGEPRDSGTLQSQEAKAVKKTSLFEEDKEDDLFAIAKDSQKKTQRVSLLFEDDVDSGGSLFGSPPTSVPPATKKKETVSEAPPLLFSDEEEKEAQLGVKSVDKKVESAKESLKFGRTDVAESEKEGLLTRSAQETVKHSDLFSSSSPWDKGTKPRTKTVLSLFDEEEDKMEDQNIIQAPQKEVGKGCDPDAHPKSTGVFQDEELLFSHKLQKDNDPDVDLFAGTKKTKLLEPSVGSLFGDDEDDDLFSSAKSQPLVQEKKRVVKKDHSVNSFKNQKHPESIQGSKEKGIWKPETPQANLAINPAALLPTAASQISEVKPVLPELAFPSSEHRRSHGLESVPVLPGSGEAGVSFDLPAQADTLHSANKSRVKMRGKRRPQTRAARRLAAQESSEAEDMSVPRGPIAQWADGAISPNGHRPQLRAASGEDSTEEALAAAAAPWEGGPVPGVDTSPFAKSLGHSRGEADLFDSGDIFSTGTGSQSVERTKPKAKIAENPANPPVGGKAKSPMFPALGEASSDDDLFQSAKPKPAKKTNPFPLLEDEDDLFTDQKVKKNETKSSSQQDVILTTQDIFEDDIFATEAIKPSQKTREKEKTLESNLFDDNIDIFADLTVKPKEKSKKKVEAKSIFDDDMDDIFSTGIQAKTTKPKSRSAQAAPEPRFEHKVSNIFDDPLNAFGGQ

SEQ ID NO: 9446 - protein, 1318 aa, Homo sapiens
MMNRTTPDQELVPASEPVWERPWSVEEIRRSSQSWSLAADAGLLQFLQEFSQQTISRTHEIKKQVDGLIRETKATDCRLHNVFNDFLMLSNTQFIENRVYDEEVEEPVLKAEAEKTEQEKTREQKEVDLIPKVQEAVNYGLQVLDSAFEQLDIKAGNSDSEEDDANGRVELILEPKDLYIDRPLPYLIGSKLFMEQEDVGLGELSSEEGSVGSDRGSIVDTEEEKEEEESDEDFAHHSDNEQNQHTTQMSDEEEDDDGCDLFADSEKEEEDIEDIEENTRPKRSRPTSFADELAARIKGDAMGRVDEEPTTLPSGEAKPRKTLKEKKERRTPSDDEEDNLFAPPKLTDEDFSPFGSGGGLFSGGKGLFDDEDEESDLFTEASQDRQAGASVKEESSSSKPGKKIPAGAVSVFLGDTDVFGAASVPSLKEPQKPEQPTPRKSPYGPPPTGLFDDDDGDDDDDFFSAPHSKPSKTRKVQSTADIFGDEEGDLFKEKAVASPEATVSQTDENKARAEKKVTLSYSKNLKPSSETKTQKGLFSDEEDSEDLFSSQSASNLKGASLLPGKLPTSVSLFDDEDEEDNLFGGTAAKKQTLSLQAQREEKAKASELSKKKASALLFSSDEEWNIPASQTHLASDSRSKGEPRDSGTLQSQEAKAVKKTSLFEEDKEDDLFAIAKDSQKKTQRVSLLFEDDVDSGGSLFGSPPTSVPPATKKKETVSEAPPLLFSDEEEKEAQLGVKSVDKKVESAKESLKFGRTDVAESEKEGLLTRSAQETVKHSDLFSSSSPWDKGTKPRTKTVLSLFDEEEDKMEDQNIIQAPQKEVGKGCDPDAHPKSTGVFQDEELLFSHKLQKDNDPDVDLFAGTKKTKLLEPSVGSLFGDDEDDDLFSSAKSQPLVQEKKRVVKKDHSVNSFKNQKHPESIQGSKEKGIWKPETPQANLAINPAALLPTAASQISEVKPVLPELAFPSSEHRRSHGLESVPVLPGSGEAGVSFDLPAQADTLHSANKSRVKMRGKRRPQTRAARRLAAQESSEAEDMSVPRGPIAQWADGAISPNGHRPQLRAASGEDSTEEALAAAAAPWEGGPVPGVDTSPFAKSLGHSRGEADLFDSGDIFSTGTGSQSVERTKPKAKIAENPANPPVGGKAKSPMFPALGEASSDDDLFQSAKPKPAKKTNPFPLLEDEDDLFTDQKVKKNETKSSSQQDVILTTQDIFEDDIFATEAIKPSQKTREKEKTLESNLFDDNIDIFADLTVKPKEKSKKKVEAKSIFDDDMDDIFSTGIQAKTTKPKSRSAQAAPEPRFEHKVSNIFDDPLNAFGGQ

SEQ ID NO: 9447 - protein, 1310 aa, Homo sapiens
MMNRTTPDQELVPASEPVWERPWSVEEIRRSSQSWSLAADAGSQQTISRTHEIKKQVDGLIRETKATDCRLHNVFNDFLMLSNTQFIENRVYDEEVEEPVLKAEAEKTEQEKTREQKEVDLIPKVQEAVNYGLQVLDSAFEQLDIKAGNSDSEEDDANGRVELILEPKDLYIDRPLPYLIGSKLFMEQEDVGLGELSSEEGSVGSDRGSIVDTEEEKEEEESDEDFAHHSDNEQNQHTTQMSDEEEDDDGCDLFADSEKEEEDIEDIEENTRPKRSRPTSFADELAARIKGDAMGRVDEEPTTLPSGEAKPRKTLKEKKERRTPSDDEEDNLFAPPKLTDEDFSPFGSGGGLFSGGKGLFDDEDEESDLFTEASQDRQAGASVKEESSSSKPGKKIPAGAVSVFLGDTDVFGAASVPSLKEPQKPEQPTPRKSPYGPPPTGLFDDDDGDDDDDFFSAPHSKPSKTRKVQSTADIFGDEEGDLFKEKAVASPEATVSQTDENKARAEKKVTLSYSKNLKPSSETKTQKGLFSDEEDSEDLFSSQSASNLKGASLLPGKLPTSVSLFDDEDEEDNLFGGTAAKKQTLSLQAQREEKAKASELSKKKASALLFSSDEEWNIPASQTHLASDSRSKGEPRDSGTLQSQEAKAVKKTSLFEEDKEDDLFAIAKDSQKKTQRVSLLFEDDVDSGGSLFGSPPTSVPPATKKKETVSEAPPLLFSDEEEKEAQLGVKSVDKKVESAKESLKFGRTDVAESEKEGLLTRSAQETVKHSDLFSSSSPWDKGTKPRTKTVLSLFDEEEDKMEDQNIIQAPQKEVGKGCDPDAHPKSTGVFQDEELLFSHKLQKDNDPDVDLFAGTKKTKLLEPSVGSLFGDDEDDDLFSSAKSQPLVQEKKRVVKKDHSVNSFKNQKHPESIQGSKEKGIWKPETPQANLAINPAALLPTAASQISEVKPVLPELAFPSSEHRRSHGLESVPVLPGSGEAGVSFDLPAQADTLHSANKSRVKMRGKRRPQTRAARRLAAQESSEAEDMSVPRGPIAQWADGAISPNGHRPQLRAASGEDSTEEALAAAAAPWEGGPVPGVDTSPFAKSLGHSRGEADLFDSGDIFSTGTGSQSVERTKPKAKIAENPANPPVGGKAKSPMFPALGEASSDDDLFQSAKPKPAKKTNPFPLLEDEDDLFTDQKVKKNETKSSSQQDVILTTQDIFEDDIFATEAIKPSQKTREKEKTLESNLFDDNIDIFADLTVKPKEKSKKKVEAKSIFDDDMDDIFSTGIQAKTTKPKSRSAQAAPEPRFEHKVSNIFDDPLNAFGGQ

SEQ ID NO: 9448 - protein, 1263 aa, Homo sapiens
MMNRTTPDQELVPASEPVWERPWSVEEIRRSSQSWSLAADAGRVYDEEVEEPVLKAEAEKTEQEKTREQKEVDLIPKVQEAVNYGLQVLDSAFEQLDIKAGNSDSEEDDANGRVELILEPKDLYIDRPLPYLIGSKLFMEQEDVGLGELSSEEGSVGSDRGSIVDTEEEKEEEESDEDFAHHSDNEQNQHTTQMSDEEEDDDGCDLFADSEKEEEDIEDIEENTRPKRSRPTSFADELAARIKGDAMGRVDEEPTTLPSGEAKPRKTLKEKKERRTPSDDEEDNLFAPPKLTDEDFSPFGSGGGLFSGGKGLFDDEDEESDLFTEASQDRQAGASVKEESSSSKPGKKIPAGAVSVFLGDTDVFGAASVPSLKEPQKPEQPTPRKSPYGPPPTGLFDDDDGDDDDDFFSAPHSKPSKTRKVQSTADIFGDEEGDLFKEKAVASPEATVSQTDENKARAEKKVTLSYSKNLKPSSETKTQKGLFSDEEDSEDLFSSQSASNLKGASLLPGKLPTSVSLFDDEDEEDNLFGGTAAKKQTLSLQAQREEKAKASELSKKKASALLFSSDEEWNIPASQTHLASDSRSKGEPRDSGTLQSQEAKAVKKTSLFEEDKEDDLFAIAKDSQKKTQRVSLLFEDDVDSGGSLFGSPPTSVPPATKKKETVSEAPPLLFSDEEEKEAQLGVKSVDKKVESAKESLKFGRTDVAESEKEGLLTRSAQETVKHSDLFSSSSPWDKGTKPRTKTVLSLFDEEEDKMEDQNIIQAPQKEVGKGCDPDAHPKSTGVFQDEELLFSHKLQKDNDPDVDLFAGTKKTKLLEPSVGSLFGDDEDDDLFSSAKSQPLVQEKKRVVKKDHSVNSFKNQKHPESIQGSKEKGIWKPETPQANLAINPAALLPTAASQISEVKPVLPELAFPSSEHRRSHGLESVPVLPGSGEAGVSFDLPAQADTLHSANKSRVKMRGKRRPQTRAARRLAAQESSEAEDMSVPRGPIAQWADGAISPNGHRPQLRAASGEDSTEEALAAAAAPWEGGPVPGVDTSPFAKSLGHSRGEADLFDSGDIFSTGTGSQSVERTKPKAKIAENPANPPVGGKAKSPMFPALGEASSDDDLFQSAKPKPAKKTNPFPLLEDEDDLFTDQKVKKNETKSSSQQDVILTTQDIFEDDIFATEAIKPSQKTREKEKTLESNLFDDNIDIFADLTVKPKEKSKKKVEAKSIFDDDMDDIFSTGIQAKTTKPKSRSAQAAPEPRFEHKVSNIFDDPLNAFGGQ

SEQ ID NO: 9449 - protein, 1245 aa, Homo sapiens
MMNRTTPDQELVPASEPVWERPWSVEEIRRSSQSWSLAADAGLLQFLQEFSQQTISRTHEIKKQVDGLIRETKATDCRLHNVFNDFLMLSNTQFIENRVYDEEVEEPVLKAEAEKTEQEKTREQKEVDLIPKVQEAVNYGLQVLDSAFEQLDIKAGNSDSEEDDANGRVELILEPKDLYIDRPLPYLIGSKLFMEQEDVGLGELSSEEGSVGSDRGSIVDTEEEKEEEESDEDFAHHSDNEQNQHTTQMSDEEEDDDGCDLFADSEKEEEDIEDIEENTRPKRSRPTSFADELAARIKGDAMGRVDEEPTNEEDNLFAPPKLTDEDFSPFGSGGGLFSGGKGLFDDEDEESDLFTEASQDRQAGASVKEESSSSKPGKKIPAGAVSVFLGDTDVFGAASVPSLKEPQKPEQPTPRKSPYGPPPTGLFDDDDGDDDDDFFSAPHSKPSKTRKVQSTADIFGDEEGDLFKEKAVASPEATVSQTDENKARAEKKVTLSYSKNLKPSSETKTQKGLFSDEEDSEDLFSSQSASNLKGASLLPGKLPTSVSLFDDEDEEDNLFGGTAAKKQTLSLQAQREEKAKASELSKKKASALLFSSDEEDQWNIPASQTHLASDSRSKGEPRDSGTLQSQEAKAVKKTSLFEEDKEDDLFAIAKDSQKKTQRVSLLFEDDVDSGGSLFGSPPTSVPPATKEGLLTRSAQETVKHSDLFSSSSPWDKGTKPRTKTVLSLFDEEEDKMEDQNIIQAPQKEVGKGCDPDAHPKSTGVFQDEELLFSHKLQKDNDPDVDLFAGTKKTKLLEPSVGSLFGDDEDDDLFSSAKSQPLVQEKKRVVKKDHSVNSFKNQKHPESIQGSKEKGIWKPETPQANLAINPAALLPTAASQISEVKPVLPELAFPSSEHRRSHGLESVPVLPGSGEAGVSFDLPAQADTLHSANKSRVKMRGKRRPQTRAARRLAAQESSEAEDMSVPRGPIAQWADGAISPNGHRPQLRAASGEDSTEEALAAAAAPWEGGPVPGVDTSPFAKSLGHSRGEADLFDSGDIFSTGTGSQSVERTKPKAKIAENPANPPVGGKAKSPMFPALGEASSDDDLFQSAKPKPAKKTNPFPLLEDEDDLFTDQKVKKNETKSSSQQDVILTTQDIFEDDIFATEAIKPSQKTREKEKTLESNLFDDNIDIFADLTVKPKEKSKKKVEAKSIFDDDMDDIFSTGIQAKTTKPKSRSAQAAPEPRFEHKVSNIFDDPLNAFGGQ

SEQ ID NO: 9450 - protein, 1279 aa, Homo sapiens
MMNRTTPDQELVPASEPVWERPWSVEEIRRSSQSWSLAADAGLLQFLQEFSQQTISRTHEIKKQVDGLIRETKATDCRLHNVFNDFLMLSNTQFIENRVYDEEVEEPVLKAEAEKTEQEKTREQKEVDLIPKVQEAVNYGLQVLDSAFEQLDIKAGNSDSEEDDANGRVELILEPKDLYIDRPLPYLIGSKLFMEQEDVGLGELSSEEGSVGSDRGSIVDTEEEKEEEESDEDFAHHSDNEQNQHTTQMSDEEEDDDGCDLFADSEKEEEDIEDIEENTRPKRSRPTSFADELAARIKGDAMGRVDEEPTTLPSGEAKPRKTLKEKKERRTPSDDEEDNLFAPPKLTDEDFSPFGSGGGLFSGGKGLFDDEDEESDLFTEASQDRQAGASVKEESSSSKPGKKIPAGAVSVFLGDTDVFGAASVPSLKEPQKPEQPTPRKSPYGPPPTGLFDDDDGDDDDDFFSAPHSKPSKTRKVQSTADIFGDEEGDLFKEKAVASPEATVSQTDENKARAEKKVTLSYSKNLKPSSETKTQKGLFSDEEDSEDLFSSQSASNLKGASLLPGKLPTSVSLFDDEDEEDNLFGGTAAKKQTLSLQAQREEKAKASELSKKKASALLFSSDEEDQWNIPASQTHLASDSRSKGEPRDSGTLQSQEAKAVKKTSLFEEDKEDDLFAIAKDSQKKTQRVSLLFEDDVDSGGSLFGSPPTSVPPATKKKETVSEAPPLLFSDEEEKEAQLGVKSVDKKVESAKESLKFGRTDVAESEKEGLLTRSAQETVKHSDLFSSSSPWDKGTKPRTKTVLSLFDEEEDKMEDQNIIQAPQKEVGKGCDPDAHPKSTGVFQDEELLFSHKLQKDNDPDVDLFAGTKKTKLLEPSVGSLFGDDEDDDLFSSAKSQPLANLAINPAALLPTAASQISEVKPVLPELAFPSSEHRRSHGLESVPVLPGSGEAGVSFDLPAQADTLHSANKSRVKMRGKRRPQTRAARRLAAQESSEAEDMSVPRGPIAQWADGAISPNGHRPQLRAASGEDSTEEALAAAAAPWEGGPVPGVDTSPFAKSLGHSRGEADLFDSGDIFSTGTGSQSVERTKPKAKIAENPANPPVGGKAKSPMFPALGEASSDDDLFQSAKPKPAKKTNPFPLLEDEDDLFTDQKVKKNETKSSSQQDVILTTQDIFEDDIFATEAIKPSQKTREKEKTLESNLFDDNIDIFADLTVKPKEKSKKKVEAKSIFDDDMDDIFSTGIQAKTTKPKSRSAQAAPEPRFEHKVSNIFDDPLNAFGGQ

SEQ ID NO: 9451 - protein, 261 aa, Homo sapiens; identical to SEQ ID NO: 201

SEQ ID NO: 9452 - protein, 376 aa, Homo sapiens; identical to SEQ ID NO: 202

SEQ ID NO: 9453 - protein, 311 aa, Homo sapiens
MASKDFAIGMILLSQIMVGFLGNFFLLYHYSFLCFTRGMLQSTDLILKHLTIANSLVILSKGIPQTMAAFGLKDSLSDIGCKFVFYVHRVGRAVCVGNACLLSVFQVITISPSEFRWAELKLHAHKYIRSFILVLCWILNTLVNITVLLHVTGKWNSINSTKTNDYGYCSGGSRSRIPHSLHIVLLSSLDVLCLGLMTLASGSMVFILHRHKQQVQHIHGTNLSARSSPESRVTQSILVLVSTLCYFTRSPPSLHMSLFPNPSWWLLNTSALITACFPMVSPFVLMSRHPRIPRLGSACCGRNPQFPKLVR

SEQ ID NO: 9454 - protein, 463 aa, Homo sapiens
MTPVRMQHSLAGQTYAVPLIQPDLRREEAVQQMADALQYLQKVSGDIFSRISQQVEQSRSQVQAIGEKVSLAQAKIEKIKGSKKAIKVFSSAKYPAPERLQEYGSIFTGAQDPGLQRRPRHRIQSKHRPLDERALQEKDFPVCVSTKPEPEDDAEEGLGGLPSNISSVSSLLLFNTTENLGKKYVFLDPLAGAVTKTHVMLGAETEEKLFDAPLSISKREQLEQQVPENYFYVPDLGQVPEIDVPSYLPDLPGITNDLMYIADLGPGIAPSAPGTIPELPTFHTEVAEPLKVDLQDGVLTPPPPPPPPPPAPEVLASAPPLPPSTAAPVGQGARQDDSSSSASPSVQGAPREVVDPSGGRATLLESIRQAGGIGKAKLRSMKERKLEKKQQKEQEQVRATSQGGHLMSDLFNKLVMRRKGISGKGPGAGEGPGGAFARVSDSIPPLPPPQQPQAEEDEDDWES

SEQ ID NO: 9455 - protein, 654 aa, Homo sapiens
MERSGPSEVTGSDASGPDPQLAVTMGFTGFGKKARTFDLEAMFEQTRRTAVERSRKTLEAREKEEEMNREKELRRQNEDIEPTSSRSNVVRDCSKSSSRDTSSSESEQSSDSSDDELIGPPLPPKMVGKPVNFMEEDILGPLPPPLNEEEEEAEEEEEEEEEEENPVHKIPDSHEITLKHGTKTVSALGLDPSGARLVTGGYDYDVKFWDFAGMDASFKAFRSLQPCECHQIKSLQYSNTGDMILVVSGSSQAKVIDRDGFEVMECIKGDQYIVDMANTKGHTAMLHTGSWHPKIKGEFMTCSNDATVRTWEVENPKKQKSVFKPRTMQGKKVIPTTCTYSRDGNLIAAACQNGSIQIWDRNLTVHPKFHYKQAHDSGTDTSCVTFSYDGNVLASRGGDDSLKLWDIRQFNKPLFSASGLPTMFPMTDCCFSPDDKLIVTGTSIQRGCGSGKLVFFERRTFQRVYEIDITDASVVRCLWHPKLNQIMVGTGNGLAKVYYDPNKSQRGAKLCVVKTQRKAKQAETLTQDYIITPHALPMFREPRQRSTRKQLEKDRLDPLKSHKPEPPVAGPGRGGRVGTHGGTLSSYIVKNIALDKTDDSNPREAILRHAKAAEDSPYWVSPAYSKTQPKTMFAQVESDDEEAKNEPEWKKRKI

SEQ ID NO: 9456 - protein, 140 aa, Homo sapiens
MWPFRLRCPIYFKTRLLYSSSQDGFLSSSTNYYNHRTYPGLVNWLFVLTEPELTGELGDDDRKGMHTGGIIRWLGRPSSQLKPIFHAEERRVPPPPERLVGRASPREQATVFKRICAPLHAEVFCRAGLCACHPDCTAAG

SEQ ID NO: 9457 - protein, 619 aa, Homo sapiens
MPDPAAHLPFFYGSISRAEAEEHLKLAGMADGLFLLRQCLRSLGGYVLSLVHDVRFHHFPIERQLNGTYAIAGGKAHCGPAELCEFYSRDPDGLPCNLRKPCNRPSGLEPQPGVFDCLRDAMVRDYVRQTWKLEGEALEQAIISQAPQVEKLIATTAHERMPWYHSSLTREEAERKLYSGAQTDGKFLLRPRKEQGTYALSLIYGKTVYHYLISQDKAGKYCIPEGTKFDTLWQLVEYLKLKADGLIYCLKEACPNSSASNASGAAAPTLPAHPSTLTHPQRRIDTLNSDGYTPEPARITSPDKPRPMPMDTSVYESPYSDPEELKDKKLFLKRDNLLIADIELGCGNFGSVRQGVYRMRKKQIDVAIKVLKQGTEKADTEEMMREAQIMHQLDNPYIVRLIGVCQAEALMLVMEMAGGGPLHKFLVGKREEIPVSNVAELLHQVSMGMKYLEEKNFVHRDLAARNVLLVNRHYAKISDFGLSKALGADDSYYTARSAGKWPLKWYAPECINFRKFSSRSDVWSYGVTMWEALSYGQKPYKKMKGPEVMAFIEQGKRMECPPECPPELYALMSDCWIYKWEDRPDFLTVEQRMRACYYSLASKVEGPPGSTQKAEAACA

SEQ ID NO: 9458 - protein, 312 aa, Homo sapiens
MPMDTSVYESPYSDPEELKDKKLFLKRDNLLIADIELGCGNFGSVRQGVYRMRKKQIDVAIKVLKQGTEKADTEEMMREAQIMHQLDNPYIVRLIGVCQAEALMLVMEMAGGGPLHKFLVGKREEIPVSNVAELLHQVSMGMKYLEEKNFVHRDLAARNVLLVNRHYAKISDFGLSKALGADDSYYTARSAGKWPLKWYAPECINFRKFSSRSDVWSYGVTMWEALSYGQKPYKKMKGPEVMAFIEQGKRMECPPECPPELYALMSDCWIYKWEDRPDFLTVEQRMRACYYSLASKVEGPPGSTQKAEAACA

SEQ ID NO: 9459 - protein, 493 aa, Homo sapiens
MRLGPRWKGEALEQAIISQAPQVEKLIATTAHERMPWYHSSLTREEAERKLYSGAQTDGKFLLRPRKEQGTYALSLIYGKTVYHYLISQDKAGKYCIPEGTKFDTLWQLVEYLKLKADGLIYCLKEACPNSSASNASGAAAPTLPAHPSTLTHPQRRIDTLNSDGYTPEPARITSPDKPRPMPMDTSVYESPYSDPEELKDKKLFLKRDNLLIADIELGCGNFGSVRQGVYRMRKKQIDVAIKVLKQGTEKADTEEMMREAQIMHQLDNPYIVRLIGVCQAEALMLVMEMAGGGPLHKFLVGKREEIPVSNVAELLHQVSMGMKYLEEKNFVHRDLAARNVLLVNRHYAKISDFGLSKALGADDSYYTARSAGKWPLKWYAPECINFRKFSSRSDVWSYGVTMWEALSYGQKPYKKMKGPEVMAFIEQGKRMECPPECPPELYALMSDCWIYKWEDRPDFLTVEQRMRACYYSLASKVEGPPGSTQKAEAACA

SEQ ID NO: 9460 - protein, 529 aa, Homo sapiens
MEQEKKLLVSDSNSFMERESLKSPFTGDTSMNNLETVHHNNSKADKLKEKPSEWSKRHRPQHYKHEDAKEMPLTWVQDEIWCHDSYESDGKSENWGNFIAKEEEKPNHQEWDSGEHTNACVQQNSSFVDRPYKCSECWKSFSNSSHLRTHQRTHSGEKPYKCSECAKCFCNSSHLIQHLRMHTGEKPYQCGECGKSFSNTSHLIIHERTHTGEKPYKCPECGKRFSSSSHLIQHHRSHTGEKPYECSVCGKGFSHSYVLIEHQRTHTGEKPYKCPDCGKSFSQSSSLIRHQRTHTGEKPYKCLECEKSFGCNSTLIKHQRIHTGEKPYQCPECGKNFSRSSNLITHQKMHTGEKSYESSEYEESLGQNCNVIEECRIQLGEKPYRCCECGKSFGLSSHLIRHQRTHTGEKPYRCSECWKTFSQSSTLVIHQRTHTGEKPYKCPDCGESFSQSFNLIRHRRTHIGEKPYKCTSCEKCFSRSAYLSQHRKIHVEKPFESPDVGDFPHEWTWKNCSGEMPFISSFSVSNSSS

SEQ ID NO: 9461 - protein, 261 aa, Homo sapiens
MIYKCPMCREFFSERADLFMHQKIHTAEKPHKCDKCDKGFFHISELHIHWRDHTGEKVYKCDDCGKDFSTTTKLNRHKKIHTVEKPYKCYECGKAFNWSSHLQIHMRVHTGEKPYVCSECGRGFSNSSNLCMHQRVHTGEKPFKCEECGKAFRHTSSLCMHQRVHTGEKPYKCYECGKAFSQSSSLCIHQRVHTGEKPYRCCGCGKAFSQSSSLCIHQRVHTGEKPFKCDECGKAFSQSTSLCIHQRVHTKERNHLKISVI

SEQ ID NO: 9462 - protein, 954 aa, Homo sapiens
MNQPGGAAAPQADGASAAGRKSTASRERLKRSQKSTKVEGPEPVPAEASLSAEQGTMTEVKVKTELPDDYIQEVIWQGEAKEEKKAVSKDGTSDVPAEICVVIGGVRNQQTLDGKAPEGSPHGGSVRSRYSGTWIFDQALRYASGSYECGICGKKYKYYNCFQTHVRAHRDTEATSGEGASQSNNFRYTCDICGKKYKYYSCFQEHRDLHAVDVFSVEGAPENRADPFDQGVVATDEVKEEPPEPFQKIGPKTGNYTCEFCGKQYKYYTPYQEHVALHAPISTAPGWEPPDDPDTGSECSHPEVSPSPRFVAAKTQTNQSGKKAPASVVRCATLLHRTPPATQTQTFRTPNSGSPASKATAAESAFSRRVEGKAQNHFEETNSSSQNSSEPYTCGACGIQFQFYNNLLEHMQSHAADNENNIASNQSRSPPAVVEEKWKPQAQRNSANNTTTSGLTPNSMIPEKERQNIAERLLRVMCADLGALSVVSGKEFLKLAQTLVDSGARYGAFSVTEILGNFNTLALKHLPRMYNQVKVKVTCALGSNACLGIGVTCHSQSVGPDSCYILTAYQAEGNHIKSYVLGVKGADIRDSGDLVHHWVQNVLSEFVMSEIRTVYVTDCRVSTSAFSKAGMCLRCSACALNSVVQSVLSKRTLQARSMHEVIELLNVCEDLAGSTGLAKETFGSLEETSPPPCWNSVTDSLLLVHERYEQICEFYSRAKKMNLIQSLNKHLLSNLAAILTPVKQAVIELSNESQPTLQLVLPTYVRLEKLFTAKANDAGTVSKLCHLFLEALKENFKVHPAHKVAMILDPQQKLRPVPPYQHEEIIGKVCELINEVKESWAEEADFEPAAKKPRSAAVENPAAQEDDRLGKNEVYDYLQEPLFQATPDLFQYWSCVTQKHTKLAKLAFWLLAVPAVGARSGCVNMCEQALLIKRRRLLSPEDMNKLMFLKSNML

SEQ ID NO: 9463 - protein, 861 aa, Homo sapiens
MNQPGGAAAPQADGASAAGRKSTASRERLKRSQKSTKVEGPEPVPAEASLSAEQGTMTEVKVKTELPDDYIQEVIWQGEAKEEKKAVSKDGTSDVPAEICVVIGGVRNQQTLGSYECGICGKKYKYYNCFQTHVRAHRDTEATSGEGASQSNNFRYTCDICGKKYKYYSCFQEHRDLHAVDVFSVEGAPENRADPFDQGVVATDEVKEEPPEPFQKIGPMNNITSDIFKKKEVRQCQKRETGNYTCEFCGKQYKYYTPYQEHVALHAPIKSAFSRRVEGKAQNHFEETNSSSQNSSEPYTCGACGIQFQFYNNLLEHMQSHAADNENNIASNQSRSPPAVVEEKWKPQAQRNSANNTTTSGLTPNSMIPEKERQNIAERLLRVMCADLGALSVVSGKEFLKLAQTLVDSGARYGAFSVTEILGNFNTLALKHLPRMYNQVKVKVTCALGSNACLGIGVTCHSQSVGPDSCYILTAYQAEGNHIKSYVLGVKGADIRDSGDLVHHWVQNVLSEFVMSEIRTVYVTDCRVSTSAFSKAGMCLRCSACALNSVVQSVLSKRTLQARSMHEVIELLNVCEDLAGSTGLAKETFGSLEETSPPPCWNSVTDSLLLVHERYEQICEFYSRAKKMNLIQSLNKHLLSNLAAILTPVKQAVIELSNESQPTLQLVLPTYVRLEKLFTAKANDAGTVSKLCHLFLEALKENFKVHPAHKVAMILDPQQKLRPVPPYQHEEIIGKVCELINEVKESWAEEADFEPAAKKPRSAAVENPAAQEDDRLGKNEVYDYLQEPLFQATPDLFQYWSCVTQKHTKLAKLAFWLLAVPAVGARSGCVNMCEQALLIKRRRLLSPEDMNKLMFLKSNML

SEQ ID NO: 9464 - protein, 281 aa, Homo sapiens
MNQPGGAAAPQADGASAAGRKSTASRERLKRSQKSTKVEGPEPVPAEASLSAEQGTMTEVKVKTELPDDYIQEVIWQGEAKEEKKAVSKDGTSDVPAEICVVIGGVRNQQTLGSYECGICGKKYKYYNCFQTHVRAHRDTEATSGEGASQSNNFRYTCDICGKKYKYYSCFQEHRDLHAVDVFSVEGAPENRADPFDQGVVATDEVKEEPPEPFQKIGPKTGNYTCEFCGKQYKYYTPYQEHVALHAPISEYLLPVGMGVGGPGTGWASRWPGLWNLARKW

SEQ ID NO: 9465 - protein, 921 aa, Homo sapiens
MNQPGGAAAPQADGASAAGRKSTASRERLKRSQKSTKVEGPEPVPAEASLSAEQGTMTEVKVKTELPDDYIQEVIWQGEAKEEKKAVSKDGTSDVPAEICVVIGGVRNQQTLGSYECGICGKKYKYYNCFQTHVRAHRDTEATSGEGASQSNNFRYTCDICGKKYKYYSCFQEHRDLHAVDVFSVEGAPENRADPFDQGVVATDEVKEEPPEPFQKIGPKTGNYTCEFCGKQYKYYTPYQEHVALHAPISTAPGWEPPDDPDTGSECSHPEVSPSPRFVAAKTQTNQSGKKAPASVVRCATLLHRTPPATQTQTFRTPNSGSPASKATAESAFSRRVEGKAQNHFEETNSSSQNSSEPYTCGACGIQFQFYNNLLEHMQSHAADNENNIASNQSRSPPAVVEEKWKPQAQRNSANNTTTSGLTPNSMIPEKERQNIAERLLRVMCADLGALSVVSGKEFLKLAQTLVDSGARYGAFSVTEILGNFNTLALKHLPRMYNQVKVKVTCALGSNACLGIGVTCHSQSVGPDSCYILTAYQAEGNHIKSYVLGVKGADIRDSGDLVHHWVQNVLSEFVMSEIRTVYVTDCRVSTSAFSKAGMCLRCSACALNSVVQSVLSKRTLQARSMHEVIELLNVCEDLAGSTGLAKETFGSLEETSPPPCWNSVTDSLLLVHERYEQICEFYSRAKKMNLIQSLNKHLLSNLAAILTPVKQAVIELSNESQPTLQLVLPTYVRLEKLFTAKANDAGTVSKLCHLFLEALKENFKVHPAHKVAMILDPQQKLRPVPPYQHEEIIGKVCELINEVKESWAEEADFEPAAKKPRSAAVENPAAQEDDRLGKNEVYDYLQEPLFQATPDLFQYWSCVTQKHTKLAKLAFWLLAVPAVGARSGCVNMCEQALLIKRRRLLSPEDMNKLMFLKSNML

SEQ ID NO: 9466 - protein, 588 aa, Homo sapiens
MDLARKEFLRGNGLAAGKMNISIDLDTNYAELVLNVGRVTLGENNRKKMKDCQLRKQQNENVSRAVCALLNSGGGVIKAEVENKGYSYKKDGIGLDLENSFSNMLPFVPNFLDFMQNGNYFHIFVKSWSLETSGPQIATLSSSLYKRDVTSAKVMNASAALEFLKDMEKTGGRAYLRPEFPAKRACVDVQEESNMEALAADFFNRTELGYKEKLTFTESTHVEIKNFSTEKLLQRITEILPQYVSAFANTDGGYLFVGLNEDKEVIGFKAEKSYLTKLEEVTKNSIGKLPVHHFCVEKGTINYLCKFLGVYDKGRLCGYVYALRVERFCCAVFAKKPDSWHVKDNRVKQLTEKEWIQFMVDSEPVCEELPSPASTSSPVSQSYPLREYINFKIQPLRYHLPGLSEKITCAPKTFCRNLFSQHEGLKQLICEEMGSVNKGSLIFSRSWSLDLGLQENHKVLCDALLISQDKPPVLYTFHMVQDEEFKDYSTQTAQTLKQKLAKIGGYTKKVCVMTKIFYLSPEGKTSCQYDLNSQVIYPESYYWTTAQTMKDLEKALSNILPKENQIFLFVCLFRFCLFVCWFVCFFLR

SEQ ID NO: 9467 - protein, 617 aa, Homo sapiens
MAMKIMEKIRNVFHCEAHRILYICESQFLRNFIRKEFLRGNGLAAGKMNISIDLDTNYAELVLNVGRVTLGENNRKKMKDCQLRKQQNENVSRAVCALLNSGGGVIKAEVENKGYSYKKDGIGLDLENSFSNMLPFVPNFLDFMQNGNYFHIFVKSWSLETSGPQIATLSSSLYKRDVTSAKVMNASAALEFLKDMEKTGGRAYLRPEFPAKRACVDVQEESNMEALAADFFNRTELGYKEKLTFTESTHVEIKNFSTEKLLQRITEILPQYVSAFANTDGGYLFVGLNEDKEVIGFKAEKSYLTKLEEVTKNSIGKLPVHHFCVEKGTINYLCKFLGVYDKGRLCGYVYALRVERFCCAVFAKKPDSWHVKDNRVKQLTEKEWIQFMVDSEPVCEELPSPASTSSPVSQSYPLREYINFKIQPLRYHLPGLSEKITCAPKTFCRNLFSQHEGLKQLICEEMGSVNKGSLIFSRSWSLDLGLQENHKVLCDALLISQDKPPVLYTFHMVQDEEFKDYSTQTAQTLKQKLAKIGGYTKKVCVMTKIFYLSPEGKTSCQYDLNSQVIYPESYYWTTAQTMKDLEKALSNILPKENQIFLFVCLFRFCLFVCWFVCFFLR

SEQ ID NO: 9468 - protein, 390 aa, Homo sapiens
MAAQKDLWDAIVIGAGIQGCFTAYHLAKHRKRILLLEQFFLPHSRGSSHGQSRIIRKAYLEDFYTRMMHECYQIWAQLEHEAGTQLHRQTGLLLLGMKENQELKTIQANLSRQRVEHQCLSSEELKQRFPNIRLPRGEVGLLDNSGGVIYAYKALRALQDAIRQLGGIVRDGEKVVEINPGLLVTVKTTSRSYQAKSLVITAGPWTNQLLRPLGIEMPLQTLRINVCYWREMVPGSYGVSQAFPCFLWLGLCPHHIYGLPTGEYPGLMKVSYHHGNHADPEERDCPTARTDIGDVQILSSFVRDHLPDLKPEPAVIESCMYTNTPDEQFILDRHPKYDNIVIGAGFSGHGFKLAPVVGKILYELSMKLTPSYDLAPFRISRFPSLGKAHL

SEQ ID NO: 9469 - protein, 342 aa, Homo sapiens
MSRQAKDDFLRHYTVSDPRTHPKGYTEYKVTAQFISKKDPEDVKEVVVWKRYSDFRKLHGDLAYTHRNLFRRLEEFPAFPRAQVFGRFEASVIEERRKGAEDLLRFTVHIPALNNSPQLKEFFRGGEVTRPLEVSRDLHILPPPLIPTPPPDDPRLSQLLPAERRGLEELEVPVDPPPSSPAQEALDLLFNCESTEEASGSPARGPLTEAELALFDPFSKEEGAAPSPTHVAELATMEVESARLDQEPWEPGGQEEEEDGEGGPTPAYLSQATELITQALRDEKAGAYAAALQGYRDGVHVLLQGVPSDPLPARQEGVKKKAAEYLKRAEEILRLHLSQLPP

SEQ ID NO: 9470 - protein, 256 aa, Homo sapiens
MSRQAKDDFLRHYTVSDPRTHPKGYTEYKVTAQFISKKDPEDVKEVVVWKRYSDFRKLHGDLAYTHRNLFRRLEEFPAFPRAQVFGRFEASVIEERRKGAEDLLRFTVHIPALNNSPQLKEFFRGGEVTRPLEVSRDLHILPPPLIPTPPPDDPRLSQLLPAERRGLEELEVPVDPPPSSPAQEALDLLFNCESTEEASGSPARGPLTEAELALFDPFSKEGDPLPARQEGVKKKAAEYLKRAEEILRLHLSQLPP

SEQ ID NO: 9471 - protein, 398 aa, Homo sapiens
MAAVAVLRNDSLQAFLQDRTPSASPDLGKHSPLALLAATCSRIGQPGAAAPPDFLQVPYDPALGSPSRLFHPWTADMPAHSPGALPPPHPSLGLTPQKTHLQPSFGAAHELPLTPPADPSYPYEFSPVKMLPSSMAALPASCAPAYVPYAAQAALPPGYSNLLPPPPPPPPPPTCRQLSPNPAPDDLPWWSIPQAGAGPGASGVPGSGLSGACAGAPHAPRFPASAAAAAAAAAALQRGLVLGPSDFAQYQSQIAALLQTKAPLAATARRCRRCRCPNCQAAGGAPEAEPGKKKQHVCHVPGCGKVYGKTSHLKAHLRWHTGERPFVCNWLFCGKSFTRSDELQRHLRTHTGEKRFACPECGKRFMRSDHLAKHVKTHQNKKLKVAEAGVKREDARDL

SEQ ID NO: 9472 - protein, 307 aa, Homo sapiens
MEASRWWLLVTVLMAGAHCVALVDQEASDLIHSGPQDSSPGPALPCHKISVSNIDFAFKLYRQLALNAPGENILFFPVSISLALAMLSWGAPVASRTQLLEGLGFTLTVVPEEEIQEGFWDLLIRLRGQGPRLLLTMDQRRFSGLGARANQSLEEAQKHIDEYTEQQTQGKLGAWEKDLGSETTAVLVNHMLLRAEWMKPFDSHATSPKEFFVDEHSAVWVPMMKEKASHRFLHDRELQCSVLRMDHAGNTTTFFIFPNRGKMRHLEDALLPETLIKWDSLLRTRELDFHFPKFSISRTCRLEMLLP

SEQ ID NO: 9473 - protein, 169 aa, Homo sapiens
MEVYIPSFRYEESDLERGYTVFKIEVLMNGRKHFVEKRYSEFHALHKKLKKCIKTPEIPSKHVRNWVPKVLEQRRQGLETYLQAVILENEELPKLFLDFLNVRHLPSLPKAESCGSFDETESEESSKLSHQPVLLFLRDPYVLPAASDFPNVVIEGVLHGIFYPHLQPR

SEQ ID NO: 9474 - protein, 159 aa, Homo sapiens
MEVYIPSFRYEESDLERGYTVFKIEVLMNGRKHFVEKRYSEFHALHKKLKKCIKTPEIPSKHVRNWVPKVLEQRRQGLETYLQAVILENEELPKLFLDFLNVRHLPSLPKAESCGSFDETESEESSKLSHQPVLLFLRDPYVLPAASGNQTCHLLTALY

SEQ ID NO: 9475 - protein, 95 aa, Homo sapiens
MKGSRALLLVALTLFCICRMATGEDNDEFFMDFLQTLLVGTPEELYEGTLGKYNVNEDAKAAMTELKSCRDGLQPMHKAELVKLLVQVLGSQDGA

SEQ ID NO: 9476 - protein, 93 aa, Homo sapiens
MKLVTIFLLVTISLCSYSATAFLINKVPLPVDKLAPLPLDNILPFMDPLKLLLKTLGISVEHLVEGLRKCVNELGPEASEAVKKLLEALSHLV

SEQ ID NO: 9477 - protein, 90 aa, Homo sapiens
MGAKAPRGPKVAQWAMETAVIGVVVVLFVVTVAITCVLCCFSCDSRAQDPQGGPGRSFTVATFRQEASLFTGPVRHAQPVPSAQDFWTFM

SEQ ID NO: 9478 - protein, 75 aa, Homo sapiens
METAVIGVVVVLFVVTVAITCVLCCFSCDSRAQDPQGGPGRSFTVATFRQEASLFTGPVRHAQPVPSAQDFWTFM

SEQ ID NO: 9479 - protein, 613 aa, Homo sapiens
MSDPQTSMAATAAVSPSDYLQPAASTTQDSQPSPLALLAATCSKIGPPAVEAAVTPPAPPQPTPRKLVPIKPAPLPLSPGKNSFGILSSKGNILQIQGSQLSASYPGGQLVFAIQNPTMINKGTRSNANIQYQAVPQIQASNSQTIQVQPNLTNQIQIIPGTNQAIITPSPSSHKPVPIKPAPIQKSSTTTTPVQSGANVVKLTGGGGNVTLTLPVNNLVNASDTGAPTQLLTESPPTPLSKTNKKARKKSLPASQPPVAVAEQVETVLIETTADNIIQAGNNLLIVQSPGGGQPAVVQQVQVVPPKAEQQQVVQIPQQALRVVQAASATLPTVPQKPSQNFQIQAAEPTPTQVYIRTPSGEVQTVLVQDSPPATAAATSNTTCSSPASRAPHLSGTSKKHSAAILRKERPLPKIAPAGSIISLNAAQLAAAAQAMQTININGVQVQGVPVTITNTGGQQQLTVQNVSGNNLTISGLSPTQIQLQMEQALAGETQPGEKRRRMACTCPNCKDGEKRSGEQGKKKHVCHIPDCGKTFRKTSLLRAHVRLHTGERPFVCNWFFCGKRFTRSDELQRHARTHTGDKRFECAQCQKRFMRSDHLTKHYKTHLVTKNL

SEQ ID NO: 9480 - protein, 606 aa, Homo sapiens
MAATAAVSPSDYLQPAASTTQDSQPSPLALLAATCSKIGPPAVEAAVTPPAPPQPTPRKLVPIKPAPLPLSPGKNSFGILSSKGNILQIQGSQLSASYPGGQLVFAIQNPTMINKGTRSNANIQYQAVPQIQASNSQTIQVQPNLTNQIQIIPGTNQAIITPSPSSHKPVPIKPAPIQKSSTTTTPVQSGANVVKLTGGGGNVTLTLPVNNLVNASDTGAPTQLLTESPPTPLSKTNKKARKKSLPASQPPVAVAEQVETVLIETTADNIIQAGNNLLIVQSPGGGQPAVVQQVQVVPPKAEQQQVVQIPQQALRVVQAASATLPTVPQKPSQNFQIQAAEPTPTQVYIRTPSGEVQTVLVQDSPPATAAATSNTTCSSPASRAPHLSGTSKKHSAAILRKERPLPKIAPAGSIISLNAAQLAAAAQAMQTININGVQVQGVPVTITNTGGQQQLTVQNVSGNNLTISGLSPTQIQLQMEQALAGETQPGEKRRRMACTCPNCKDGEKRSGEQGKKKHVCHIPDCGKTFRKTSLLRAHVRLHTGERPFVCNWFFCGKRFTRSDELQRHARTHTGDKRFECAQCQKRFMRSDHLTKHYKTHLVTKNL

SEQ ID NO: 9481 - protein, 739 aa, Homo sapiens
MATLPAEPSAGPAAGGEAVAAAAATEEEEEEARQLLQTLQAAEGEAAAAAGAGAGAAAAGAEGPGSPGVPGSPPEAASEPPTGLRFSPEQVACVCEALLQAGHAGRLSRFLGALPPAERLRGSDPVLRARALVAFQRGEYAELYRLLESRPFPAAHHAFLQDLYLRARYHEAERARGRALGAVDKYRLRKKFPLPKTIWDGEETVYCFKERSRAALKACYRGNRYPTPDEKRRLATLTGLSLTQVSNWFKNRRQRDRTGAGGGAPCKSESDGNPTTEDESSRSPEDLERGAAPVSAEAAAQGSIFLAGTGPPAPCPASSSILVNGSFLAASGSPAVLLNGGPVIINGLALGEASSLGPLLLTGGGGAPPPQPSPQGASETKTSLVLDPQTGEVRLEEAQSEAPETKGAQVAAPGPALGEEVLGPLAQVVPGPPTAATFPLPPGPVPAVAAPQVVPLSPPPGYPTGLSPTSPLLNLPQVVPTSQVVTLPQAVGPLQLLAAGPGSPVKVAAAAGPANVHLINSGVGVTALQLPSATAPGNFLLANPVSGSPIVTGVALQQGKIILTATFPTSMLVSQVLPPAPGLALPLKPETAISVPEGGLPVAPSPALPEAHALGTLSAQQPPPAAATTSSTSLPFSPDSPGLLPNFPAPPPEGLMLSPAAVPVWSAGLELSAGTEGLLEAEKGLGTQAPHTVLRLPDPDPEGLLLGATAGGEVDEGLEAEAKVLTQLQSVPVEEPLEL

SEQ ID NO: 9482 - protein, 93 aa, Homo sapiens
MKLLMVLMLAALSQHCYAGSGCPLLENVISKTINPQVSKTEYKELLQEFIDDNATTNAIDELKECFLNQTDETLSNVEVFMQLIYDSSLCDLF

SEQ ID NO: 9483 - protein, 90 aa, Homo sapiens
MKLLMVLMLAALSQHCYAGSGCPLLENVISKTINPQVSKTEYKELLQEFIDDNATTNAIDELKECFLNQTDETLSNVEQLIYDSSLCDLF

SEQ ID NO: 9484 - protein, 599 aa, Homo sapiens
MDGSRRVRATSVLPRYGPPCLFKGHLSTKSNAFCTDSSSLRLSTLQLVKNHMAVHYNKILSAKAAVDCSVPVSVSTSIKYADQQRREKLKKELAQCEKEFKLTKTAMRANYKNNSKSLFNTLQKPSGEPQIEDDMLKEEMNGFSSFARSLVPSSERLHLSLHKSSKVITNGPEKNSSSSPSSVDYAASGPRKLSSGALYGRRPRSTFPNSHRFQLVISKAPSGDLLDKHSELFSNKQLPFTPRTLKTEAKSFLSQYRYYTPAKRKKDFTDQRIEAETQTELSFKSELGTAETKNMTDSEMNIKQASNCVTYDAKEKIAPLPLEGHDSTWDEIKDDALQHSSPRAMCQYSLKPPSTRKIYSDEEELLYLSFIEDVTDEILKLGLFSNRFLERLFERHIKQNKHLEEEKMRHLLHVLKVDLGCTSEENSVKQNDVDMLNVFDFEKAGNSEPNELKNESEVTIQQERQQYQKALDMLLSAPKDENEIFPSPTEFFMPIYKSKHSEGVIIQQVNDETNLETSTLDENHPSISDSLTDRETSVNVIEGDSDPEKVEISNGLCGLNTSPSQSVQFSSVKGDNNHDMELSTLKIMEMSIEDCPLDV

SEQ ID NO: 9485 - protein, 567 aa, Homo sapiens
MDGSRRVRATSVLPRYGPPCLFKGHLSTKSNAAVDCSVPVSVSTSIKYADQQRREKLKKELAQCEKEFKLTKTAMRANYKNNSKSLFNTLQKPSGEPQIEDDMLKEEMNGFSSFARSLVPSSERLHLSLHKSSKVITNGPEKNSSSSPSSVDYAASGPRKLSSGALYGRRPRSTFPNSHRFQLVISKAPSGDLLDKHSELFSNKQLPFTPRTLKTEAKSFLSQYRYYTPAKRKKDFTDQRIEAETQTELSFKSELGTAETKNMTDSEMNIKQASNCVTYDAKEKIAPLPLEGHDSTWDEIKDDALQHSSPRAMCQYSLKPPSTRKIYSDEEELLYLSFIEDVTDEILKLGLFSNRFLERLFERHIKQNKHLEEEKMRHLLHVLKVDLGCTSEENSVKQNDVDMLNVFDFEKAGNSEPNELKNESEVTIQQERQQYQKALDMLLSAPKDENEIFPSPTEFFMPIYKSKHSEGVIIQQVNDETNLETSTLDENHPSISDSLTDRETSVNVIEGDSDPEKVEISNGLCGLNTSPSQSVQFSSVKGDNNHDMELSTLKIMEMSIEDCPLDV

SEQ ID NO: 9486 - protein, 458 aa, Homo sapiens
MDGSRRVRATSVLPRYGPPCLFKGHLSTKSNAFCTDSSSLRLSTLQLVKNHMAVHYNKILSAKAAVDCSVPVSVSTSIKYADQQRREKLKKELAQCEKEFKLTKTAMRANYKNNSKSLFNTLQKPSGEPQIEDDMLKEEMNGFSSFARSLVPSSERLHLSLHKSSKVITNGPEKNSSSSPSSVDYAASGPRKLSSGALYGRRPRSTFPNSHRFQLVISKAPSGDLLDKHSELFSNKQLPFTPRTLKTEAKSFLSQYRYYTPAKRKKDFTDQRIEAETQTELSFKSELGTAETKNMTDSEMNIKQASNCVTYDAKEKIAPLPLEGHDSTWDEIKDDALQHSSPRAMCQYSLKPPSTRKIYSDEEELLYLSFIEDVTDEILKLGLFSNRFLERLFERHIKQNKHLEEEKMRHLLHVLKVDLGCTSEENSFSSVKGDNNHDMELSTLKIMEMSIEDCPLDV

SEQ ID NO: 9487 - protein, 494 aa, Homo sapiens
MEQKEGKLSEDGTTVSPAADNPEMSGGGAPAEETKGTAGKAINEGPPTESGKQEKAPAEDGMSAELQGEANGLDEVKVESQREAGGKEDAEAELKKEDGEKEETTVGSQEMTGRKEETKSEPKEAEEKESTLASEKQKAEEKEAKPESGQKADANDRDKPEPKATVEEEDAKTASQEETGQRKECSTEPKEKATDEEAKAESQKAVVEDEAKAEPKEPDGKEEAKHGAKEEADAKEEAEDAEEAEPGSPSEEQEQDVEKEPEGGAGVIPSSPEEWPESPTGEGHNLSTDGLGPDCVASGQTSPSASESSPSDVPQSPPESPSSGEKKEKAPERRVSAPARPRGPRAQNRKAIVDKFGGAASGPTALFRNTKAAGAAIGGVKNMLLEWCRAMTKKYEHVDIQNFSSSWSSGMAFCALIHKFFPDAFDYAELDPAKRRHNFTLAFSTAEKLADCAQLLDVDDMVRLAVPDSKCVYTYIQELYRSLVQKGLVKTKKK

SEQ ID NO: 9488 - protein, 1193 aa, Homo sapiens
MWRVKKLSLSLSPSPQTGKPSMRTPLRELTLQPGALTNSGKRSPACSSLTPSLCKLGLQEGSNNSSPVDFVNNKRTDLSSEHFSHSSKWLETCQHESDEQPLDPIPQISSTPKTSEEAVDPLGNYMVKTIVLVPSPLGQQQDMIFEARLDTMAETNSISLNGPLRTDDLVREEVAPCMGDRFSEVAAVSEKPIFQESPSHLLEESPPNPCSEQLHCSKESLSSRTEAVREDLVPSESNAFLPSSVLWLSPSTALAADFRVNHVDPEEEIVEHGAMEEREMRFPTHPKESETEDQALVSSVEDILSTCLTPNLVEMESQEAPGPAVEDVGRILGSDTESWMSPLAWLEKGVNTSVMLENLRQSLSLPSMLRDAAIGTTPFSTCSVGTWFTPSAPQEKSTNTSQTGLVGTKHSTSETEQLLCGRPPDLTALSRHDLEDNLLSSLVILEVLSRQLRDWKSQLAVPHPETQDSSTQTDTSHSGITNKLQHLKESHEMGQALQQARNVMQSWVLISKELISLLHLSLLHLEEDKTTVSQESRRAETLVCCCFDLLKKLRAKLQSLKAEREEARHREEMALRGKDAAEIVLEAFCAHASQRISQLEQDLASMREFRGLLKDAQTQLVGLHAKQEELVQQTVSLTSTLQQDWRSMQLDYTTWTALLSRSRQLTEKLTVKSQQALQERDVAIEEKQEVSRVLEQVSAQLEECKGQTEQLELENSRLATDLRAQLQILANMDSQLKELQSQHTHCAQDLAMKDELLCQLTQSNEEQAAQWQKEEMALKHMQAELQQQQAVLAKEVRDLKETLEFADQENQVAHLELGQVECQLKTTLEVLRERSLQCENLKDTVENLTAKLASTIADNQEQDLEKTRQYSQKLGLLTEQLQSLTLFLQTKLKEKTEQETLLLSTACPPTQEHPLPNDRTFLGSILTAVADEEPESTPVPLLGSDKSAFTRVASMVSLQPAETPGMEESLAEMSIMTTELQSLCSLLQESKEEAIRTLQRKICELQARLQAQEEQHQEVQKAKEADIEKLNQALCLRYKNEKELQEVIQQQNEKILEQIDKSGELISLREEVTHLTRSLRRAETETKVLQEALAGQLDSNCQPMATNWIQEKVWLSQEVDKLRVMFLEMKNEKEKLMIKFQSHRNILEENLRRSDKELEKLDDIVQHIYKTLLSIPEVVRGCKELQGLLEFLS

SEQ ID NO: 9489 - protein, 1413 aa, Homo sapiens
MRHGVAWALLVAAALGLGARGVRGAVALADFYPFGAERGDAVTPKQDDGGSGLRPLSVPFPFFGAEHSGLYVNNNGIISFLKEVSQFTPVAFPIAKDRCVVAAFWADVDNRRAGDVYYREATDPAMLRRATEDVRHYFPELLDFNATWVFVATWYRVTFFGGSSSSPVNTFQTVLITDGKLSFTIFNYESIVWTTGTHASSGGNATGLGGIAAQAGFNAGDGQRYFSIPGSRTADMAEVETTTNVGVPGRWAFRIDDAQVRVGGCGHTTSVCLALRPCLNGGKCIDDCVTGNPSYTCSCLSGFTGRRCHLDVNECASQPCQNGGTCTHGINSFRCQCPAGFGGPTCETAQSPCDTKECQHGGQCQVENGSAVCVCQAGYTGAACEMDVDDCSPDPCLNGGSCVDLVGNYTCLCAEPFKGLRCETGDHPVPDACLSAPCHNGGTCVDADQGYVCECPEGFMGLDCRERVPDDCECRNGGRCLGANTTLCQCPLGFFGLLCEFEITAMPCNMNTQCPDGGYCMEHGGSYLCVCHTDHNASHSLPSPCDSDPCFNGGSCDAHDDSYTCECPRGFHGKHCEKARPHLCSSGPCRNGGTCKEAGGEYHCSCPYRFTGRHCEIGKPDSCASGPCHNGGTCFHYIGKYKCDCPPGFSGRHCEIAPSPCFRSPCVNGGTCEDRDTDFFCHCQAGYMGRRCQAEVDCGPPEEVKHATLRFNGTRLGAVALYACDRGYSLSAPSRIRVCQPHGVWSEPPQCLEIDECRSQPCLHGGSCQDRVAGYLCLCSTGYEGAHCELERDECRAHPCRNGGSCRNLPGAYVCRCPAGFVGVHCETEVDACDSSPCQHGGRCESGGGAYLCVCPESFFGYHCETVSDPCFSSPCGGRGYCLASNGSHSCTCKVGYTGEDCAKELFPPTALKMERVEESGVSISWNPPNGPAARQMLDGYAVTYVSSDGSYRRTDFVDRTRSSHQLQALAAGRAYNISVFSVKRNSNNKNDISRPAVLLARTRPRPVEGFEVTNVTASTISVQWALHRIRHATVSGVRVSIRHPEALRDQATDVDRSVDRFTFRALLPGKRYTIQLTTLSGLRGEEHPTESLATAPTHVWTRPLPPANLTAARVTATSAHVVWDAPTPGSLLEAYVINVTTSQSTKSRYVPNGKLASYTVRDLLPGRRYQLSVIAVQSTELGPQHSEPAHLYIITSPRDGADRRWHQGGHHPRVLKNRPPPARLPELRLLNDHSAPETPTQPPRFSELVDGRGRVSARFGGSPSKAATVRSQPTASAQLENMEEAPKRVSLALQLPEHGSKDIGNVPGNCSENPCQNGGTCVPGADAHSCDCGPGFKGRRCELACIKVSRPCTRLFSETKAFPVWEGGVCHHVYKRVYRVHQDICFKESCESTSLKKTPNRKQSKSQTLEKS

SEQ ID NO: 9490 - protein, 1352 aa, Homo sapiens
MRHGVAWALLVAAALGLGARGVRGAVALADFYPFGAERGDAVTPKQDDGGSGLRPLSVPFPFFGAEHSGLYVNNNGIISFLKEVSQFTPVAFPIAKDRCVVAAFWADVDNRRAGDVYYREATDPAMLRRATEDVRHYFPELLDFNATWVFVATWYRVTFFGGSSSSPVNTFQTVLITDGKLSFTIFNYESIVWTTGTHASSGGNATGLGGIAAQAGFNAGDGQRYFSIPGSRTADMAEVETTTNVGVPGRWAFRIDDAQVRVGGCGHTTSVCLALRPCLNGGKCIDDCVTGNPSYTCSCLSGFTGRRCHLDVNECASQPCQNGGTCTHGINSFRCQCPAGFGGPTCETAQSPCDTKECQHGGQCQVENGSAVCVCQAGYTGAACEMDVDDCSPDPCLNGGSCVDLVGNYTCLCAEPFKGLRCETGDHPVPDACLSAPCHNGGTCVDADQGYVCECPEGFMGLDCRERVPDDCECRNGGRCLGANTTLCQCPLGFFGLLCEFEITAMPCNMNTQCPDGGYCMEHGGSYLCVCHTDHNASHSLPSPCDSDPCFNGGSCDAHDDSYTCECPRGFHGKHCEKARPHLCSSGPCRNGGTCKEAGGEYHCSCPYRFTGRHCEIGKPDSCASGPCHNGGTCFHYIGKYKCDCPPGFSGRHCEIAPSPCFRSPCVNGGTCEDRDTDFFCHCQAGYMGRRCQAEVDCGPPEEVKHATLRFNGTRLGAVALYACDRGYSLSAPSRIRVCQPHGVWSEPPQCLEIDECRSQPCLHGGSCQDRVAGYLCLCSTGYEGAHCELERDECRAHPCRNGGSCRNLPGAYVCRCPAGFVGVHCETEVDACDSSPCQHGGRCESGGGAYLCVCPESFFGYHCETVSDPCFSSPCGGRGYCLASNGSHSCTCKVGYTGEDCAKELFPPTALKMERVEESGVSISWNPPNGPAARQMLDGYAVTYVSSDGSYRRTDFVDRTRSSHQLQALAAGRAYNISVFSVKRNSNNKNDISRPAVLLARTRPRPVEGFEVTNVTASTISVQWALHRIRHATVSGVRVSIRHPEALRDQATDVDRSVDRFTFRALLPGKRYTIQLTTLSGLRGEEHPTESLATAPTHVWTRPLPPANLTAARVTATSAHVVWDAPTPGSLLEAYVINVTTSQSTKSRYVPNGKLASYTVRDLLPGRRYQLSVIAVQSTELGPQHSEPAHLYIITSPRDGADRRWHQGGHHPRVLKNRPPPARLPELRLLNDHSAPETPTQPPRFSELVDGRGRVSARFGGSPSKAATVRSHVPGNCSENPCQNGGTCVPGADAHSCDCGPGFKGRRCELACIKVSRPCTRLFSETKAFPVWEGGVCHHVKQSKSQTLEKS

SEQ ID NO: 9491 - protein, 1365 aa, Homo sapiens
MRHGVAWALLVAAALGLGARGVRGAVALADFYPFGAERGDAVTPKQDDGGSGLRPLSVPFPFFGAEHSGLYVNNNGIISFLKEVSQFTPVAFPIAKDRCVVAAFWADVDNRRAGDVYYREATDPAMLRRATEDVRHYFPELLDFNATWVFVATWYRVTFFGGSSSSPVNTFQTVLITDGKLSFTIFNYESIVWTTGTHASSGGNATGLGGIAAQAGFNAGDGQRYFSIPGSRTADMAEVETTTNVGVPGRWAFRIDDAQVRVGGCGHTTSVCLALRPCLNGGKCIDDCVTGNPSYTCSCLSGFTGRRCHLDVNECASQPCQNGGTCTHGINSFRCQCPAGFGGPTCETAQSPCDTKECQHGGQCQVENGSAVCVCQAGYTGAACEMDVDDCSPDPCLNGGSCVDLVGNYTCLCAEPFKGLRCETGDHPVPDACLSAPCHNGGTCVDADQGYVCECPEGFMGLDCRERVPDDCECRNGGRCLGANTTLCQCPLGFFGLLCEFEITAMPCNMNTQCPDGGYCMEHGGSYLCVCHTDHNASHSLPSPCDSDPCFNGGSCDAHDDSYTCECPRGFHGKHCEKARPHLCSSGPCRNGGTCKEAGGEYHCSCPYRFTGRHCEIGKPDSCASGPCHNGGTCFHYIGKYKCDCPPGFSGRHCEIAPSPCFRSPCVNGGTCEDRDTDFFCHCQAGYMGRRCQAEVDCGPPEEVKHATLRFNGTRLGAVALYACDRGYSLSAPSRIRVCQPHGVWSEPPQCLEIDECRSQPCLHGGSCQDRVAGYLCLCSTGYEGAHCELERDECRAHPCRNGGSCRNLPGAYVCRCPAGFVGVHCETEVDACDSSPCQHGGRCESGGGAYLCVCPESFFGYHCETVSDPCFSSPCGGRGYCLASNGSHSCTCKVGYTGEDCAKELFPPTALKMERVEESGVSISWNPPNGPAARQMLDGYAVTYVSSDGSYRRTDFVDRTRSSHQLQALAAGRAYNISVFSVKRNSNNKNDISRPAVLLARTRPRPVEGFEVTNVTASTISVQWALHRIRHATVSGVRVSIRHPEALRDQATDVDRSVDRFTFRALLPGKRYTIQLTTLSGLRGEEHPTESLATAPTHVWTRPLPPANLTAARVTATSAHVVWDAPTPGSLLEAYVINVTTSQSTKSRYVPNGKLASYTVRDLLPGRRYQLSVIAVQSTELGPQHSEPAHLYIITSPRDGADRRWHQGGHHPRVLKNRPPPARLPELRLLNDHSAPETPTQPPRFSELVDGRGRVSARFGGSPSKAATVRSHVPGNCSENPCQNGGTCVPGADAHSCDCGPGFKGRRCELACIKVSRPCTRLFSETKAFPVWEGGVCHHVYKRVYRVHQDICFKESCESTSLKL

SEQ ID NO: 9492 - protein, 1324 aa, Homo sapiens
MRHGVAWALLVAAALGLGARGVRGAVALADFYPFGAERGDAVTPKQDDGGSGLRPLSVPFPFFGAEHSGLYVNNNGIISFLKEVSQFTPVAFPIAKDRCVVAAFWADVDNRRAGDVYYREATDPAMLRRATEDVRHYFPELLDFNATWVFVATWYRVTFFGGSSSSPVNTFQTVLITDGKLSFTIFNYESIVWTTGTHASSGGNATGLGGIAAQAGFNAGDGQRYFSIPGSRTADMAEVETTTNVGVPGRWAFRIDDAQVRVGGCGHTTSVCLALRPCLNGGKCIDDCVTGNPSYTCSCLSGFTGRRCHLDVNECASQPCQNGGTCTHGINSFRCQCPAGFGGPTCETAQSPCDTKECQHGGQCQVENGSAVCVCQAGYTGAACEMDVDDCSPDPCLNGGSCVDLVGNYTCLCAEPFKGLRCETGDHPVPDACLSAPCHNGGTCVDADQGYVCECPEGFMGLDCRERVPDDCECRNGGRCLGANTTLCQCPLGFFGLLCEFEITAMPCNMNTQCPDGGYCMEHGGSYLCVCHTDHNASHSLPSPCDSDPCFNGGSCDAHDDSYTCECPRGFHGKHCEKARPHLCSSGPCRNGGTCKEAGGEYHCSCPYRFTGRHCEIGKPDSCASGPCHNGGTCFHYIGKYKCDCPPGFSGRHCEIAPSPCFRSPCVNGGTCEDRDTDFFCHCQAGYMGRRCQAEVDCGPPEEVKHATLRFNGTRLGAVALYACDRGYSLSAPSRIRVCQPHGVWSEPPQCLEIDECRSQPCLHGGSCQDRVAGYLCLCSTGYEGAHCELERDECRAHPCRNGGSCRNLPGAYVCRCPAGFVGVHCETEVDACDSSPCQHGGRCESGGGAYLCVCPESFFGYHCETVSDPCFSSPCGGRGYCLASNGSHSCTCKVGYTGEDCAKELFPPTALKMERVEESGVSISWNPPNGPAARQMLDGYAVTYVSSDGSYRRTDFVDRTRSSHQLQALAAGRAYNISVFSVKRNSNNKNDISRPAVLLARTRPRPVEGFEVTNVTASTISVQWALHRIRHATVSGVRVSIRHPEALRDQATDVDRSVDRFTFRALLPGKRYTIQLTTLSGLRGEEHPTESLATAPTHVWTRPLPPANLTAARVTATSAHVVWDAPTPGSLLEAYVINVTTSQSTKSRYVPNGKLASYTVRDLLPGRRYQLSVIAVQSTELGPQHSEPAHLYIITSPRDGADRRWHQGGHHPRVLKNRPPPARLPELRLLNDHSAPETPTQPPRFSELVDGRGRVSARFGGSPSKAATVRSQPTASAQLENMEEAPKRVSLALQLPEHGSKDIGSESAALVGTLGLTDCSQGP

SEQ ID NO: 9493 - protein, 52 aa, Homo sapiens
MKDIGHLQHLAQRLQWNRRAVNICGMHGWTKDLSPHSRMPSMLEHVKHYMSC

SEQ ID NO: 9494 - protein, 180 aa, Homo sapiens
MEQPTSSTNGEKRKSPCESNNKKNDEMQEAPNRVLAPKQSLQKTKTIEYLTIIVYYYRKHTKINSNQLEKDQSRENSINPVQEEEDEGLDSAEGSSQEDEDLDSSEGSSQEDEDLDSSEGSSQEDEDLDSSEGSSQEDEDLDSSEGSSQEDEDLDPPEGSSQEDEDLDSSEGSSQEGGED

SEQ ID NO: 9495 - protein, 699 aa, Homo sapiens
MGHHRPWLHASVLWAGVASLLLPPAMTQQLRGDGLGFRNRNNSTGVAGLSEEASAELRHHLHSPRDHPDENKDVSTENGHHFWSHPDREKEDEDVSKEYGHLLPGHRSQDHKVGDEGVSGEEVFAEHGGQARGHRGHGSEDTEDSAEHRHHLPSHRSHSHQDEDEDEVVSSEHHHHILRHGHRGHDGEDDEGEEEEEEEEEEEEASTEYGHQAHRHRGHGSEEDEDVSDGHHHHGPSHRHQGHEEDDDDDDDDDDDDDDDDVSIEYRHQAHRHQGHGIEEDEDVSDGHHHRDPSHRHRSHEEDDNDDDDVSTEYGHQAHRHQDHRKEEVEAVSGEHHHHVPDHRHQGHRDEEEDEDVSTERWHQGPQHVHHGLVDEEEEEEEITVQFGHYVASHQPRGHKSDEEDFQDEYKTEVPHHHHHRVPREEDEEVSAELGHQAPSHRQSHQDEETGHGQRGSIKEMSHHPPGHTVVKDRSHLRKDDSEEEKEKEEDPGSHEEDDESSEQGEKGTHHGSRDQEDEEDEEEGHGLSLNQEEEEEEDKEEEEEEEDEERREERAEVGAPLSPDHSEEEEEEEEGLEEDEPRFTIIPNPLDRREEAGGASSEEESGEDTGPQDAQEYGNYQPGSLCGYCSFCNRCTECESCHCDEENMGEHCDQCQHCQFCYLCPLVCETVCAPGSYVDYFSSSLYQALADMLETPEP

SEQ ID NO: 9496 - protein, 244 aa, Homo sapiens
MGDLFSLFWEVDPPPIPVNCAIPNQDYECWKDDSCGTIGSFLLWYFVIVFVLMFFSRASVWMSEDKKDEGSGTSTSVRKASKETSCKRQSKDSAWDPSQTMKKPKQNQLTPVTNSEVALVNAYPEQRRARRQSQFNEVNQNQHDSDTTEYGSEESNSEASSWKESESEHHPSPDSIKRRKMAQRQRNLGSYQMSERHCLHCKALRTNEWLAHHSRQKPSVTPPMKRDSQEESSISDINKKFSKF

SEQ ID NO: 9497 - protein, 1071 aa, Homo sapiens
MTSPAKFKKDKEIIAEYDTQVKEIRAQLTEQMKCLDQQCELRVQLLQDLQDFFRKKAEIEMDYSRNLEKLAERFLAKTRSTKDQQFKKDQNVLSPVNCWNLLLNQVKRESRDHTTLSDIYLNNIIPRFVQVSEDSGRLFKKSKEVGQQLQDDLMKVLNELYSVMKTYHMYNADSISAQSKLKEAEKQEEKQIGKSVKQEDRQTPRSPDSTANVRIEEKHVRRSSVKKIEKMKEKRQAKYTENKLKAIKARNEYLLALEATNASVFKYYIHDLSDLIDQCCDLGYHASLNRALRTFLSAELNLEQSKHEGLDAIENAVENLDATSDKQRLMEMYNNVFCPPMKFEFQPHMGDMASQLCAQQPVQSELVQRCQQLQSRLSTLKIENEEVKKTMEATLQTIQDIVTVEDFDVSDCFQYSNSMESVKSTVSETFMSKPSIAKRRANQQETEQFYFTKMKEYLEGRNLITKLQAKHDLLQKTLGESQRTDCSLARRSSTVRKQDSSQAIPLVVESCIRFISRHGLQHEGIFRVSGSQVEVNDIKNAFERGEDPLAGDQNDHDMDSIAGVLKLYFRGLEHPLFPKDIFHDLMACVTMDNLQERALHIRKVLLVLPKTTLIIMRYLFAFLNHLSQFSEENMMDPYNLAICFGPSLMSVPEGHDQVSCQAHVNELIKTIIIQHENIFPSPRELEGPVYSRGGSMEDYCDSPHGETTSVEDSTQDVTAEHHTSDDECEPIEAIAKFDYVGRTARELSFKKGASLLLYQRASDDWWEGRHNGIDGLIPHQYIVVQDTEDGVVERSSPKSEIEVISEPPEEKVTARAGASCPSGGHVADIYLANINKQRKRPESGSIRKTFRSDSHGLSSSLTDSSSPGVGASCRPSSQPIMSQSLPKEGPDKCSISGHGSLNSISRHSSLKNRLDSPQIRKTATAGRSKSFNNHRPMDPEVIAQDIEATMNSALNELRELERQSSVKHTPDVVLDTLEPLKTSPVVAPTSEPSSPLHTQLLKDPEPAFQRSASTAGDIACAFRPVKSVKMAAPVKPPATRPKPTVFPKTNATSPGVNSSTSPQSTDKSCTV

SEQ ID NO: 9498 - protein, 802 aa, Homo sapiens
MWIQVRTIDGSKTCTIEDVSRKATIEELRERVWALFDVRPECQRLFYRGKQLENGYTLFDYDVGLNDIIQLLVRPDPDHLPGTSTQIEAKPCSNSPPKVKKAPRVGPSNQPSTSARARLIDPGFGIYKVNELVDARDVGLGAWFEAHIHSVTRASDGQSRGKTPLKNGSSCKRTNGNIKHKSKENTNKLDSVPSTSNSDCVAADEDVIYHIQYDEYPESGTLEMNVKDLRPRARTILKWNELNVGDVVMVNYNVESPGQRGFWFDAEITTLKTISRTKKELRVKIFLGGSEGTLNDCKIISVDEIFKIERPGAHPLSFADGKFLRRNDPECDLCGGDPEKKCHSCSCRVCGGKHEPNMQLLCDECNVAYHIYCLNPPLDKVPEEEYWYCPSCKTDSSEVVKAGERLKMSKKKAKMPSASTESRRDWGRGMACVGRTRECTIVPSNHYGPIPGIPVGSTWRFRVQVSEAGVHRPHVGGIHGRSNDGAYSLVLAGGFADEVDRGDEFTYTGSGGKNLAGNKRIGAPSADQTLTNMNRALALNCDAPLDDKIGAESRNWRAGKPVRVIRSFKGRKISKYAPEEGNRYDGIYKVVKYWPEISSSHGFLVWRYLLRRDDVEPAPWTSEGIERSRRLCLRLQYPAGYPSDKEGKKPKGQSKKQPSGTTKRPISDDDCPSASKVYKASDSAEAIEAFQLTPQQQHLIREDCQNQKLWDEVLSHLVEGPNFLKKLEQSFMCVCCQELVYQPVTTECFHNVCKDCLQRSFKAQVFSCPACRHDLGQNYIMIPNEILQTLLDLFFPGYSKGR

SEQ ID NO: 9499 - protein, 503 aa, Homo sapiens
MWIQVRTIDGSKTCTIEDVSRKATIEELRERVWALFDVRPECQRLFYRGKQLENGYTLFDYDVGLNDIIQLLVRPDPDHLPGTSTQIEAKPCSNSPPKVKKAPRVGPSNQPSTSARARLIDPGFGIYKVNELVDARDVGLGAWFEAHIHSVTRASDGQSRGKTPLKNGSSCKRTNGNIKHKSKENTNKLDSVPSTSNSDCVAADEDVIYHIQYDEYPESGTLEMNVKDLRPRARTILKWNELNVGDVVMVNYNVESPGQRGFWFDAEITTLKTISRTKKELRVKIFLGGSEGTLNDCKIISVDEIFKIERPGAHPLSFADGKFLRRNDPECDLCGGDPEKKCHSCSCRVCGGKHEPNMQLLCDECNVAYHIYCLNPPLDKVPEEEYWYCPSCKTDSSEVVKAGERLKMSKKKAKMPSASTESRRDWGRGMACVGRTRECTIVPSNHYGPIPGIPVGSTWRFRVQVSEAGVHRPHVGGIHGRSNDGAYSLVLAGGFADEVLTEL

SEQ ID NO: 9500 - protein, 663 aa, Homo sapiens
MGPLRESKKEHRVQHHDKEISRSRIPRLILRPHMPQQQHKVSPASESPFSEEESREFNPSSSGRSARTVSSNSFCSDDTGCPSSQSVSPVKTPSDAGNSPIGFCPGSDEGFTRKKCTIGMVGEGSIQSSRYKKESKSGLVKPGSEADFSSSSSTGSISAPEVHMSTAGSKRSSSSRNRGPHGRSNGASSHKPGSSPSSPREKDLLSMLCRNQLSPVNIHPSYAPSSPSSSNSGSYKGSDCSPIMRRSGRYMSCGENHGVRPPNPEQYLTPLQQKEVTVRHLKTKLKESERRLHERESEIVELKSQLARMREDWIEEECHRVEAQLALKEARKEIKQLKQVIETMRSSLADKDKGIQKYFVDINIQNKKLESLLQSMEMAHSGSLRDELCLDFPCDSPEKSLTLNPPLDTMADGLSLEEQVTGEGADRELLVGDSIANSTDLFDEIVTATTTESGDLELVHSTPGANVLELLPIVMGQEEGSVVVERAVQTDVVPYSPAISELIQSVLQKLQDPCPSSLASPDESEPDSMESFPESLSALVVDLTPRNPNSAILLSPVETPYANVDAEVHANRLMRELDFAACVEERLDGVIPLARGGVVRQYWSSSFLVDLLAVAAPVVPTVLWAFSTQRGGTDPVYNIGALLRGCCVVALHSLRRTAFRIKT

SEQ ID NO: 9501 - protein, 595 aa, Homo sapiens
MGPFWARKDDTGCPSSQSVSPVKTPSDAGNSPIGFCPGSDEGFTRKKCTIGMVGEGSIQSSRYKKESKSGLVKPGSEADFSSSSSTGSISAPEVHMSTAGSKRSSSSRNRGPHGRSNGASSHKPGSSPSSPREKDLLSMLCRNQLSPVNIHPSYAPSSPSSSNSGSYKGSDCSPIMRRSGRYMSCGENHGVRPPNPEQYLTPLQQKEVTVRHLKTKLKESERRLHERESEIVELKSQLARMREDWIEEECHRVEAQLALKEARKEIKQLKQVIETMRSSLADKDKGIQKYFVDINIQNKKLESLLQSMEMAHSGSLRDELCLDFPCDSPEKSLTLNPPLDTMADGLSLEEQVTGEGADRELLVGDSIANSTDLFDEIVTATTTESGDLELVHSTPGANVLELLPIVMGQEEGSVVVERAVQTDVVPYSPAISELIQSVLQKLQDPCPSSLASPDESEPDSMESFPESLSALVVDLTPRNPNSAILLSPVETPYANVDAEVHANRLMRELDFAACVEERLDGVIPLARGGVVRQYWSSSFLVDLLAVAAPVVPTVLWAFSTQRGGTDPVYNIGALLRGCCVVALHSLRRTAFRIKT

SEQ ID NO: 9502 - protein, 662 aa, Homo sapiens
MGPLRESKEHRVQHHDKEISRSRIPRLILRPHMPQQQHKVSPASESPFSEEESREFNPSSSGRSARTVSSNSFCSDDTGCPSSQSVSPVKTPSDAGNSPIGFCPGSDEGFTRKKCTIGMVGEGSIQSSRYKKESKSGLVKPGSEADFSSSSSTGSISAPEVHMSTAGSKRSSSSRNRGPHGRSNGASSHKPGSSPSSPREKDLLSMLCRNQLSPVNIHPSYAPSSPSSSNSGSYKGSDCSPIMRRSGRYMSCGENHGVRPPNPEQYLTPLQQKEVTVRHLKTKLKESERRLHERESEIVELKSQLARMREDWIEEECHRVEAQLALKEARKEIKQLKQVIETMRSSLADKDKGIQKYFVDINIQNKKLESLLQSMEMAHSGSLRDELCLDFPCDSPEKSLTLNPPLDTMADGLSLEEQVTGEGADRELLVGDSIANSTDLFDEIVTATTTESGDLELVHSTPGANVLELLPIVMGQEEGSVVVERAVQTDVVPYSPAISELIQSVLQKLQDPCPSSLASPDESEPDSMESFPESLSALVVDLTPRNPNSAILLSPVETPYANVDAEVHANRLMRELDFAACVEERLDGVIPLARGGVVRQYWSSSFLVDLLAVAAPVVPTVLWAFSTQRGGTDPVYNIGALLRGCCVVALHSLRRTAFRIKT

SEQ ID NO: 9503 - protein, 660 aa, Homo sapiens
MSNFEKEHRVQHHDKEISRSRIPRLILRPHMPQQQHKVSPASESPFSEEESREFNPSSSGRSARTVSSNSFCSDDTGCPSSQSVSPVKTPSDAGNSPIGFCPGSDEGFTRKKCTIGMVGEGSIQSSRYKKESKSGLVKPGSEADFSSSSSTGSISAPEVHMSTAGSKRSSSSRNRGPHGRSNGASSHKPGSSPSSPREKDLLSMLCRNQLSPVNIHPSYAPSSPSSSNSGSYKGSDCSPIMRRSGRYMSCGENHGVRPPNPEQYLTPLQQKEVTVRHLKTKLKESERRLHERESEIVELKSQLARMREDWIEEECHRVEAQLALKEARKEIKQLKQVIETMRSSLADKDKGIQKYFVDINIQNKKLESLLQSMEMAHSGSLRDELCLDFPCDSPEKSLTLNPPLDTMADGLSLEEQVTGEGADRELLVGDSIANSTDLFDEIVTATTTESGDLELVHSTPGANVLELLPIVMGQEEGSVVVERAVQTDVVPYSPAISELIQSVLQKLQDPCPSSLASPDESEPDSMESFPESLSALVVDLTPRNPNSAILLSPVETPYANVDAEVHANRLMRELDFAACVEERLDGVIPLARGGVVRQYWSSSFLVDLLAVAAPVVPTVLWAFSTQRGGTDPVYNIGALLRGCCVVALHSLRRTAFRIKT

SEQ ID NO: 9504 - protein, 544 aa, Homo sapiens
MVGEGSIQSSRYKKESKSGLVKPGSEADFSSSSSTGSISAPEVHMSTAGSKRSSSSRNRGPHGRSNGASSHKPGSSPSSPREKDLLSMLCRNQLSPVNIHPSYAPSSPSSSNSGSYKGSDCSPIMRRSGRYMSCGENHGVRPPNPEQYLTPLQQKEVTVRHLKTKLKESERRLHERESEIVELKSQLARMREDWIEEECHRVEAQLALKEARKEIKQLKQVIETMRSSLADKDKGIQKYFVDINIQNKKLESLLQSMEMAHSGSLRDELCLDFPCDSPEKSLTLNPPLDTMADGLSLEEQVTGEGADRELLVGDSIANSTDLFDEIVTATTTESGDLELVHSTPGANVLELLPIVMGQEEGSVVVERAVQTDVVPYSPAISELIQSVLQKLQDPCPSSLASPDESEPDSMESFPESLSALVVDLTPRNPNSAILLSPVETPYANVDAEVHANRLMRELDFAACVEERLDGVIPLARGGVVRQYWSSSFLVDLLAVAAPVVPTVLWAFSTQRGGTDPVYNIGALLRGCCVVALHSLRRTAFRIKT

SEQ ID NO: 9505 - protein, 223 aa, Homo sapiens [sequence omitted]

SEQ ID NO: 9506 - protein, 1199 aa, Homo sapiens
MPLTGVEPARMNRKKGDKGFESPRPYKLTHQVVCINNINFQRKSVVGFVELTIFPTVANLNRIKLNSKQCRIYRVRINDLEAAFIYNDPTLEVCHSESKQRNLNYFSNAYAAAVSAVDPDAGNGELCIKVPSELWKHVDELKVLKIHINFSLDQPKGGLHFVVPSVEGSMAERGAHVFSCGYQNSTRFWFPCVDSYSELCTWKLEFTVDAAMVAVSNGDLVETVYTHDMRKKTFHYMLTIPTAASNISLAIGPFEILVDPYMHEVTHFCLPQLLPLLKHTTSYLHEVFEFYEEILTCRYPYSCFKTVFIDEAYVEVAAYASMSIFSTNLLHSAMIIDETPLTRRCLAQSLAQQFFGCFISRMSWSDEWVLKGISGYIYGLWMKKTFGVNEYRHWIKEELDKIVAYELKTGGVLLHPIFGGGKEKDNPASHLHFSIKHPHTLSWEYYSMFQCKAHLVMRLIENRISMEFMLQVFNKLLSLASTASSQKFQSHMWSQMLVSTSGFLKSISNVSGKDIQPLIKQWVDQSGVVKFYGSFAFNRKRNVLELEIKQDYTSPGTQKYVGPLKVTVQELDGSFNHTLQIEENSLKHDIPCHSKSRRNKKKKIPLMNGEEVDMDLSAMDADSPLLWIRIDPDMSVLRKVEFEQADFMWQYQLRYERDVVAQQESILALEKFPTPASRLALTDILEQEQCFYRVRMSACFCLAKIANSMVSTWTGPPAMKSLFTRMFCCKSCPNIVKTNNFMSFQSYFLQKTMPVAMALLRDVHNLCPKEVLTFILDLIKYNDNRKNKFSDNYYRAEMIDALANSVTPAVSVNNEVRTLDNLNPDVRLILEEITRFLNMEKLLPSYRHTITVSCLRAIRVLQKNGHVPSDPALFKSYAEYGHFVDIRIAALEAVVDYTKVDRSYEELQWLLNMIQNDPVPYVRHKILNMLTKNPPFTKNMESPLCNEALVDQLWKLMNSGTSHDWRLRCGAVDLYFTLFGLSRPSCLPLPELGLVLNLKEKKAVLNPTIIPESVAGNQEAANNPSSHPQLVGFQNPFSSSQDEEEIDMDTVHDSQAFISHHLNMLERPSTPGLSKYRPASSRSALIPQHSAGCDSTPTTKPQWSLELARKGTGKEQAPLEMSMHPAASAPLSVFTKESTASKHSDHHHHHHHEHKKKKKKHKHKHKHKHKHDSKEKDKEPFTFSSPASGRSIRSPSLSD

SEQ ID NO: 9507 - protein, 1108 aa, Homo sapiens
MRSEGAAPGPAAPLCGALSLLLGALLGKVIEGHGVTDNIQRFSSLPPYLPVSYHILRAETSFFLKEANQDLLRNSSLQARVESFFTYKTRQPPVLNASYGPFSVEKVVPLDLMLTSNFLGPTNKFSFDWKLKAHILRDKVYLSRPKVQVLFHIMGRDWDDHGAGEKLPCLRVFAFRETREVRGSCRLKGDLGLCVAELELLSSWFSAPTVGAGRKKSMDQPEGTPVELYYTVHPGNERGDCAGGDFRKGNAIRPGKDGLEETTSHLQRIGTVGLYRAQDSAQLSELRLDGNVVIWLPSRPVKQGEVVTAYVTISSNSSVDLFILRAKVKKGVNILSAQTREPRQWGVKQEVGSGGKHVTATVACQRLGPSPRNRSSSLFNEVVQMNFEIASFSSLSGTQPITWQVEYPRKGTTDIAVSEIFVSQKDLVGIVPLAMDTEILNTAVLTGKTVAMPIKVVSVEENSAVMDISESVECKSTDEDVIKVSERCDYIFVNGKEIKGKMDAVVNFTYQYLSAPLCVTVWVPRLPLQIEVSDTELSQIKGWRVPIVTNKRPTRESEDEDEEERRGRGCALQYQHATVRVLTQFVSEGAGPWGQPNYLLSPNWQFDITHLVADFMKLEEPHVATLQDSRVLVGREVGMTTIQVLSPLSDSILAEKTITVLDDKVSVTDLAIQLVAGLSVALYPNAENSKAVTAVVTAEEVLRTPKQEAVFSTWLQFSDGSVTPLDIYDTKDFSLAATSQDEAVVSVPQPRSPRWPVVVAEGEGQGPLIRVDMTIAEACQKSKRKSILAVGVGNVRVKFGQNDADSSPGGDYEEDEIKNHASDRRQKGQHHERTGQDGHLYGSSPVEREEGALRRATTTARSLLDNKVVKNSRADGGRLAGEGQLQNIPIDFTNFPAHVDLPKAGSGLEENDLVQTPRGLSDLEIGMYALLGVFCLAILVFLINCATFALKYRHKQVPLEGQASMTHSHDWVWLGNEAELLESMGDAPPPQDEHTTIIDRGPGACEESNHLLLNGGSHKHVQSQIHRSADSGGRQGREQKQDPLHSPTSKRKKVKFTTFTTIPPDDSCPTVNSIVSSNDEDIKWVCQDVAVGAPKELRNYLEKLKDKA

SEQ ID NO: 9508 - protein, 241 aa, Homo sapiens
MAPVRRSAKWRPGGIEARGEGVSTVGYRNKNVRQKTWRPNHPQAFVGSVREGQGFAFRRKLKIQQSYKKLLRKEKKAQTSLESQFTDRYPDNLKHLYLAEEERHRKQARKVDHPLSEQVHQPLLEEQCSIDEPLFEDQCSFDQPQPEEQCIKTVNSFTIPKKNKKKTSNQKAQEEYEQIQAKRAAKKQEFERRKQEREEAQRQYKKKKMEVFKILNKKTKKGQPNLNVQMEYLLQKIQEKC

SEQ ID NO: 9509 - protein, 346 aa, Homo sapiens
MDLDLLDLNPRIIAAIKKAKLKSVKEVLHFSGPDLKRLTNLSSPEVWHLLRTASLHLRGSSILTALQLHQQKERFPTQHQRLSLGCPVLDALLRGGLPLDGITELAGRSSAGKTQLALQLCLAVQFPRQHGGLEAGAVYICTEDAFPHKRLQQLMAQQPRLRTDVPGELLQKLRFGSQIFIEHVADVDTLLECVNKKVPVLLSRGMARLVVIDSVAAPFRCEFDSQASAPRARHLQSLGATLRELSSAFQSPVLCINQVTEAMEEQGAAHGPLGFWDERVSPALGITWANQLLVRLLADRLREEEAALGCPARTLRVLSAPHLPPSSCSYTISAEGVRGTPGTQSH

SEQ ID NO: 9510 - protein, 1298 aa, Homo sapiens
MEPPSCIQDEPFPHPLEPEPGVSAQPGPGKPSDKRFRLWYVGGSCLDHRTTLPMLPWLMAEIRRRSQKPEAGGCGAPAAREVILVLSAPFLRCVPAPGAGASGGTSPSATQPNPAVFIFEHKAQHISRFIHNSHDLTYFAYLIKAQPDDPESQMACHVFRATDPSQVPDVISSIRQLSKAAMKEDAKPSKDNEDAFYNSQKFEVLYCGKVTVTHKKAPSSLIDDCMEKFSLHEQQRLKIQGEQRGPDPGEDLADLEVVVPGSPGDCLPEEADGTDTHLGLPAGASQPALTSSRVCFPERILEDSGFDEQQEFRSRCSSVTGVQRRVHEGSQKSQPRRRHASAPSHVQPSDSEKNRTMLFQVGRFEINLISPDTKSVVLEKNFKDISSCSQGIKHVDHFGFICRESPEPGLSQYICYVFQCASESLVDEVMLTLKQAFSTAAALQSAKTQIKLCEACPMHSLHKLCERIEGLYPPRAKLVIQRHLSSLTDNEQADIFERVQKMKPVSDQEENELVILHLRQLCEAKQKTHVHIGEGPSTISNSTIPENATSSGRFKLDILKNKAKRSLTSSLENIFSRGANRMRGRLGSVDSFERSNSLASEKDYSPGDSPPGTPPASPPSSAWQTFPEEDSDSPQFRRRAHTFSHPPSSTKRKLNLQDGRAQGVRSPLLRQSSSEQCSNLSSVRRMYKESNSSSSLPSLHTSFSAPSFTAPSFLKSFYQNSGRLSPQYENEIRQDTASESSDGEGRKRTSSTCSNESLSVGGTSVTPRRISWRQRIFLRVASPMNKSPSAMQQQDGLDRNELLPLSPLSPTMEEEPLVVFLSGEDDPEKIEERKKSKELRSLWRKAIHQQILLLRMEKENQKLEASRDELQSRKVKLDYEEVGACQKEVLITWDKKLLNCRAKIRCDMEDIHTLLKEGVPKSRRGEIWQFLALQYRLRHRLPNKQQPPDISYKELLKQLTAQQHAILVDLGRTFPTHPYFSVQLGPGQLSLFNLLKAYSLLDKEVGYCQGISFVAGVLLLHMSEEQAFEMLKFLMYDLGFRKQYRPDMMSLQIQMYQLSRLLHDYHRDLYNHLEENEISPSLYAAPWFLTLFASQFSLGFVARVFDIIFLQGTEVIFKVALSLLSSQETLIMECESFENIVEFLKNTLPDMNTSEMEKIITQVFEMDISKQLHAYEVEYHVLQDELQESSYSCEDSETLEKLERANSQLKRQNMDLLEKLQVAHTKIQALESNLENLLTRETKMKSLIRTLEQEKMAYQKTVEQLRKLLPADALVNCDLLLRDLNCNPNNKAKIGNKP

SEQ ID NO: 9511 - protein, 1235 aa, Homo sapiens
MEPPSCIQDEPFPHPLEPEPGVSAQPGPGKPSDKRFRLWYVGGSCLDHRTTLPMLPWLMAEIRRRSQKPEAGGCGAPAAREVILVLSAPFLRCVPAPGAGASGGTSPSATQPNPAVFIFEHKAQHISRFIHNSHDLTYFAYLIKAQPDDPESQMACHVFRATDPSQVPDVISSIRQLSKAAMKEDAKPSKDNEDAFYNSQKFEVLYCGKVTVTHKKAPSSLIDDCMEKFSLHEQQRLKIQGEQRGPDPGEDLADLEVVVPGSPGDCLPEEADGTDTHLGLPAGASQPALTSSRVCFPERILEDSGFDEQQEFRSRCSSVTGVQRRVHEGSQKSQPRRRHASAPSHVQPSDSEKNRTMLFQVGRFEINLISPDTKSVVLEKNFKDISSCSQGIKHVDHFGFICRESPEPGLSQYICYVFQCASESLVDEVMLTLKQAFSTAAALQSAKTQIKLCEACPMHSLHKLCERIEGLYPPRAKLVIQRHLSSLTDNEQADIFERVQKMKPVSDQEENELVILHLRQLCEAKQKTHVHIGEGPSTISNSTIPENATSSGRFKLDILKNKAKRSLTSSLENIFSRGANRMRGRLGSVDSFERSNSLASEKDYSPGDSPPGTPPASPPSSAWQTFPEEDSDSPQFRRRAHTFSHPPSSTKRKLNLQDGRAQGVRSPLLRQSSSEQCSDGEGRKRTSSTCSNESLSVGGTSVTPRRISWRQRIFLRVASPMNKSPSAMQQQDGLDRNELLPLSPLSPTMEEEPLVVFLSGEDDPEKIEERKKSKELRSLWRKAIHQQILLLRMEKENQKLEASRDELQSRKVKLDYEEVGACQKEVLITWDKKLLNCRAKIRCDMEDIHTLLKEGVPKSRRGEIWQFLALQYRLRHRLPNKQQPPDISYKELLKQLTAQQHAILVDLGRTFPTHPYFSVQLGPGQLSLFNLLKAYSLLDKEVGYCQGISFVAGVLLLHMSEEQAFEMLKFLMYDLGFRKQYRPDMMSLQIQMYQLSRLLHDYHRDLYNHLEENEISPSLYAAPWFLTLFASQFSLGFVARVFDIIFLQGTEVIFKVALSLLSSQETLIMECESFENIVEFLKNTLPDMNTSEMEKIITQVFEMDISKQLHAYEVEYHVLQDELQESSYSCEDSETLEKLERANSQLKRQNMDLLEKLQVAHTKIQALESNLENLLTRETKMKSLIRTLEQEKMAYQKTVEQLRKLLPADALVNCDLLLRDLNCNPNNKAKIGNKP

SEQ ID NO: 9512 - protein, 1290 aa, Homo sapiens
MEPPSCIQDEPFPHPLEPEPGVSAQPGPGKPSDKRFRLWYVGGSCLDHRTTLPMLPWLMAEIRRRSQKPEAGGCGAPAAREVILVLSAPFLRCVPAPGAGASGGTSPSATQPNPAVFIFEHKAQHISRFIHNSHDLTYFAYLIKAQPDDPESQMACHVFRATDPSQVPDVISSIRQLSKAAMKEDAKPSKDNEDAFYNSQKFEVLYCGKVTVTHKKAPSSLIDDCMEKFSLHEQQRLKIQGEQRGPDPGEDLADLEVVVPGSPGDCLPEEADGTDTHLGLPAGASQPALTSSRVCFPERILEDSGFDEQQEFRSRCSSVTGVQRRVHEGSQKSQPRRRHASAPSHVQPSDSEKNRTMLFQVGRFEINLISPDTKSVVLEKNFKDISSCSQGIKHVDHFGFICRESPEPGLSQYICYVFQCASESLVDEVMLTLKQAFSTAAALQSAKTQIKLCEACPMHSLHKLCERIEGLYPPRAKLVIQRHLSSLTDNEQADIFERVQKMKPVSDQEENELVILHLRQLCEAKQKTHVHIGEGPSTISNSTIPENATSSGRFKLDILKNKAKRSLTSSLENIFSRGANRMRGRLGSVDSFERSNSLASEKDYSPGDSPPGTPPASPPSSAWQTFPEEDSDSPQFRRRAHTFSHPPSSTKRKLNLQDGRAQGVRSPLLRQSSSEQCSNLSSVRRMYKESNSSSSLPSLHTSFSAPSFTAPSFLKSFYQNSGRLSPQYENEISDGEGRKRTSSTCSNESLSVGGTSVTPRRISWRQRIFLRVASPMNKSPSAMQQQDGLDRNELLPLSPLSPTMEEEPLVVFLSGEDDPEKIEERKKSKELRSLWRKAIHQQILLLRMEKENQKLEASRDELQSRKVKLDYEEVGACQKEVLITWDKKLLNCRAKIRCDMEDIHTLLKEGVPKSRRGEIWQFLALQYRLRHRLPNKQQPPDISYKELLKQLTAQQHAILVDLGRTFPTHPYFSVQLGPGQLSLFNLLKAYSLLDKEVGYCQGISFVAGVLLLHMSEEQAFEMLKFLMYDLGFRKQYRPDMMSLQIQMYQLSRLLHDYHRDLYNHLEENEISPSLYAAPWFLTLFASQFSLGFVARVFDIIFLQGTEVIFKVALSLLSSQETLIMECESFENIVEFLKNTLPDMNTSEMEKIITQVFEMDISKQLHAYEVEYHVLQDELQESSYSCEDSETLEKLERANSQLKRQNMDLLEKLQVAHTKIQALESNLENLLTRETKMKSLIRTLEQEKMAYQKTVEQLRKLLPADALVNCDLLLRDLNCNPNNKAKIGNKP

SEQ ID NO: 9513 - protein, 462 aa, Homo sapiens
MNKSPSAMQQQDGLDRNELLPLSPLSPTMEEEPLVVFLSGEDDPEKIEERKKSKELRSLWRKAIHQQILLLRMEKENQKLEGVPKSRRGEIWQFLALQYRLRHRLPNKQQPPDISYKELLKQLTAQQHAILVDLGRTFPTHPYFSVQLGPGQLSLFNLLKAYSLLDKEVGYCQGISFVAGVLLLHMSEEQAFEMLKFLMYDLGFRKQYRPDMMSLQIQMYQLSRLLHDYHRDLYNHLEENEISPSLYAAPWFLTLFASQFSLGFVARVFDIIFLQGTEVIFKVALSLLSSQETLIMECESFENIVEFLKNTLPDMNTSEMEKIITQVFEMDISKQLHAYEVEYHVLQDELQESSYSCEDSETLEKLERANSQLKRQNMDLLEKLQVAHTKIQALESNLENLLTRETKMKSLIRTLEQEKMAYQKTVEQLRKLLPADALVNCDLLLRDLNCNPNNKAKIGNKP

SEQ ID NO: 9514 - protein, 515 aa, Homo sapiens
MNKSPSAMQQQDGLDRNELLPLSPLSPTMEEEPLVVFLSGEDDPEKIEERKKSKELRSLWRKAIHQQILLLRMEKENQKLEASRDELQSRKVKLDYEEVGACQKEVLITWDKKLLNCRAKIRCDMEDIHTLLKEGVPKSRRGEIWQFLALQYRLRHRLPNKQQPPDISYKELLKQLTAQQHAILVDLGRTFPTHPYFSVQLGPGQLSLFNLLKAYSLLDKEVGYCQGISFVAGVLLLHMSEEQAFEMLKFLMYDLGFRKQYRPDMMSLQIQMYQLSRLLHDYHRDLYNHLEENEISPSLYAAPWFLTLFASQFSLGFVARVFDIIFLQGTEVIFKVALSLLSSQETLIMECESFENIVEFLKNTLPDMNTSEMEKIITQVFEMDISKQLHAYEVEYHVLQDELQESSYSCEDSETLEKLERANSQLKRQNMDLLEKLQVAHTKIQALESNLENLLTRETKMKSLIRTLEQEKMAYQKTVEQLRKLLPADALVNCDLLLRDLNCNPNNKAKIGNKP

SEQ ID NO: 9515 - protein, 300 aa, Homo sapiens
MLPLLAALLAAACPLPPVRGGAADAPGLLGVPSNASVNASSADEPIAPRLLASAAPGPPERPGPEEAAAAAAPCNISVQRQMLSSLLVRWGRPRGFQCDLLLFSTNAHGRAFFAAAFHRVGPPLLIEHLGLAAGGAQQDLRLCVGCGWVRGRRTGRLRPAAAPSAAAATAGAPTALPAYPAAEPPGPLWLQGEPLHFCCLDFSLEELQGEPGWRLNRKPIESTLVACFMTLVIVVWSVAALIWPVPIIAGFLPNGMEQRRTTASTTAATPAAVPAGTTAAAAAAAAAAAAAAVTSGVATK

SEQ ID NO: 9516 - protein, 286 aa, Homo sapiens
MLPLLAALLAAACPLPPVRGGAADAPGLLGVPSNASVNASSADEPIAPRLLASAAPGPPERPGPEEAAAAAAPCNISVQRQMLSSLLVRWGRPRGFQCDLLLFSTNAHGRAFFAAAFHRVGPPLLIEHLGLAAGGAQQDLRLCVGCGWVRGRRTGRLRPAAAPSAAAATAGAPTALPAYPAAEPPGPLWLQGEPLHFCCLDFSLEELQGEPGWRLNRKPIESTLVACFMTLVIVVWSVAALIWPVPIIAGFLPNGMEQRRTTASTTAATPAAAAAAAAVTSGVATK

SEQ ID NO: 9517 - protein, 186 aa, Homo sapiens
MSGISGCPFFLWGLLALLGLALVISLIFNISHYVEKQRQDKMYSYSSDHTRVDEYYIEDTPIYGNLDDMISEPMDENCYEQMKARPEKSVNKMQEATPSAQATNETQMCYASLDHSVKGKRRKPRKQNTHFSDKDGDEQLHAIDASVSKTTLVDSFSPESQAVEENIHDDPIRLFGLIRAKREPIN

SEQ ID NO: 9518 - protein, 181 aa, Homo sapiens
MASAGSGMEEVRVSVLTPLKLVGLVCIFLALCLDLGAVLSPAWVTADHQYYLSLWESCRKPASLDIWHCESTLSSDWQIATLALLLGGAAIILIAFLVGLISICVGSRRRFYRPVAVMLFAAVVLQVCSLVLYPIKFIETVSLKIYHEFNWGYGLAWGATIFSFGGAILYCLNPKNYEDYY

SEQ ID NO: 9519 - protein, 1199 aa, Homo sapiens
MASAGTQHYSIGLRQKNSFKQSGPSGTVPATPPEKPSEGRVWPQAHQQVKPIWKLEKKQVETLSAGLGPGLLGVPPQPAYFFCPSTLCSSGTTAVIAGHSSSCYLHSLPDLFNSTLLYRRSSYRQKPYQQLESFCLRSSPSEKSPFSLPQKSLPVSLTANKATSSMVFSMAQPMASSSTEPYLCLAAAGENPSGKSLASAISGKIPSPLSSSYKPMLNNNSFMWPNSTPVPLLQTTQGLKPVSPPKIQPVSWHHSGGTGDCAPQPVDHKVPKSIGTVPADASAHIALSTASSHDTSTTSVASSWYNRNNLAMRAEPLSCALDDSSDSQDPTKEIRFTEAVRKLTARGFEKMPRQGCQLEQSSFLNPSFQWNVLNRSRRWKPPAVNQQFPQEDAGSVRRVLPGASDTLGLDNTVFCTKRISIHLLASHASGLNHNPACESVIDSSAFGEGKAPGPPFPQTLGIANVATRLSSIQLGQSEKERPEEARELDSSDRDISSATDLQPDQAETEDTEEELVDGLEDCCSRDENEEEEGDSECSSLSAVSPSESVAMISRSCMEILTKPLSNHEKVVRPALIYSLFPNVPPTIYFGTRDERVEKLPWEQRKLLRWKMSTVTPNIVKQTIGRSHFKISKRNDDWLGCWGHHMKSPSFRSIREHQKLNHFPGSFQIGRKDRLWRNLSRMQSRFGKKEFSFFPQSFILPQDAKLLRKAWESSSRQKWIVKPPASARGIGIQVIHKWSQLPKRRPLLVQRYLHKPYLISGSKFDLRIYVYVTSYDPLRIYLFSDGLVRFASCKYSPSMKSLGNKFMHLTNYSVNKKNAEYQANADEMACQGHKWALKALWNYLSQKGVNSDAIWEKIKDVVVKTIISSEPYVTSLLKMYVRRPYSCHELFGFDIMLDENLKPWVLEVNISPSLHSSSPLDISIKGQMIRDLLNLAGFVLPNAEDIISSPSSCSSSTTSLPTSPGDKCRMAPEHVTAQKMKKAYYLTQKIPDQDFYASVLDVLTPDDVRILVEMEDEFSRRGQFERIFPSHISSRYLRFFEQPRYFNILTTQWEQKYHGNKLKGVDLLRSWCYKGFHMGVVSDSAPVWSLPTSLLTISKDDVILNAFSKSETSKLGKQSSCEVSLLLSEDGTTPKSKKTQAGLSPYPQKPSSSKDSEDTSKEPSLSTQTLPVIKCSGQTSRLSASSTFQSISDSLLAVSP

SEQ ID NO: 9520 - protein, 434 aa, Homo sapiens
MLRCLYHWHRPVLNRRWSRLCLPKQYLFTMKLQSPEFQSLFTEGLKSLTELFVKENHELRIAGGAVRDLLNGVKPQDIDFATTATPTQMKEMFQSAGIRMINNRGEKHGTITARLHEENFEITTLRIDVTTDGRHAEVEFTTDWQKDAERRDLTINSMFLGFDGTLFDYFNGYEDLKNKKVRFVGHAKQRIQEDYLRILRYFRFYGRIVDKPGDHDPETLEAIAENAKGLAGISGERIWVELKKILVGNHVNHLIHLIYDLDVAPYIGLPANASLEEFDKVSKNVDGFSPKPVTLLASLFKVQDDVTKLDLRLKIAKEEKNLGLFIVKNRKDLIKATDSSDPLKPYQDFIIDSREPDATTRVCELLKYQGEHCLLKEMQQWSIPPFPVSGHDIRKVGISSGKEIGALLQQLREQWKKSGYQMEKDELLSYIKKT

SEQ ID NO: 9521 - protein, 414 aa, Homo sapiens
MLRCLYHWHRPVLNRRWSRLCLPKQYLFTMKLQSPEFQSLFTEGLKSLTELFVKENHELRIAGGAVRDLLNGVKPQDIDFATTATPTQMKEMFQSAGIRMINNRGEKHGTITARLHEENFEITTLRIDVTTDGRHAEVEFTTDWQKDAERRDLTINSMFLGFDGTLFDYFNGYEDLKNKKVRFVGHAKQRIQEDYLRILRYFRFYGRIVDKPGDHDPETLEAIAENAKGLAGISGERIWVELKKILVGLPANASLEEFDKVSKNVDGFSPKPVTLLASLFKVQDDVTKLDLRLKIAKEEKNLGLFIVKNRKDLIKATDSSDPLKPYQDFIIDSREPDATTRVCELLKYQGEHCLLKEMQQWSIPPFPVSGHDIRKVGISSGKEIGALLQQLREQWKKSGYQMEKDELLSYIKKT

SEQ ID NO: 9522 - protein, 57 aa, Homo sapiens
MLRCLYHWHRPVLNRRWSRLCLPKQYLFTMKLQSPEFQSLFTEGLKSLTGINAFHEN

SEQ ID NO: 9523 - protein, 542 aa, Homo sapiens
MPLRDETLREVWASDSGHEEESLSPEAPRRPKQRPAPAQRLRKKRTEAPESPCPTGSKPRKPGAGRTGRPREEPSPDPAQARAPQTVYARFLRDPEAKKRDPRETFLVARAPDAEDEEEEEEEDEEDEEEEAEEKKEKILLPPKKPLREKSSADLKERRAKAQGPRGDLGSPDPPPKPLRVRNKEAPAGEGTKMRKTKKKGSGEADKDPSGSPASARKSPAAMFLVGEGSPDKKALKKKGTPKGARKEEEEEEEAATVIKKSNQKGKAKGKGKKKAKEERAPSPPVEVDEPREFVLRPAPQGRTVRCRLTRDKKGMDRGMYPSYFLHLDTEKKVFLLAGRKRKRSKTANYLISIDPTNLSRGGENFIGKLRSNLLGNRFTVFDNGQNPQRGYSTNVASLRQELAAVIYETNVLGFRGPRRMTVIIPGMSAENERVPIRPRNASDGLLVRWQNKTLESLIELHNKPPVWNDDSGSYTLNFQGRVTQASVKNFQIVHADDPDYIVLQFGRVAEDAFTLDYRYPLCALQAFAIALSSFDGKLACE

SEQ ID NO: 9524 - protein, 489 aa, Homo sapiens
MPLRDETLREVWASDSGHEEESLSPEAPRRPKQRPAPAQRLRKKRTEAPESPCPTGSKPRKPGEEEEEEEDEEDEEEEAEEKKEKILLPPKKPLREKSSADLKERRAKAQGPRGDLGSPDPPPKPLRVRNKEAPAGEGTKMRKTKKKGSGEADKDPSGSPASARKSPAAMFLVGEGSPDKKALKKKGTPKGARKEEEEEEEAATVIKKSNQKGKAKGKGKKKAKEERAPSPPVEVDEPREFVLRPAPQGRTVRCRLTRDKKGMDRGMYPSYFLHLDTEKKVFLLAGRKRKRSKTANYLISIDPTNLSRGGENFIGKLRSNLLGNRFTVFDNGQNPQRGYSTNVASLRQELAAVIYETNVLGFRGPRRMTVIIPGMSAENERVPIRPRNASDGLLVRWQNKTLESLIELHNKPPVWNDDSGSYTLNFQGRVTQASVKNFQIVHADDPDYIVLQFGRVAEDAFTLDYRYPLCALQAFAIALSSFDGKLACE

SEQ ID NO: 9525 - protein, 244 aa, Homo sapiens
MAAAASPAFLLCLPLLHLLSGWSRAGWVDTHCLCYDFIITPKSRPEPQWCEVQGLVDERPFLHYDCVNHKAKAFASLGKKVNVTKTWEEQTETLRDVVDFLKGQLLDIQVENLIPIEPLTLQARMSCEHEAHGHGRGSWQFLFNGQKFLLFDSNNRKWTALHPGAKKMTEKWEKNRDVTMFFQKISLGDCKMWLEEFLMYWEQMLDPTKPPSLAPGTTQPKAMATTLSPWSLLIIFLCFILAGR

SEQ ID NO: 9526 - protein, 318 aa, Homo sapiens
MNRFGTRLVGATATSSPPPKARSNENLDKIDMSLDDIIKLNRKEGKKQNFPRLNRRLLQQSGAQQFRMRVRWGIQQNSGFGKTSLNRRGRVMPGKRRPNGVITGLAARKTTGIRKGISPMNRPPLSDKNIEQYFPVLKRKANLLRQNEGQRKPVAVLKRPSQLSRKNNIPANFTRSGNKLNHQKDTRQATFLFRRGLKVQAQLNTEQLLDDVVAKRTRQWRTSTTNGGILTVSIDNPGAVQCPVTQKPRLTRTAVPSFLTKREQSDVKKVPKGVPLQFDINSVGKQTGMTLNERFGILKEQRATLTYNKGGSRFVTVG

SEQ ID NO: 9527 - protein, 292 aa, Homo sapiens
MEPSVIMGNDIIKLNRKEGKKQNFPRLNRRLLQQSGAQQFRMRVRWGIQQNSGFGKTSLNRRGRVMPGKRRPNGVITGLAARKTTGIRKGISPMNRPPLSDKNIEQYFPVLKRKANLLRQNEGQRKPVAVLKRPSQLSRKNNIPANFTRSGNKLNHQKDTRQATFLFRRGLKVQAQLNTEQLLDDVVAKRTRQWRTSTTNGGILTVSIDNPGAVQCPVTQKPRLTRTAVPSFLTKREQSDVKKVPKGVPLQFDINSVGKQTGMTLNERFGILKEQRATLTYNKGGSRFVTVG

SEQ ID NO: 9528 - protein, 251 aa, Homo sapiens
MRVRWGIQQNSGFGKTSLNRRGRVMPGKRRPNGVITGLAARKTTGIRKGISPMNRPPLSDKNIEQYFPVLKRKANLLRQNEGQRKPVAVLKRPSQLSRKNNIPANFTRSGNKLNHQKDTRQATFLFRRGLKVQAQLNTEQLLDDVVAKRTRQWRTSTTNGGILTVSIDNPGAVQCPVTQKPRLTRTAVPSFLTKREQSDVKKVPKGVPLQFDINSVGKQTGMTLNERFGILKEQRATLTYNKGGSRFVTVG

SEQ ID NO: 9529 - protein, 129 aa, Homo sapiens
MNRFGTRLVGATATSSPPPKARSNENLDKIDMSLDDIIKLNRKEGKKQNFPRLNRRLLQQSGAQQFRMRVRWGIQQNSGFGKTSLNRRGRVMPGKRRPNGVITGLAARKTTGIRKGISPMNRPPLSDKK

SEQ ID NO: 9530 - protein, 138 aa, Homo sapiens
MTWRQAVLLSCFSAVVLLSMLREGTSVSVGTMQMAGEEASEDAKQKIFMQESDASNFLKRRGKRSPKSRDEVNVENRQKLRVDELRREYYEEQRNEFENFVEEQNDEQEERSREAVEQWRQWHYDGLHPSYLYNRHHT

SEQ ID NO: 9531 - protein, 469 aa, Homo sapiens
MVISESMDILFRIRGGLDLAFQLATPNEIFLKKALKHVLSDLSTKLSSNALVFRICHSSVYIWPSSDINTIPGELTDASACKNILRFIQFEPEEDIKRKFMRKKDKKLSDMHQIVNIDLMLEMSTSLAAVTPIIERESGGHHYVNMTLPVDAVISVAPEETWGKVRKLLVDAIHNQLTDMEKCILKYMKGTSIVVPEPLHFLLPGKKNLVTISYPSGIPDGQLQAYRKELHDLFNLPHDRPYFKRSNAYHFPDEPYKDGYIRNPHTYLNPPNMETGMIYVVQGIYGYHHYMQDRIDDNGWGCAYRSLQTICSWFKHQGYTERSIPTHREIQQALVDAGDKPATFVGSRQWIGSIEVQLVLNQLIGITSKILFVSQGSEIASQGRELANHFQSEGTPVMIGGGVLAHTILGVAWNEITGQIKFLILDPHYTGAEDLQVILEKGWCGWKGPDFWNKDAYYNLCLPQRPNMI

SEQ ID NO: 9532 - protein, 517 aa, Homo sapiens
MLSSRAEAAMTAADRAIQRFLRTGAAVRYKVMKNWGVIGGIAAALAAGIYVIWGPITERKKRRKGLVPGLVNLGNTCFMNSLLQGLSACPAFIRWLEEFTSQYSRDQKEPPSHQYLSLTLLHLLKALSCQEVTDDEVLDASCLLDVLRMYRWQISSFEEQDAHELFHVITSSLEDERDRQPRVTHLFDVHSLEQQSEITPKQITCRTRGSPHPTSNHWKSQHPFHGRLTSNMVCKHCEHQSPVRFDTFDSLSLSIPAATWGHPLTLDHCLHHFISSESVRDVVCDNCTKIEAKGTLNGEKVEHQRTTFVKQLKLGKLPQCLCIHLQRLSWSSHGTPLKRHEHVQFNEFLMMDIYKYHLLGHKPSQHNPKLNKNPGPTLELQDGPGAPTPVLNQPGAPKTQIFMNGACSPSLLPTLSAPMPFPLPVVPDYSSSTYLFRLMAVVVHHGDMHSGHFVTYRRSPPSARNPLSTSNQWLWVSDDTVRKASLQEVLSSSAYLLFYERVLSRMQHQSQECKSEE

SEQ ID NO: 9533 - protein, 527 aa, Homo sapiens
MILSSYNTIQSVFCCCCCCSVQKRQMRTQISLSTDEELPEKYTQRRRPWLSQLSNKKQSNTGRVQPSKRKPLPPLPPSEVAEEKIQVKALYDFLPREPCNLALRRAEEYLILEKYNPHWWKARDRLGNEGLIPSNYVTENKITNLEIYEWYHRNITRNQAEHLLRQESKEGAFIVRDSRHLGSYTISVFMGARRSTEAAIKHYQIKKNDSGQWYVAERHAFQSIPELIWYHQHNAAGLMTRLRYPVGLMGSCLPATAGFSYEKWEIDPSELAFIKEIGSGQFGVVHLGEWRSHIQVAIKAINEGSMSEEDFIEEAKVMMKLSHSKLVQLYGVCIQRKPLYIVTEFMENGCLLNYLRENKGKLRKEMLLSVCQDICEGMEYLERNGYIHRDLAARNCLVSSTCIVKISDFGMTRYVLDDEYVSSFGAKFPIKWSPPEVFLFNKYSSKSDVWSFGVLMWEVFTEGKMPFENKSNLQVVEAISEGFRLYRPHLAPMSIYEVMYSCWHEKPEGRPTFAELLRAVTEIAETW

SEQ ID NO: 9534 - protein, 463 aa, Homo sapiens
MADGEEPEKKRRRIEELLAEKMAVDGGCGDTGDWEGRWNHVKKFLERSGPFTHPDFEPSTESLQFLLDTCKVLVIGAGGLGCELLKNLALSGFRQIHVIDMDTIDVSNLNRQFLFRPKDIGRPKAEVAAEFLNDRVPNCNVVPHFNKIQDFNDTFYRQFHIIVCGLDSIIARRWINGMLISLLNYEDGVLDPSSIVPLIDGGTEGFKGNARVILPGMTACIECTLELYPPQVNFPMCTIASMPRLPEHCIEYVRMLQWPKEQPFGEGVPLDGDDPEHIQWIFQKSLERASQYNIRGVTYRLTQGVVKRIIPAVASTNAVIAAVCATEVFKIATSAYIPLNNYLVFNDVDGLYTYTFEAERKENCPACSQLPQNIQFSPSAKLQEVLDYLTNSASLQMKSPAITATLEGKNRTLYLQSVTSIEERTRPNLSKTLKELGLVDGQELAVADVTTPQTVLFKLHFTS

SEQ ID NO: 9535 - protein, 449 aa, Homo sapiens
MADGEEPMAVDGGCGDTGDWEGRWNHVKKFLERSGPFTHPDFEPSTESLQFLLDTCKVLVIGAGGLGCELLKNLALSGFRQIHVIDMDTIDVSNLNRQFLFRPKDIGRPKAEVAAEFLNDRVPNCNVVPHFNKIQDFNDTFYRQFHIIVCGLDSIIARRWINGMLISLLNYEDGVLDPSSIVPLIDGGTEGFKGNARVILPGMTACIECTLELYPPQVNFPMCTIASMPRLPEHCIEYVRMLQWPKEQPFGEGVPLDGDDPEHIQWIFQKSLERASQYNIRGVTYRLTQGVVKRIIPAVASTNAVIAAVCATEVFKIATSAYIPLNNYLVFNDVDGLYTYTFEAERKENCPACSQLPQNIQFSPSAKLQEVLDYLTNSASLQMKSPAITATLEGKNRTLYLQSVTSIEERTRPNLSKTLKELGLVDGQELAVADVTTPQTVLFKLHFTS

SEQ ID NO: 9536 - protein, 93 aa, Homo sapiens
MPLASPIQHHEVTRGVAPSMALRDGVCRIPLSAEFTAQCTDSQAPQMKRAPRCCCLAVVAQCPHHCPVLGCWSGCRCCCYCVFELHWLYCIQE

SEQ ID NO: 9537 - protein, 459 aa, Homo sapiens
MAAPLEAQDQAPGEGEGLLIVKVEDSSWEQESAQHEDGRDSEACRQRFRQFCYGDVHGPHEAFSQLWELCCRWLRPELRTKEQILELLVLEQFLTVLPGEIQGWVREQHPGSGEEAVALVEDLQKQPVKAWRQDVPSEEAEPEAAGRGSQATGPPPTVGARRRPSVPQEQHSHSAQPPALLKEGRPGETTDTCFVSGVHGPVALGDIPFYFSREEWGTLDPAQRDLFWDIKRENSRNTTLGFGLKGQSEKSLLQEMVPVVPGQTGSDVTVSWSPEEAEAWESENRPRAALGPVVGARRGRPPTRRRQFRDLAAEKPHSCGQCGKRFRWGSDLARHQRTHTGEKPHKCPECDKSFRSSSDLVRHQGVHTGEKPFSCSECGKSFSRSAYLADHQRIHTGEKPFGCSDCGKSFSLRSYLLDHRRVHTGERPFGCGECDKSFKQRAHLIAHQSLHAKMAQPVG

SEQ ID NO: 9538 - protein, 301 aa, Homo sapiens
MCPRRRRNPRLQAGDPRPRGLPRRWGHGGGRLFPRSSTAIAGPVALGDIPFYFSREEWGTLDPAQRDLFWDIKRENSRNTTLGFGLKGQSEKSLLQEMVPVVPGQTGSDVTVSWSPEEAEAWESENRPRAALGPVVGARRGRPPTRRRQFRDLAAEKPHSCGQCGKRFRWGSDLARHQRTHTGEKPHKCPECDKSFRSSSDLVRHQGVHTGEKPFSCSECGKSFSRSAYLADHQRIHTGEKPFGCSDCGKSFSLRSYLLDHRRVHTGERPFGCGECDKSFKQRAHLIAHQSLHAKMAQPVG

SEQ ID NO: 9539 - protein, 506 aa, Homo sapiens
MPANGTSPQRFPALIPGEPGRSFEGSVSFEDVAVDFTRQEWHRLDPAQRTMHKDVMLETYSNLASVGLCVAKPEMIFKLERGEELWILEEESSGHGYSGSLSLLCGNGSVGDNALRHDNDLLHHQKIQTLDQNVEYNGCRKAFHEKTGFVRRKRTPRGDKNFECHECGKAYCRKSNLVEHLRIHTGERPYECGECAKTFSARSYLIAHQKTHTGERPFECNECGKSFGRKSQLILHTRTHTGERPYECTECGKTFSEKATLTIHQRTHTGEKPYECSECGKTFRVKISLTQHHRTHTGEKPYECGECGKNFRAKKSLNQHQRIHTGEKPYECGECGKFFRMKMTLNNHQRTHTGEKPYQCNECGKSFRVHSSLGIHQRIHTGEKPYECNECGNAFYVKARLIEHQRMHSGEKPYECSECGKIFSMKKSLCQHRRTHTGEKPYECSECGNAFYVKVRLIEHQRIHTGERPFECQECGKAFCRKAHLTEHQRTHIGWSWRCTMKKASH

SEQ ID NO: 9540 - protein, 741 aa, Homo sapiens
MLERKKPKTAENQKASEENEITQPGGSSAKPGLPCLNFEAVLSPDPALIHSTHSLTNSHAHTGSSDCDISCKGMTERIHSINLHNFSNSVLETLNEQRNRGHFCDVTVRIHGSMLRAHRCVLAAGSPFFQDKLLLGYSDIEIPSVVSVQSVQKLIDFMYSGVLRVSQSEALQILTAASILQIKTVIDECTRIVSQNVGDVFPGIQDSGQDTPRGTPESGTSGQSSDTESGYLQSHPQHSVDRIYSALYACSMQNGSGERSFYSGAVVSHHETALGLPRDHHMEDPSWITRIHERSQQMERYLSTTPETTHCRKQPRPVRIQTLVGNIHIKQEMEDDYDYYGQQRVQILERNESEECTEDTDQAEGTESEPKGESFDSGVSSSIGTEPDSVEQQFGPGAARDSQAEPTQPEQAAEAPAEGGPQTNQLETGASSPERSNEVEMDSTVITVSNSSDKSVLQQPSVNTSIGQPLPSTQLYLRQTETLTSNLRMPLTLTSNTQVIGTAGNTYLPALFTTQPAGSGPKPFLFSLPQPLAGQQTQFVTVSQPGLSTFTAQLPAPQPLASSAGHSTASGQGEKKPYECTLCNKTFTAKQNYVKHMFVHTGEKPHQCSICWRSFSLKDYLIKHMVTHTGVRAYQCSICNKRFTQKSSLNVHMRLHRGEKSYECYICKKKFSHKTLLERHVALHSASNGTPPAGTPPGARAGPPGVVACTEGTTYVCSVCPAKFDQIEQFNDHMRMHVSDG

SEQ ID NO: 9541 - protein, 668 aa, Homo sapiens
MTERIHSINLHNFSNSVLETLNEQRNRGHFCDVTVRIHGSMLRAHRCVLAAGSPFFQDKLLLGYSDIEIPSVVSVQSVQKLIDFMYSGVLRVSQSEALQILTAASILQIKTVIDECTRIVSQNVGDVFPGIQDSGQDTPRGTPESGTSGQSSDTESGYLQSHPQHSVDRIYSALYACSMQNGSGERSFYSGAVVSHHETALGLPRDHHMEDPSWITRIHERSQQMERYLSTTPETTHCRKQPRPVRIQTLVGNIHIKQEMEDDYDYYGQQRVQILERNESEECTEDTDQAEGTESEPKGESFDSGVSSSIGTEPDSVEQQFGPGAARDSQAEPTQPEQAAEAPAEGGPQTNQLETGASSPERSNEVEMDSTVITVSNSSDKSVLQQPSVNTSIGQPLPSTQLYLRQTETLTSNLRMPLTLTSNTQVIGTAGNTYLPALFTTQPAGSGPKPFLFSLPQPLAGQQTQFVTVSQPGLSTFTAQLPAPQPLASSAGHSTASGQGEKKPYECTLCNKTFTAKQNYVKHMFVHTGEKPHQCSICWRSFSLKDYLIKHMVTHTGVRAYQCSICNKRFTQKSSLNVHMRLHRGEKSYECYICKKKFSHKTLLERHVALHSASNGTPPAGTPPGARAGPPGVVACTEGTTYVCSVCPAKFDQIEQFNDHMRMHVSDG

SEQ ID NO: 9542 - protein, 700 aa, Homo sapiens
MTTFKEGLTFKDVAVVFTEEELGLLDPVQRNLYQDVMLENFRNLLSVGHHPFKHDVFLLEKEKKLDIMKTATQRKGKSADKIQSEVETVPEAGRHEELYWGQIWKQIASDLIKYEDSMISISRFPRQGDLSCQVRAGLYTTHTGQKFYQCDEYKKSFTDVFNFDLHQQLHSGEKSHTCDECGKSFCYISALHIHQRVHMGEKCYKCDVCGKEFSQSSHLQTHQRVHTVEKPFKCVECGKGFSRRSTLTVHCKLHSGEKPYNCEECGRAFIHASHLQEHQRIHTGEKPFKCDTCGKNFRRRSALNNHCMVHTGEKPYKCEDCGKCFTCSSNLRIHQRVHTGEKPYKCEECGKCFIQPSQFQAHRRIHTGEKPYVCKVCGKGFIYSSSFQAHQGVHTGEKPYKCNECGKSFRMKIHYQVHLVVHTGEKPYKCEVCGKAFRQSSYLKIHLKAHSVQKPFKCEECGQGFNQSSRLQIHQLIHTGEKPYKCEECGKGFSRRADLKIHCRIHTGEKPYNCEECGKVFSQASHLLTHQRVHSGEKPFKCEECGKSFSRSAHLQAHQKVHTGEKPYKCGECGKGFKWSLNLDMHQRVHTGEKPYTCGECGKHFSQASSLQLHQSVHTGEKPYKCDVCGKVFSRSSQLQYHRRVHTGEKPYKCEICGKRFSWRSNLVSHHKIHAAGTFYENDENSKNIRELSEGGSSTR

SEQ ID NO: 9543 - protein, 560 aa, Homo sapiens
MAAARLLPVPAGPQPLSFQAKLTFEDVAVLLSQDEWDRLCPAQRGLYRNVMMETYGNVVSLGLPGSKPDIISQLERGEDPWVLDRKGAKKSQGLWSDYSDNLKYDHTTACTQQDSLSCPWECETKGESQNTDLSPKPLISEQTVILGKTPLGRIDQENNETKQSFCLSPNSVDHREVQVLSQSMPLTPHQAVPSGERPYMCVECGKCFGRSSHLLQHQRIHTGEKPYVCSVCGKAFSQSSVLSKHRRIHTGEKPYECNECGKAFRVSSDLAQHHKIHTGEKPHECLECRKAFTQLSHLIQHQRIHTGERPYVCPLCGKAFNHSTVLRSHQRVHTGEKPHRCNECGKTFSVKRTLLQHQRIHTGEKPYTCSECGKAFSDRSVLIQHHNVHTGEKPYECSECGKTFSHRSTLMNHERIHTEEKPYACYECGKAFVQHSHLIQHQRVHTGEKPYVCGECGHAFSARRSLIQHERIHTGEKPFQCTECGKAFSLKATLIVHLRTHTGEKPYECNSCGKAFSQYSVLIQHQRIHTGEKPYECGECGRAFNQHGHLIQHQKVHRKL

SEQ ID NO: 9544 - protein, 443 aa, Homo sapiens
MAAARLLPVPAGPQAKLTFEDVAVLLSQDEWDRLCPAQRGLYRNVMMETYGNVVSLGLPGSKPDIISQLERGEDPWVLDRKGAKKSQGLWSDYSDNLKYDHTTACTQQDSLSCPWECETKGESQNTDLSPKPLISEQTVILGKTPLGRIDQENNETKQSFCLSPNSVDHREVQVLSQSMPLTPHQAVPSGERPYMCVECGKCFGRSSHLLQHQRIHTGEKPYVCSVCGKAFSQSSVLSKHRRIHTGEKPYECNECGKAFRVSSDLAQHHKIHTGEKPHECLECRKAFTQLSHLIQHQRIHTGERPYVCPLCGKAFNHSTVLRSHQRVHTGEKPHRCNECGKTFSVKRTLLQHQRIHTGEKPFQCTECGKAFSLKATLIVHLRTHTGEKPYECNSCGKAFSQYSVLIQHQRIHTGEKPYECGECGRAFNQHGHLIQHQKVHRKL

SEQ ID NO: 9545 - protein, 555 aa, Homo sapiens
MAAARLLPVPAGPQAKLTFEDVAVLLSQDEWDRLCPAQRGLYRNVMMETYGNVVSLGLPGSKPDIISQLERGEDPWVLDRKGAKKSQGLWSDYSDNLKYDHTTACTQQDSLSCPWECETKGESQNTDLSPKPLISEQTVILGKTPLGRIDQENNETKQSFCLSPNSVDHREVQVLSQSMPLTPHQAVPSGERPYMCVECGKCFGRSSHLLQHQRIHTGEKPYVCSVCGKAFSQSSVLSKHRRIHTGEKPYECNECGKAFRVSSDLAQHHKIHTGEKPHECLECRKAFTQLSHLIQHQRIHTGERPYVCPLCGKAFNHSTVLRSHQRVHTGEKPHRCNECGKTFSVKRTLLQHQRIHTGEKPYTCSECGKAFSDRSVLIQHHNVHTGEKPYECSECGKTFSHRSTLMNHERIHTEEKPYACYECGKAFVQHSHLIQHQRVHTGEKPYVCGECGHAFSARRSLIQHERIHTGEKPFQCTECGKAFSLKATLIVHLRTHTGEKPYECNSCGKAFSQYSVLIQHQRIHTGEKPYECGECGRAFNQHGHLIQHQKVHRKL

SEQ ID NO: 9546 - protein, 500 aa, Homo sapiens
MDSSSFIQFDVPEYSSTVLSQLNELRLQGKLCDIIVHIQGQPFRAHKAVLAASSPYFRDHSALSTMSGLSISVIKNPNVFEQLLSFCYTGRMSLQLKDVVSFLTAASFLQMQCVIDKCTQILESIHSKISVGDVDSVTVGAEENPESRNGVKDSSFFANPVEISPPYCSQGRQPTASSDLRMETTPSKALRSRLQEEGHSDRGSSGSVSEYEIQIEGDHEQGDLLVRESQITEVKVKMEKSDRPSCSDSSSLGDDGYHTEMVDGEQVVAVNVGSYGSVLQHAYSYSQAASQPTNVSEAFGSLSNSSPSRSMLSCFRGGRARQKRALSVHLHSDLQGLVQGSDSEAMMNNPGYESSPRERSARGHWYPYNERLICIYCGKSFNQKGSLDRHMRLHMGITPFVCKFCGKKYTRKDQLEYHIRGHTDDKPFRCEICGKCFPFQGTLNQHLRKNHPGVAEVRSRIESPERTDVYVEQKLENDASASEMGLDSRMEIHTVSDAPD

SEQ ID NO: 9547 - protein, 424 aa, Homo sapiens
MAAESDVLHFQFEQQGDVVLQKMNLLRQQNLFCDVSIYINDTEFQGHKVILAACSTFMRDQFLLTQSKHVRITILQSAEVGRKLLLSCYTGALEVKRKELLKYLTAASYLQMVHIVEKCTEALSKYLEIDLSMKNNNQHTDLCQSSDPDVKNEDENSDKDCEIIEISEDSPVNIDFHVKEEESNALQSTVESLTSERKEMKSPELSTVDIGFKDNEICILHVESISTAGVENGQFSQPCTSSKASMYFSETQHSLINSTVESRVAEVPGNQDQGLFCENTEGSYGTVSEIQNLEEGYSLRHQCPRCPRGFLHVENYLRHLKMHKLFLCLQCGKTFTQKKNLNRHIRGHMGIRPFQCTVCLKTFTAKSTLQDHLNIHSGDRPYKCHCCDMDFKHKSALKKHLTSVHGRSSGEKLSRPDLKRQSLL

SEQ ID NO: 9548 - protein, 648 aa, Homo sapiens
MATAVEPEDQDLWEEEGILMVKLEDDFTCRPESVLQRDDPVLETSHQNFRRFRYQEAASPREALIRLRELCHQWLRPERRTKEQILELLVLEQFLTVLPGELQSWVRGQRPESGEEAVTLVEGLQKQPRRPRRWVTVHVHGQEVLSEETVHLGVEPESPNELQDPVQSSTPEQSPEETTQSPDLGAPAEQRPHQEEELQTLQESEVPVPEDPDLPAERSSGDSEMVALLTALSQGLVTFKDVAVCFSQDQWSDLDPTQKEFYGEYVLEEDCGIVVSLSFPIPRPDEISQVREEEPWVPDIQEPQETQEPEILSFTYTGDRSKDEEECLEQEDLSLEDIHRPVLGEPEIHQTPDWEIVFEDNPGRLNERRFGTNISQVNSFVNLRETTPVHPLLGRHHDCSVCGKSFTCNSHLVRHLRTHTGEKPYKCMECGKSYTRSSHLARHQKVHKMNAPYKYPLNRKNLEETSPVTQAERTPSVEKPYRCDDCGKHFRWTSDLVRHQRTHTGEKPFFCTICGKSFSQKSVLTTHQRIHLGGKPYLCGECGEDFSEHRRYLAHRKTHAAEELYLCSECGRCFTHSAAFAKHLRGHASVRPCRCNECGKSFSRRDHLVRHQRTHTGEKPFTCPTCGKSFSRGYHLIRHQRTHSEKTS

SEQ ID NO: 9549 - protein, 424 aa, Homo sapiens
MVALLTALSQGLVTFKDVAVCFSQDQWSDLDPTQKEFYGEYVLEEDCGIVVSLSFPIPRPDEISQVREEEPWVPDIQEPQETQEPEILSFTYTGDRSKDEEECLEQEDLSLEDIHRPVLGEPEIHQTPDWEIVFEDNPGRLNERRFGTNISQVNSFVNLRETTPVHPLLGRHHDCSVCGKSFTCNSHLVRHLRTHTGEKPYKCMECGKSYTRSSHLARHQKVHKMNAPYKYPLNRKNLEETSPVTQAERTPSVEKPYRCDDCGKHFRWTSDLVRHQRTHTGEKPFFCTICGKSFSQKSVLTTHQRIHLGGKPYLCGECGEDFSEHRRYLAHRKTHAAEELYLCSECGRCFTHSAAFAKHLRGHASVRPCRCNECGKSFSRRDHLVRHQRTHTGEKPFTCPTCGKSFSRGYHLIRHQRTHSEKTS

SEQ ID NO: 9550 - protein, 467 aa, Homo sapiens
MEPGTNSFRVEFPDFSSTILQKLNQQRQQGQLCDVSIVVQGHIFRAHKAVLAASSPYFCDQVLLKNSRRIVLPDVMNPRVFENILLSSYTGRLVMPAPEIVSYLTAASFLQMWHVVDKCTEVLEGNPTVLCQKLNHGSDHQSPSSSSYNGLVESFELGSGGHTDFPKAQELRDGENEEESTKDELSSQLTEHEYLPSNSSTEHDRLSTEMASQDGEEGASDSAEFHYTRPMYSKPSIMAHKRWIHVKPERLEQACEGMDVHATYDEHQVTESINTVQTEHTVQPSGVEEDFHIGEKKVEAEFDEQADESNYDEQVDFYGSSMEEFSGERSDGNLIGHRQEAALAAGYSENIEMVTGIKEEASHLGFSATDKLYPCQCGKSFTHKSQRDRHMSMHLGLRPYGCGVCGKKFKMKHHLVGHMKIHTGIKPYECNICAKRFMWRDSFHRHVTSCTKSYEAAKAEQNTTEAN

SEQ ID NO: 9551 - protein, 3703 aa, Homo sapiens
MEGCDSPVVSGKDNGCGIPQHQQWTELNSTHLPDKPSSMEQSTGESHGPLDSLRAPFNERLAESTASAGPPSEPASKEVTCNECSASFASLQTYMEHHCPSARPPPPLREESASDTGEEGDEESDVENLAGEIVYQPDGSAYIVESLSQLTQGGGACGSGSGSGPLPSLFLNSLPGAGGKQGDPSCAAPVYPQIINTFHIASSFGKWFEGPDQAFPNTSALAGLSPVLHSFRVFDVRHKSNKDYLNSDGSAKSSCVSKDVPNNVDLSKFDGFVLYGKRKPILMCFLCKLSFGYVRSFVTHAVHDHRMTLSEDERKILSNKNISAIIQGIGKDKEPLVSFLEPKNKNFQHPLVSTANLIGPGHSFYGKFSGIRMEGEEALPAGSAAGPEQPQAGLLTPSTLLNLGGLTSSVLKTPITSVPLGPLASSPTKSSEGKDSGAAEGEKQEVGDGDCFSEKVEPAEEEAEEEEEEEEAEEEEEEEEEEEEEEEDEGCKGLFPSELDEELEDRPHEEPGAAAGSSSKKDLALSNQSISNSPLMPNVLQTLSRGTASTSSNSASSFVVFDGANRRNRLSFNSEGVRANVAEGGRRLDFADESANKDNATAPEPNESTEGDDGGFVPHHQHAGSLCELGVGECPSGSGVECPKCDTVLGSSRSLGGHMTMMHSRNSCKTLKCPKCNWHYKYQQTLEAHMKEKHPEPGGSCVYCKSGQPHPRLARGESYTCGYKPFRCEVCNYSTTTKGNLSIHMQSDKHLNNMQNLQNGGGEQVFSHTAGAAAAAVAAAAAAANISSSCGAPSPTKPKTKPTWRCEVCDYETNVARNLRIHMTSEKHMHNMMLLQQNMTQIQHNRHLGLGSLPSPAEAELYQYYLAQNMNLPNLKMDSAASDAQFMMSGFQLDPAGPMAAMTPALVGGEIPLDMRLGGGQLVSEELMNLGESFIQTNDPSLKLFQCAVCNKFTTDNLDMLGLHMNVERSLSEDEWKAVMGDSYQCKLCRYNTQLKANFQLHCKTDKHVQKYQLVAHIKEGGKANEWRLKCVAIGNPVHLKCNACDYYTNSLEKLRLHTVNSRHEASLKLYKHLQQHESGVEGESCYYHCVLCNYSTKAKLNLIQHVRSMKHQRSESLRKLQRLQKGLPEEDEDLGQIFTIRRCPSTDPEEAIEDVEGPSETAADPEELAKDQEGGASSSQAEKELTDSPATSKRISFPGSSESPLSSKRPKTAEEIKPEQMYQCPYCKYSNADVNRLRVHAMTQHSVQPMLRCPLCQDMLNNKIHLQLHLTHLHSVAPDCVEKLIMTVTTPEMVMPSSMFLPAAVPDRDGNSNLEEAGKQPETSEDLGKNILPSASTEQSGDLKPSPADPGSVREDSGFICWKKGCNQVFKTSAALQTHFNEVHAKRPQLPVSDRHVYKYRCNQCSLAFKTIEKLQLHSQYHVIRAATMCCLCQRSFRTFQALKKHLETSHLELSEADIQQLYGGLLANGDLLAMGDPTLAEDHTIIVEEDKEEESDLEDKQSPTGSDSGSVQEDSGSEPKRALPFRKGPNFTMEKFLDPSRPYKCTVCKESFTQKNILLVHYNSVSHLHKLKRALQESATGQPEPTSSPDNKPFKCNTCNVAYSQSSTLEIHMRSVLHQTKARAAKLEAASGSSNGTGNSSSISLSSSTPSPVSTSGSNTFTTSNPSSAGIAPSSNLLSQVPTESVGMPPLGNPIGANIASPSEPKEANRKKLADMIASRQQQQQQQQQQQQQQQQQQQAQTLAQAQAQVQAHLQQELQQQAALIQSQLFNPTLLPHFPMTTETLLQLQQQQHLLFPFYIPSAEFQLNPEVSLPVTSGALTLTGTGPGLLEDLKAQVQVPQQSHQQILPQQQQNQLSIAQSHSALLQPSQHPEKKNKLVIKEKEKESQRERDSAEGGEGNTGPKETLPDALKAKEKKELAPGGGSEPSMLPPRIASDARGNATKALLENFGFELVIQYNENKQKVQKKNGKTDQGENLEKLECDSCGKLFSNILILKSHQEHVHQNYFPFKQLERFAKQYRDHYDKLYPLRPQTPEPPPPPPPPPPPPLPAAPPQPASTPAIPASAPPITSPTIAPAQPSVPLTQLSMPMELPIFSPLMMQTMPLQTLPAQLPPQLGPVEPLPADLAQLYQHQLNPTLLQQQNKRPRTRITDDQLRVLRQYFDINNSPSEEQIKEMADKSGLPQKVIKHWFRNTLFKERQRNKDSPYNFSNPPITSLEELKIDSRPPSPEPPKQEYWGSKRSSRTRFTDYQLRVLQDFFDANAYPKDDEFEQLSNLLNLPTRVIVVWFQNARQKARKNYENQGEGKDGERRELTNDRYIRTSNLNYQCKKCSLVFQRIFDLIKHQKKLCYKDEDEEGQDDSQNEDSMDAMEILTPTSSSCSTPMPSQAYSAPAPSANNTASSAFLQLTAEAEELATFNSKTEAGDEKPKLAEAPSAQPNQTQEKQGQPKPELQQQEQPEQKTNTPQQKLPQLVSLPSLPQPPPQAPPPQCPLPQSSPSPSQLSHLPLKPLHTSTPQQLANLPPQLIPYQCDQCKLAFPSFEHWQEHQQLHFLSAQNQFIHPQFLDRSLDMPFMLFDPSNPLLASQLLSGAIPQIPASSATSPSTPTSTMNTLKRKLEEKASASPGENDSGTGGEEPQRDKRLRTTITPEQLEILYQKYLLDSNPTRKMLDHIAHEVGLKKRVVQVWFQNTRARERKGQFRAVGPAQAHRRCPFCRALFKAKTALEAHIRSRHWHEAKRAGYNLTLSAMLLDCDGGLQMKGDIFDGTSFSHLPPSSSDGQGVPLSPVSKTMELSPRTLLSPSSIKVEGIEDFESPSMSSVNLNFDQTKLDNDDCSSVNTAITDTTTGDEGNADNDSATGIATETKSSSAPNEGLTKAAMMAMSEYEDRLSSGLVSPAPSFYSKEYDNEGTVDYSETSSLADPCSPSPGASGSAGKSGDSGDRPGQKRFRTQMTNLQLKVLKSCFNDYRTPTMLECEVLGNDIGLPKRVVQVWFQNARAKEKKSKLSMAKHFGINQTSYEGPKTECTLCGIKYSARLSVRDHIFSQQHISKVKDTIGSQLDKEKEYFDPATVRQLMAQQELDRIKKANEVLGLAAQQQGMFDNTPLQALNLPTAYPALQGIPPVLLPGLNSPSLPGFTPSNTALTSPKPNLMGLPSTTVPSPGLPTSGLPNKPSSASLSSPTPAQATMAMGPQQPPQQQQQQQQPQVQQPPPPPAAQPPPTPQLPLQQQQQRKDKDSEKVKEKEKAHKGKGEPLPVPKKEKGEAPTATAATISAPLPTMEYAVDPAQLQALQAALTSDPTALLTSQFLPYFVPGFSPYYAPQIPGALQSGYLQPMYGMEGLFPYSPALSQALMGLSPGSLLQQYQQYQQSLQEAIQQQQQRQLQQQQQQKVQQQQPKASQTPVPPGAPSPDKDPAKESPKPEEQKNTPREVSPLLPKLPEEPEAESKSADSLYDPFIVPKVQYKLVCRKCQAGFSDEEAARSHLKSLCFFGQSVVNLQEMVLHVPTGGGGGGSGGGGGGGGGGGGGGSYHCLACESALCGEEALSQHLESALHKHRTITRAARNAKEHPSLLPHSACFPDPSTASTSQSAAHSNDSPPPPSAAAPSSASPHASRKSWPQVVSRASAAKPPSFPPLSSSSTVTSSSCSTSGVQPSMPTDDYSEESDTDLSQKSDGPASPVEGPKDPSCPKDSGLTSVGTDTFRL

SEQ ID NO: 9552 - protein, 2789 aa, Homo sapiens
MRLGGGQLVSEELMNLGESFIQTNDPSLKLFQCAVCNKFTTDNLDMLGLHMNVERSLSEDEWKAVMGDSYQCKLCRYNTQLKANFQLHCKTDKHVQKYQLVAHIKEGGKANEWRLKCVAIGNPVHLKCNACDYYTNSLEKLRLHTVNSRHEASLKLYKHLQQHESGVEGESCYYHCVLCNYSTKAKLNLIQHVRSMKHQRSESLRKLQRLQKGLPEEDEDLGQIFTIRRCPSTDPEEAIEDVEGPSETAADPEELAKDQEGGASSSQAEKELTDSPATSKRISFPGSSESPLSSKRPKTAEEIKPEQMYQCPYCKYSNADVNRLRVHAMTQHSVQPMLRCPLCQDMLNNKIHLQLHLTHLHSVAPDCVEKLIMTVTTPEMVMPSSMFLPAAVPDRDGNSNLEEAGKQPETSEDLGKNILPSASTEQSGDLKPSPADPGSVREDSGFICWKKGCNQVFKTSAALQTHFNEVHAKRPQLPVSDRHVYKYRCNQCSLAFKTIEKLQLHSQYHVIRAATMCCLCQRSFRTFQALKKHLETSHLELSEADIQQLYGGLLANGDLLAMGDPTLAEDHTIIVEEDKEEESDLEDKQSPTGSDSGSVQEDSGSEPKRALPFRKGPNFTMEKFLDPSRPYKCTVCKESFTQKNILLVHYNSVSHLHKLKRALQESATGQPEPTSSPDNKPFKCNTCNVAYSQSSTLEIHMRSVLHQTKARAAKLEAASGSSNGTGNSSSISLSSSTPSPVSTSGSNTFTTSNPSSAGIAPSSNLLSQVPTESVGMPPLGNPIGANIASPSEPKEANRKKLADMIASRQQQQQQQQQQQQQQQQQQQAQTLAQAQAQVQAHLQQELQQQAALIQSQLFNPTLLPHFPMTTETLLQLQQQQHLLFPFYIPSAEFQLNPEVSLPVTSGALTLTGTGPGLLEDLKAQVQVPQQSHQQILPQQQQNQLSIAQSHSALLQPSQHPEKKNKLVIKEKEKESQRERDSAEGGEGNTGPKETLPDALKAKEKKELAPGGGSEPSMLPPRIASDARGNATKALLENFGFELVIQYNENKQKVQKKNGKTDQGENLEKLECDSCGKLFSNILILKSHQEHVHQNYFPFKQLERFAKQYRDHYDKLYPLRPQTPEPPPPPPPPPPPPLPAAPPQPASTPAIPASAPPITSPTIAPAQPSVPLTQLSMPMELPIFSPLMMQTMPLQTLPAQLPPQLGPVEPLPADLAQLYQHQLNPTLLQQQNKRPRTRITDDQLRVLRQYFDINNSPSEEQIKEMADKSGLPQKVIKHWFRNTLFKERQRNKDSPYNFSNPPITSLEELKIDSRPPSPEPPKQEYWGSKRSSRTRFTDYQLRVLQDFFDANAYPKDDEFEQLSNLLNLPTRVIVVWFQNARQKARKNYENQGEGKDGERRELTNDRYIRTSNLNYQCKKCSLVFQRIFDLIKHQKKLCYKDEDEEGQDDSQNEDSMDAMEILTPTSSSCSTPMPSQAYSAPAPSANNTASSAFLQLTAEAEELATFNSKTEAGDEKPKLAEAPSAQPNQTQEKQGQPKPELQQQEQPEQKTNTPQQKLPQLVSLPSLPQPPPQAPPPQCPLPQSSPSPSQLSHLPLKPLHTSTPQQLANLPPQLIPYQCDQCKLAFPSFEHWQEHQQLHFLSAQNQFIHPQFLDRSLDMPFMLFDPSNPLLASQLLSGAIPQIPASSATSPSTPTSTMNTLKRKLEEKASASPGENDSGTGGEEPQRDKRLRTTITPEQLEILYQKYLLDSNPTRKMLDHIAHEVGLKKRVVQVWFQNTRARERKGQFRAVGPAQAHRRCPFCRALFKAKTALEAHIRSRHWHEAKRAGYNLTLSAMLLDCDGGLQMKGDIFDGTSFSHLPPSSSDGQGVPLSPVSKTMELSPRTLLSPSSIKVEGIEDFESPSMSSVNLNFDQTKLDNDDCSSVNTAITDTTTGDEGNADNDSATGIATETKSSSAPNEGLTKAAMMAMSEYEDRLSSGLVSPAPSFYSKEYDNEGTVDYSETSSLADPCSPSPGASGSAGKSGDSGDRPGQKRFRTQMTNLQLKVLKSCFNDYRTPTMLECEVLGNDIGLPKRVVQVWFQNARAKEKKSKLSMAKHFGINQTSYEGPKTECTLCGIKYSARLSVRDHIFSQQHISKVKDTIGSQLDKEKEYFDPATVRQLMAQQELDRIKKANEVLGLAAQQQGMFDNTPLQALNLPTAYPALQGIPPVLLPGLNSPSLPGFTPSNTALTSPKPNLMGLPSTTVPSPGLPTSGLPNKPSSASLSSPTPAQATMAMGPQQPPQQQQQQQQPQVQQPPPPPAAQPPPTPQLPLQQQQQRKDKDSEKVKEKEKAHKGKGEPLPVPKKEKGEAPTATAATISAPLPTMEYAVDPAQLQALQAALTSDPTALLTSQFLPYFVPGFSPYYAPQIPGALQSGYLQPMYGMEGLFPYSPALSQALMGLSPGSLLQQYQQYQQSLQEAIQQQQQRQLQQQQQQKVQQQQPKASQTPVPPGAPSPDKDPAKESPKPEEQKNTPREVSPLLPKLPEEPEAESKSADSLYDPFIVPKVQYKLVCRKCQAGFSDEEAARSHLKSLCFFGQSVVNLQEMVLHVPTGGGGGGSGGGGGGGGGGGGGGSYHCLACESALCGEEALSQHLESALHKHRTITRAARNAKEHPSLLPHSACFPDPSTASTSQSAAHSNDSPPPPSAAAPSSASPHASRKSWPQVVSRASAAKPPSFPPLSSSSTVTSSSCSTSGVQPSMPTDDYSEESDTDLSQKSDGPASPVEGPKDPSCPKDSGLTSVGTDTFRL

SEQ ID NO: 9553 - protein, 670 aa, Homo sapiens
MAEVVAEVAEMPTQMSPGAVEMSTPMSAEMMEMSTEVTEMTPGEALASSLFFQHHQFMCSECGSLYNTLEEVLSHQEQHMLAVSEEEALTTQNVGLEPELVPGAEGPFQCGECSQLILSPGELLAHQDAHLRESANQIQYQCWDCQELFPSPELWVAHRKAQHLSATVAEPPVPPPLPPPTPLPPPSPPSEVKMEPYECPECSTLCATPEEFLEHQGTHFDSLEKEERNGLEEEEEDDEEDEEDDEEMEDEEAMAEVGDDAVGGDESTAGWAQGCGDCPQHQPSAGARRQHRRTAHSPASATHPFHCSQCQRSFSSANRLQAHGRAHVGGTHECTTCSKVFKKAASLEQHLRLHRGEARYLCVDCGRGFGTELTLVAHRRAHTANPLHRCRCGKTFSNMTKFLYHRRTHAGKSGAPPTGATAPPAPAEPTPPPPPPAPPAQLPCPQCSKSFASASRLSRHRRAVHGPPERRHRCGVCGKGFKKLIHVRNHLRTHTGERPFQCHSCGKTFASLANLSRHQLTHTGARPYQCLDCGKRFTQSSNLQQHRRLHLRPVAFARAPRLPITGLYNKSPYYCGTCGRWFRAMAGLRLHQRVHARARTLTLQPPRSPSPAPPPPPEPQQTIMCTELGETIAIIETSQPLALEDTLQLCQAALGASEAGGLLQLDTAFV

SEQ ID NO: 9554 - protein, 660 aa, Homo sapiens
MAHALVTFRDVAIDFSQKEWECLDTTQRKLYRDVMLENYNNLVSLGYSGSKPDVITLLEQGKEPCVVARDVTGRQCPGLLSRHKTKKLSSEKDIHEISLSKESIIEKSKTLRLKGSIFRNEWQNKSEFEGQQGLKERSISQKKIVSKKMSTDRKRPSFTLNQRIHNSEKSCDSHLVQHGKIDSDVKHDCKECGSTFNNVYQLTLHQKIHTGEKSCKCEKCGKVFSHSYQLTLHQRFHTGEKPYECQECGKTFTLYPQLNRHQKIHTGKKPYMCKKCDKGFFSRLELTQHKRIHTGKKSYECKECGKVFQLIFYFKEHERIHTGKKPYECKECGKAFSVCGQLTRHQKIHTGVKPYECKECGKTFRLSFYLTEHRRTHAGKKPYECKECGKSFNVRGQLNRHKTIHTGIKPFACKVCEKAFSYSGDLRVHSRIHTGEKPYECKECGKAFMLRSVLTEHQRLHTGVKPYECKECGKTFRVRSQISLHKKIHTDVKPYKCVRCGKTFRFGFYLTEHQRIHTGEKPYKCKECGKAFIRRGNLKEHLKIHSGLKPYDCKECGKSFSRRGQFTEHQKIHTGVKPYKCKECGKAFSRSVDLRIHQRIHTGEKPYECKQCGKAFRLNSHLTEHQRIHTGEKPYECKVCRKAFRQYSHLYQHQKTHNVI

SEQ ID NO: 9555 - protein, 628 aa, Homo sapiens
MAHALVTFRDVAIDFSQKEWECLDTTQRKLYRDVMLENYNNLVSLGLLSRHKTKKLSSEKDIHEISLSKESIIEKSKTLRLKGSIFRNEWQNKSEFEGQQGLKERSISQKKIVSKKMSTDRKRPSFTLNQRIHNSEKSCDSHLVQHGKIDSDVKHDCKECGSTFNNVYQLTLHQKIHTGEKSCKCEKCGKVFSHSYQLTLHQRFHTGEKPYECQECGKTFTLYPQLNRHQKIHTGKKPYMCKKCDKGFFSRLELTQHKRIHTGKKSYECKECGKVFQLIFYFKEHERIHTGKKPYECKECGKAFSVCGQLTRHQKIHTGVKPYECKECGKTFRLSFYLTEHRRTHAGKKPYECKECGKSFNVRGQLNRHKTIHTGIKPFACKVCEKAFSYSGDLRVHSRIHTGEKPYECKECGKAFMLRSVLTEHQRLHTGVKPYECKECGKTFRVRSQISLHKKIHTDVKPYKCVRCGKTFRFGFYLTEHQRIHTGEKPYKCKECGKAFIRRGNLKEHLKIHSGLKPYDCKECGKSFSRRGQFTEHQKIHTGVKPYKCKECGKAFSRSVDLRIHQRIHTGEKPYECKQCGKAFRLNSHLTEHQRIHTGEKPYECKVCRKAFRQYSHLYQHQKTHNVI

SEQ ID NO: 9556 - protein, 637 aa, Homo sapiens
MLPNFKLYNFIEIFFKPLTPSKNRFHFVSYFENVNFMLCWLQENNFCLLLCFLSGLLSRHKTKKLSSEKDIHEISLSKESIIEKSKTLRLKGSIFRNEWQNKSEFEGQQGLKERSISQKKIVSKKMSTDRKRPSFTLNQRIHNSEKSCDSHLVQHGKIDSDVKHDCKECGSTFNNVYQLTLHQKIHTGEKSCKCEKCGKVFSHSYQLTLHQRFHTGEKPYECQECGKTFTLYPQLNRHQKIHTGKKPYMCKKCDKGFFSRLELTQHKRIHTGKKSYECKECGKVFQLIFYFKEHERIHTGKKPYECKECGKAFSVCGQLTRHQKIHTGVKPYECKECGKTFRLSFYLTEHRRTHAGKKPYECKECGKSFNVRGQLNRHKTIHTGIKPFACKVCEKAFSYSGDLRVHSRIHTGEKPYECKECGKAFMLRSVLTEHQRLHTGVKPYECKECGKTFRVRSQISLHKKIHTDVKPYKCVRCGKTFRFGFYLTEHQRIHTGEKPYKCKECGKAFIRRGNLKEHLKIHSGLKPYDCKECGKSFSRRGQFTEHQKIHTGVKPYKCKECGKAFSRSVDLRIHQRIHTGEKPYECKQCGKAFRLNSHLTEHQRIHTGEKPYECKVCRKAFRQYSHLYQHQKTHNVI

SEQ ID NO: 9557 - protein, 643 aa, Homo sapiens
MLENYGNVASLGFPLLKPAVISQLEGGSELGGSSPLAAGTGLQGLQTDIQTDNDLTKEMYEGKENVSFELQRDFSQETDFSEASLLEKQQEVHSAGNIKKEKSNTIDGTVKDETSPVEECFFSQSSNSYQCHTITGEQPSGCTGLGKSISFDTKLVKHEIINSEERPFKCEELVEPFRCDSQLIQHQENNTEEKPYQCSECGKAFSINEKLIWHQRLHSGEKPFKCVECGKSFSYSSHYITHQTIHSGEKPYQCKMCGKAFSVNGSLSRHQRIHTGEKPYQCKECGNGFSCSSAYITHQRVHTGEKPYECNDCGKAFNVNAKLIQHQRIHTGEKPYECNECGKGFRCSSQLRQHQSIHTGEKPYQCKECGKGFNNNTKLIQHQRIHTGEKPYECTECGKAFSVKGKLIQHQRIHTGEKPYECNECGKAFRCNSQFRQHLRIHTGEKPYECNECGKAFSVNGKLMRHQRIHTGEKPFECNECGRCFTSKRNLLDHHRIHTGEKPYQCKECGKAFSINAKLTRHQRIHTGEKPFKCMECEKAFSCSSNYIVHQRIHTGEKPFQCKECGKAFHVNAHLIRHQRSHTGEKPFRCVECGKGFSFSSDYIIHQTVHTWKKPYMCSVCGKAFRFSFQLSQHQSVHSEGKS

SEQ ID NO: 9558 - protein, 585 aa, Homo sapiens
MYEGKENVSFELQRDFSQETDFSEASLLEKQQEVHSAGNIKKEKSNTIDGTVKDETSPVEECFFSQSSNSYQCHTITGEQPSGCTGLGKSISFDTKLVKHEIINSEERPFKCEELVEPFRCDSQLIQHQENNTEEKPYQCSECGKAFSINEKLIWHQRLHSGEKPFKCVECGKSFSYSSHYITHQTIHSGEKPYQCKMCGKAFSVNGSLSRHQRIHTGEKPYQCKECGNGFSCSSAYITHQRVHTGEKPYECNDCGKAFNVNAKLIQHQRIHTGEKPYECNECGKGFRCSSQLRQHQSIHTGEKPYQCKECGKGFNNNTKLIQHQRIHTGEKPYECTECGKAFSVKGKLIQHQRIHTGEKPYECNECGKAFRCNSQFRQHLRIHTGEKPYECNECGKAFSVNGKLMRHQRIHTGEKPFECNECGRCFTSKRNLLDHHRIHTGEKPYQCKECGKAFSINAKLTRHQRIHTGEKPFKCMECEKAFSCSSNYIVHQRIHTGEKPFQCKECGKAFHVNAHLIRHQRSHTGEKPFRCVECGKGFSFSSDYIIHQTVHTWKKPYMCSVCGKAFRFSFQLSQHQSVHSEGKS

SEQ ID NO: 9559 - protein, 134 aa, Homo sapiens
MCEQLVCIFTYAYLKINLTKALGHHNPSYPVARAQPQTMFPSASECNAFPRVSKVPNRSGAAETALLVRVLPKPLKSQASLLSLPFIHITEQLSTHICVVLFKLFHVCLFTINNMNDCSMDAAERNAEGGLQLE

SEQ ID NO: 9560 - protein, 245 aa, Homo sapiens
MLERGAESAAGATDPSPTGKEPVTKEAPHQGPPQKPSQSAPGPTASAGSPPRPRRRPPPQRPHRCPDCDKAFSYPSKLATHRLAHGGARPHPCPDCPKAFSYPSKLAAHRLTHSGARPHPCPHCPKSFGHRSKLAAHLWTHAPTRPYPCPDCPKSFCYPSKLAAHRHTHHATDARPYPCPHCPKAFSFPSKLAAHRLCHDPPTAPGSQATAWHRCSSCGQAFGQRRLLLLHQRSHHQVEHKGERD

SEQ ID NO: 9561 - protein, 477 aa, Homo sapiens
MATYTCITCRVAFRDADMQRAHYKTDWHRYNLRRKVASMAPVTAEGFQERVRAQRAVAEEESKGSATYCTVCSKKFASFNAYENHLKSRRHVELEKKAVQAVNRKVEMMNEKNLEKGLGVDSVDKDAMNAAIQQAIKAQPSMSPKKAPPAPAKEARNVVAVGTGGRGTHDRDPSEKPPRLQWFEQQAKKLAKQQEEDSEEEEEDLDGDDWEDIDSDEELECEDTEAMDDVVEQDAEEEEAEEGPPLGAIPITDCLFCSHHSSSLMKNVAHMTKDHSFFIPDIEYLSDIKGLIKYLGEKVGVGKICLWCNEKGKSFYSTEAVQAHMNDKSHCKLFTDGDAALEFADFYDFRSSYPDHKEGEDPNKAEELPSEKNLEYDDETMELILPSGARVGHRSLMRYYKQRFGLSRAVAVAKNRKAVGRVLQQYRALGWTGSTGAALMRERDMQYVQRMKSKWMLKTGMKNNATKQMHFRVQVRF

SEQ ID NO: 9562 - protein, 534 aa, Homo sapiens
MLSPVSRDASDALQGRKCLRPRSRRLPLPAAVRAHGPMAELTDSARGCVVFEDVFVYFSREEWELLDDAQRLLYHDVMLENFALLASLGIAFSRSRAVMKLERGEEPWVYDQVDMTSATEREAQRGLRPGCWHGVEDEEVSSEQSIFVAGVSEVRTLMAELESHPCDICGPILKDTLHLAKYHGGKARQKPYLCGACGKQFWFSTDFDQHQNQPNGGKLFPRKEGRDSVKSCRVHVPEKTLTCGKGRRDFSATSGLLQHQASLSSMKPHKSTKLVSGFLMGQRYHRCGECGKAFTRKDTLARHQRIHTGERPYECNECGKFFSQSYDLFKHQTVHTGERPYECSECGKFFRQISGLIEHRRVHTGERLYQCGKCGKFFSSKSNLIRHQEVHTGARPYVCSECGKEFSRKHTLVLHQRTHTGERPYECSECGKAFSQSSHLNVHWRIHSSDYECSRCGKAFSCISKLIQHQKVHSGEKPYECSKCGKAFTQRPNLIRHWKVHTGERPYVCSECGREFIRKQTLVLHQRVHAGEKL

SEQ ID NO: 9563 - protein, 446 aa, Homo sapiens
MEVPPATKFGETFAFENRLESQQGLFPGEDLGDPFLQERGLEQMAVIYKEIPLGEQDEENDDYEGNFSLCSSPVQHQSIPPGTRPQDDELFGQTFLQKSDLSMCQIIHSEEPSPCDCAETDRGDSGPNAPHRTPQPAKPYACRECGKAFSQSSHLLRHLVIHTGEKPYECCECGKAFSQSSHLLRHQIIHTGEKPYECRECGKAFRQSSALTQHQKIHTGKRPYECRECGKDFSRSSSLRKHERIHTGERPYQCKECGKSFNQSSGLSQHRKIHTLKKPHECDLCGKAFCHRSHLIRHQRIHTGKKPYKCDECGKAFSQSSNLIEHRKTHTGEKPYKCQKCGKAFSQSSSLIEHQRIHTGEKPYECCQCGKAFCHSSALIQHQRIHTGKKPYTCECGKAFRHRSALIEHYKTHTREKPYVCNLCGKSFRGSSHLIRHQKIHSGEKL

SEQ ID NO: 9564 - protein, 648 aa, Homo sapiens
MELVTFRDVAIEFSPEEWKCLDPAQQNLYRDVMLENYRNLVSLGFVISNPDLVTCLEQIKEPCNLKIHETAAKPPAICSPFSQDLSPVQGIEDSFHKLILKRYEKCGHENLQLRKGCKRVNECKVQKGVNNGVYQCLSTTQSKIFQCNTCVKVFSKFSNSNKHKIRHTGEKPFKCTECGRSFYMSHLTQHTGIHAGEKPYKCEKCGKAFNRSTSLSKHKRIHTGEKPYTCEECGKAFRRSTVLNEHKKIHTGEKPYKCEECGKAFTRSTTLNEHKKIHTGEKPYKCKECGKAFRWSTSLNEHKNIHTGEKPYKCKECGKAFRQSRSLNEHKNIHTGEKPYTCEKCGKAFNQSSSLIIHRSIHSEQKLYKCEECGKAFTWSSSLNKHKRIHTGEKPYTCEECGKAFYRSSHLAKHKRIHTGEKPYTCEECGKAFNQSSTLILHKRIHSGQKPYKCEECGKAFTRSTTLNEHKKIHTGEKPYKCEECGKAFIWSASLNEHKNIHTGEKPYKCKECGKAFNQSSGLIIHRSIHSEQKLYKCEECGKAFTRSTALNEHKKIHSGEKPYKCKECGKAYNLSSTLTKHKRIHTGEKPFTCEECGKAFNWSSSLTKHKIIHTGEKSYKCEECGKAFNRPSTLTVHKRIHTGKEHS

SEQ ID NO: 9565 - protein, 395 aa, Homo sapiens
MSGGKKKSSFQITSVTTDYEGPGSPGASDPPTPQPPTGPPPRLPNGEPSPDPGGKGTPRNGSPPPGAPSSRFRVVKLPHGLGEPYRRGRWTCVDVYERDLEPHSFGGLLEGIRGASGGAGGRSLDSRLELASLGLGAPTPPSGLSQGPTSWLRPPPTSPGPQARSFTGGLGQLVVPSKAKAEKPPLSASSPQQRPPEPETGESAGTSRAATPLPSLRVEAEAGGSGARTPPLSRRKAVDMRLRMELGAPEEMGQVPPLDSRPSSPALYFTHDASLVHKSPDPFGAVAAQKFSLAHSMLAISGHLDSDDDSGSGSLVGIDNKIEQAMDLVKSHLMFAVREEVEVLKEQIRELAERNAALEQENGLLRALASPEQLAQLPSSGVPRLGPPAPNGPSV

SEQ ID NO: 9566 - protein, 156 aa, Homo sapiens
MRLRMELGAPEEMGQVPPLDSRPSSPALYFTHDASLVHKSPDPFGAVAAQKFSLAHSMLAISGHLDSDDDSGSGSLVGIDNKIEQAMDLVKSHLMFAVREEVEVLKEQIRELAERNAALEQENGLLRALASPEQLAQLPSSGVPRLGPPAPNGPSV

SEQ ID NO: 9567 - protein, 172 aa, Homo sapiens
MIIYRDLISHDEMFSDIYKIREIADGLCLEVEGKMVSRTEGNIDDSLIGGNASAEGPEGEGTESTVITGVDIVMNHHLQETSFTKEAYKKYIKDYMKSIKGKLEEQRPERVKPFMTGAAEQIKHILANFKNYQFFIGENMNPDGMVALLDYREDGVTPYMIFFKDGLEMEKC

SEQ ID NO: 9568 - protein, 138 aa, Homo sapiens
MVSRTEGNIDDSLIGGNASAEGPEGEGTESTVITGVDIVMNHHLQETSFTKEAYKKYIKDYMKSIKGKLEEQRPERVKPFMTGAAEQIKHILANFKNYQFFIGENMNPDGMVALLDYREDGVTPYMIFFKDGLEMEKC

SEQ ID NO: 9569 - protein, 453 aa, Homo sapiens
MSIVTVQLGQCGNQIGFEVFDALLSDSHSSQGLCSMRENEAYQASCKERFFSEEENGVPIARAVLVDMEPKVINQMLSKAAQSGQWKYGQHACFCQKQGSGNNWAYGYSVHGPRHEESIMNIIRKEVEKCDSFSGFFIIMSMAGGTGSGLGAFVTQNLEDQYSNSLKMNQIIWPYGTGEVIVQNYNSILTLSHLYRSSDALLLHENDAIHKICAKLMNIKQISFSDINQVLAHQLGSVFQPTYSAESSFHYRRNPLGDLMEHLVPHPEFKMLSVRNIPHMSENSLAYTTFTWAGLLKHLRQMLISNAKMEEGIDRHVWPPLSGLPPLSKMSLNKDLHFNTSIANLVILRGKDVQSADVEGFKDPALYTSWLKPVNAFNVWKTQRAFSKYEKSAVLVSNSQFLVKPLDMIVGKAWNMFASKAYIHQYTKFGIEEEDFLDSFTSLEQVVASYCNL

SEQ ID NO: 9570 - protein, 398 aa, Homo sapiens
MSIVTVQLGQCGNQIGFEVFDALLSDSHSSQGLCSMRENEAYQASCKERFFSEEENGVPIARAVLVDMEPKVINQMLSKAAQSGQWKYGQHACFCQKQGSGNNWAYGYSVHGPRHEESIMNIIRKEVEKCDSFSGFFIIMSMAGGTGSGLGAFVTQNLEDQYSNSLKMNQIIWPYGTGEVIVQNYNSILTLSHLYRSSDALLLHENDAIHKICAKLMNIKQISFSDINQVLAHQLGSVFQPTYSAESSFHYRRNPLGIDRHVWPPLSGLPPLSKMSLNKDLHFNTSIANLVILRGKDVQSADVEGFKDPALYTSWLKPVNAFNVWKTQRAFSKYEKSAVLVSNSQFLVKPLDMIVGKAWNMFASKAYIHQYTKFGIEEEDFLDSFTSLEQVVASYCNL

SEQ ID NO: 9571 - protein, 199 aa, Homo sapiens
MSIVTVQLGQCGNQIGFEVFDALLSDSHSSQGLCSMRENEAYQASCKERFFSEEENGGIDRHVWPPLSGLPPLSKMSLNKDLHFNTSIANLVILRGKDVQSADVEGFKDPALYTSWLKPVNAFNVWKTQRAFSKYEKSAVLVSNSQFLVKPLDMIVGKAWNMFASKAYIHQYTKFGIEEEDFLDSFTSLEQVVASYCNL

SEQ ID NO: 9572 - protein, 237 aa, Homo sapiens
MNIKQISFSDINQVLAHQLGSVFQPTYSAESSFHYRRNPLGDLMEHLVPHPEFKMLSVRNIPHMSENSLAYTTFTWAGLLKHLRQMLISNAKMEEGIDRHVWPPLSGLPPLSKMSLNKDLHFNTSIANLVILRGKDVQSADVEGFKDPALYTSWLKPVNAFNVWKTQRAFSKYEKSAVLVSNSQFLVKPLDMIVGKAWNMFASKAYIHQYTKFGIEEEDFLDSFTSLEQVVASYCNL

SEQ ID NO: 9573 - protein, 396 aa, Homo sapiens
MSIVTVQLGQCGNQIGFEVFDALLSDSHSSQGLCSMRENEAYQASCKERFFSEEENGVPIARAVLVDMEPKVINQMLSKAAQSGQWKYGQHACFCQKQGSGNNWAYGYSVHGPRHEESIMNIIRKEVEKCDSFSGFFIIMSMAGGTGSGLGAFVTQNLEDQYSNSLKMNQIIWPYGTGEVIVQNYNSILTLSHLYRSSDALLLHENDAIHKICAKLMNIKQISFSDINQVLAHQLGSVFQPTYSAESSFHYRRNPLGDLMEHLVPHPEFKMLSVRNIPHMSENSLAYTTFTWAGLLKHLRQMLISNAKMEEGIDRHVWPPLSGLPPLSKMSLNKDLHFNTSIANLVILRGKDVQSADVGKKFRAYIHQYTKFGIEEEDFLDSFTSLEQVVASYCNL

SEQ ID NO: 9574 - protein, 351 aa, Homo sapiens
MSIVTVQLGQCGNQIGFEVFDALLSDSHSSQGLCSMRENEAYQASCKERFFSEEENGVPIARAVLVDMEPKVINQMLSKAAQSGQWKYGQHACFCQKQGSGNNWAYGYSVHGPRHEESIMNIIRKEVEKCDSFSGFFIIMSMAGGTGSGLGAFVTQNLEDQYSNSLKMNQIIWPYGTGEVIVQNYNSILTLSHLYRSSDALLLHENDAIHKICAKLMNIKQISFSDINQVLAHQLGSVFQPTYSAESSFHYRRNPLEGFKDPALYTSWLKPVNAFNVWKTQRAFSKYEKSAVLVSNSQFLVKPLDMIVGKAWNMFASKAYIHQYTKFGIEEEDFLDSFTSLEQVVASYCNL

SEQ ID NO: 9575 - protein, 1943 aa, Homo sapiens
MSPLLRSICDITEIFNQYVSHDCDGAALTKKDLKNLLEREFGAVLRRPHDPKTVDLILELLDLDSNGRVDFNEFLLFIFKVAQACYYALGQATGLDEEKRARCDGKESLLQDRRQEEDQRRFEPRDRQLEEEPGQRRRQKRQEQERELAEGEEQSEKQERLEQRDRQRRDEELWRQRQEWQEREERRAEEEQLQSCKGHETEEFPDEEQLRRRELLELRRKGREEKQQQRRERQDRVFQEEEEKEWRKRETVLRKEEEKLQEEEPQRQRELQEEEEQLRKLERQELRRERQEEEQQQQRLRREQQLRRKQEEERREQQEERREQQERREQQEERREQQLRREQEERREQQLRREQEEERREQQLRREQEEERREQQLRREQQLRREQQLRREQQLRREQQLRREQQLRREQQLRREQQLRREQQLRREQEEERHEQKHEQERREQRLKREQEERRDWLKREEETERHEQERRKQQLKRDQEEERRERWLKLEEEERREQQERREQQLRREQEERREQRLKRQEEEERLQQRLRSEQQLRREQEERREQLLKREEEKRLEQERREQRLKREQEERRDQLLKREEERRQQRLKREQEERLEQRLKREEVERLEQEERREQRLKREEPEEERRQQLLKSEEQEERRQQQLRREQQERREQRLKREEEEERLEQRLKREHEEERREQELAEEEQEQARERIKSRIPKWQWQLESEADARQSKVYSRPRKQEGQRRRQEQEEKRRRRESELQWQEEERAHRQQQEEEQRRDFTWQWQAEEKSERGRQRLSARPPLREQRERQLRAEERQQREQRFLPEEEEKEQRRRQRREREKELQFLEEEEQLQRRERAQQLQEEEDGLQEDQERRRSQEQRRDQKWRWQLEEERKRRRHTLYAKPALQEQLRKEQQLLQEEEEELQREEREKRRRQEQERQYREEEQLQQEEEQLLREEREKRRRQERERQYRKDKKLQQKEEQLLGEEPEKRRRQEREKKYREEEELQQEEEQLLREEREKRRRQEWERQYRKKDELQQEEEQLLREEREKRRLQERERQYREEEELQQEEEQLLGEERETRRRQELERQYRKEEELQQEEEQLLREEPEKRRRQERERQCREEEELQQEEEQLLREEREKRRRQELERQYREEEEVQQEEEQLLREEPEKRRRQELERQYREEEELQQEEEQLLREEQEKRRQERERQYREEEELQRQKRKQRYRDEDQRSDLKWQWEPEKENAVRDNKVYCKGRENEQFRQLEDSQLRDRQSQQDLQHLLGEQQERDREQERRRWQQRDRHFPEEEQLEREEQKEAKRRDRKSQEEKQLLREEREEKRRRQETDRKFREEEQLLQEREEQPLRRQERDRKFREEELRHQEQGRKFLEEEQRLRRQERERKFLKEEQQLRCQEREQQLRQDRDRKFREEEQQLSRQERDRKFREEEQQVRRQERERKFLEEEQQLRQERHRKFREEEQLLQEREEQQLHRQERDRKFLEEEQQLRRQERDRKFREQELRSQEPERKFLEEEQQLHRQQRQRKFLQEEQQLRRQERGQQRRQDRDRKFREEEQLRQEREEQQLSRQERDRKFRLEEQKVRRQEQERKFMEDEQQLRRQEGQQQLRQERDRKFREDEQLLQEREEQQLHRQERDRKFLEEEPQLRRQEREQQLRHDRDRKFREEEQLLQEGEEQQLRRQERDRKFREEEQQLRRQERERKFLQEEQQLRRQELERKFREEEQLRQETEQEQLRRQERYRKILEEEQLRPEREEQQLRRQERDRKFREEEQLRQEREEQQLRSQESDRKFREEEQLRQEREEQQLRPQQRDGKYRWEEEQLQLEEQEQRLRQERDRQYRAEEQFATQEKSRREEQELWQEEEQKRRQERERKLREEHIRRQQKEEQRHRQVGEIKSQEGKGHGRLLEPGTHQFASVPVRSSPLYEYIQEQRSQYRP

SEQ ID NO: 9576 - protein, 452 aa, Homo sapiens
MNSGILQVFQRALTCPICMNYFLDPVTIDCGHSFCRPCLYLNWQDTAVLAQCSECKKTTRQRNLNTDICLKNMAFIARKASLRQFLSSEEQICGMHRETKKMFCEVDKSLLCLPCSNSQEHRNHIHCPIEWAAEERREELLKKMQSLWEKACENLRNLNMETTRTRCWKDYVSLRIEAIRAEYQKMPAFLHEEEQHHLERLRKEGEDIFQQLNESKARMEHSRELLRGMYEDLKQMCHKADVELLQAFGDILHRYESLLLQVSEPVNPELSAGPITGLLDSLSGFRVDFTLQPERANSHIFLCGDLRSMNVGCDPQDDPDITGKSECFLVWGAQAFTSGKYYWEVHMGDSWNWAFGVCNNYWKEKRQNDKIDGEEGLFLLGCVKEDTHCSLFTTSPLVVQYVPRPTSTVGLFLDCEGRTVSFVDVDQSSLIYTIPNCSFSPPLRPIFCCSHF

SEQ ID NO: 9577 - protein, 309 aa, Homo sapiens
MQSLWEKACENLRNLNMETTRTRCWKDYVSLRIEAIRAEYQKMPAFLHEEEQHHLERLRKEGEDIFQQLNESKARMEHSRELLRGMYEDLKQMCHKADVELLQAFGDILHRYESLLLQVSEPVNPELSAGPITGLLDSLSGFRVDFTLQPERANSHIFLCGDLRSMNVGCDPQDDPDITGKSECFLVWGAQAFTSGKYYWEVHMGDSWNWAFGVCNNYWKEKRQNDKIDGEEGLFLLGCVKEDTHCSLFTTSPLVVQYVPRPTSTVGLFLDCEGRTVSFVDVDQSSLIYTIPNCSFSPPLRPIFCCSHF

SEQ ID NO: 9578 - protein, 182 aa, Homo sapiens
MGDEEKRNRAITARRQHLKSVMLQIAATELEKEESRREAEKQNYLAEHCPPLHIPGSMSEVQELCKQLHAKIDAAEEEKYDMEVRVQKTSKELEDMNQKLFDLRGKFKRPPLRRVRMSADAMLKALLGSKHKVCMDLRANLKQVKKEDTEKERDLRDVGDWRKNIEEKSGMEGRKKMFESES

SEQ ID NO: 9579 - protein, 182 aa, Homo sapiens
MSQCKKRNRAITARRQHLKSVMLQIAATELEKEESRREAEKQNYLAEHCPPLHIPGSMSEVQELCKQLHAKIDAAEEEKYDMEVRVQKTSKELEDMNQKLFDLRGKFKRPPLRRVRMSADAMLKALLGSKHKVCMDLRANLKQVKKEDTEKERDLRDVGDWRKNIEEKSGMEGRKKMFESES

SEQ ID NO: 9580 - protein, 733 aa, Homo sapiens
MENMAEEELLPLEKEEVEVAQVQVPTPARDSAGVPAPAPDSALDSAPTPASAPAPAPALAQAPALSPSLASAPEEAKSKRHISIQRQLADLENLAFVTDGNFDSASSLNSDNLDAGNRQACPLCPKEKFRACNSHKLRRHLQNLHWKVSVEFEGYRMCICHLPCRPVKPNIIGEQITSKMGAHYHCIICSATITRRTDMLGHVRRHMNKGETKSSYIAASTAKPPKEILKEADTDVQVCPNYSIPQKTDSYFNPKMKLNRQLIFCTLAALAEERKPLECLDAFGATGIMGLQWAKHLGNAVKVTINDLNENSVTLIQENCHLNKLKVVVDSKEKEKSDDILEEGEKNLGNIKVTKMDANVLMHLRSFDFIHLDPFGTSVNYLDSAFRNIRNLGIVSVTSTDISSLYAKAQHVARRHYGCNIVRTEYYKELAARIVVAAVARAAARCNKGIEVLFAVALEHFVLVVVRVLRGPTSADETAKKIQYLIHCQWCEERIFQKDGNMVEENPYRQLPCNCHGSMPGKTAIELGPLWSSSLFNTGFLKRMLFESLHHGLDDIQTLIKTLIFESECTPQSQFSIHASSNVNKQEENGVFIKTTDDTTTDNYIAQGKRKSNEMITNLGKKQKTDVSTEHPPFYYNIHRHSIKGMNMPKLKKFLCYLSQAGFRVSRTHFDPMGVRTDAPLMQFKSILLKYSTPTYTGGQSESHVQSASEDTVTERVEMSVNDKAEASGCRRW

SEQ ID NO: 9581 - protein, 390 aa, Homo sapiens
MCICHLPCRPVKPNIIGEQITSKMGAHYHCIICSATITRRTDMLGHVRRHMNKGETKSSYIAASTAKPPKEILKEADTDVQVCPNYSIPQKTDSYFNPKMKLNRQLIFCTLAALAEERKPLECLDAFGATGIMGLQWAKHLGNAVKVTINDLNENSVTLIQENCHLNKLKVVVDSKEKEKSDDILEEGEKNLGNIKVTKMDANVLMHLRSFDFIHLDPFGTSVNYLDSAFRNIRNLGIVSVTSTDISSLYAKAQHVARRHYGCNIVRTEYYKELAARIVVAAVARAAARCNKGIEVLFAVALEHFVLVVVRVLRGPTSADETAKKIQYLIHCQWCEERIFQKDGNMVEDYSANFVISYTGFPFVNRQDIRKTHIDSCLVTVMEACLERQQ

SEQ ID NO: 9582 - protein, 183 aa, Homo sapiens
MERVQPLEENVGNAARPRFERNKLLLVASVIQGLGLLLCFTYICLHFSALQVSHRYPRIQSIKVQFTEYKKEKGFILTSQKEDEIMKVQNNSVIINCDGFYLISLKGYFSQEVNISLHYQKDEEPLFQLKKVRSVNSLMVASLTYKDKVYLNVTTDNTSLDDFHVNGGELILIHQNPGEFCVL

SEQ ID NO: 9583 - protein, 133 aa, Homo sapiens
MVSHRYPRIQSIKVQFTEYKKEKGFILTSQKEDEIMKVQNNSVIINCDGFYLISLKGYFSQEVNISLHYQKDEEPLFQLKKVRSVNSLMVASLTYKDKVYLNVTTDNTSLDDFHVNGGELILIHQNPGEFCVL

SEQ ID NO: 9584 - protein, 666 aa, Homo sapiens
MEGVSALLARCPTAGLAGGLGVTACAAAGVLLYRIARRMKPTHTMVNCWFCNQDTLVPYGNRNCWDCPHCEQYNGFQENGDYNKPIPAQYLEHLNHVVSSAPSLRDPSQPQQWVSSQVLLCKRCNHHQTTKIKQLAAFAPREEGRYDEEVEVYRHHLEQMYKLCRPCQAAVEYYIKHQNRQLRALLLSHQFKRREADQTHAQNFSSAVKSPVQVILLRALAFLACAFLLTTALYGASGHFAPGTTVPLALPPGGNGSATPDNGTTPGAEGWRQLLGLLPEHMAEKLCEAWAFGQSHQTGVVALGLLTCLLAMLLAGRIRLRRIDAFCTCLWALLLGLHLAEQHLQAASPSWLDTLKFSTTSLCCLVGFTAAVATRKATGPRRFRPRRFFPGDSAGLFPTSPSLAIPHPSVGGSPASLFIPSPPSFLPLANQQLFRSPRRTSPSSLPGRLSRALSLGTIPSLTRADSGYLFSGSRPPSQVSRSGEFPVSDYFSLLSGSCPSSPLPSPAPSVAGSVASSSGSLRHRRPLISPARLNLKGQKLLLFPSPPGEAPTTPSSSDEHSPHNGSLFTMEPPHVPRKPPLQDVKHALDLRSKLERGSACSNRSIKKEDDSSQSSTCVVDTTTRGCSEEAATWRGRFGPSLVRGLLAVSLAANALFTSVFLYQSLR

SEQ ID NO: 9585 - protein, 392 aa, Homo sapiens
MEGVSALLARCPTAGLAGGLGVTACAAAGVLLYRIARRMKPTHTMVNCWFCNQDTLVPYGNRNCWDCPHCEQYNGFQENGDYNKPIPAQYLEHLNHVVSSAPSLRDPSQPQQWVSSQVLLCKRCNHHQTTKIKQLAAFAPREEGRYDEEVEVYRHHLEQMYKLCRPCQAAVEYYIKHQNRQLRALLLSHQFKRREADQTHAQNFSSAVKSPVQVILLRALAFLACAFLLTTALYGASGHFAPGTTVPLALPPGGNGSATPDNGTTPGAEGWRQLLGLLPEHMAEKLCEAWAFGQSHQTGVVALGLLTCLLAMLLAGRIRLRRIDAFCTCLWALLLGLHLAEQHLQAASPSWLDTLKFSTTSLCCLVGFTAAVATRKATGPRRFRPRRSEKQP

SEQ ID NO: 9586 - protein, 697 aa, Homo sapiens
MCKSLRYCFSHCLYLAMTRLEEVNREVNMHSSVRYLGYLARINLLVAICLGLYVRWEKTANSLILVIFILGLFVLGIASILYYYFSMEAASLSLSNLWFGFLLGLLCFLDNSSFKNDVKEESTKYLLLTSIVLRILCSLVERISGYVRHRPTLLTTVEFLELVGFAIASTTMLVEKSLSVILLVVALAMLIIDLRMKSFLAIPNLVIFAVLLFFSSLETPKNPIAFACFFICLITDPFLDIYFSGLSVTERWKPFLYRGRICRRLSVVFAGMIELTFFILSAFKLRDTHLWYFVIPGFSIFGIFWMICHIIFLLTLWGFHTKLNDCHKVYFTHRTDYNSLDRIMASKGMRHFCLISEQLVFFSLLATAILGAVSWQPTNGIFLSMFLIVLPLESMAHGLFHELGNCLGGTSVGYAIVIPTNFCSPDGQPTLLPPEHVQELNLRSTGMLNAIQRFFAYHMIETYGCDYSTSGLSFDTLHSKLKAFLELRTVDGPRHDTYILYYSGHTHGTGEWALAGGDTLRLDTLIEWWREKNGSFCSRLIIVLDSENSTPWVKEVRKINDQYIAVQGAELIKTVDIEEADPPQLGDFTKDWVEYNCNSSNNICWTEKGRTVKAVYGVSKRWSDYTLHLPTGSDVAKHWMLHFPRITYPLVHLANWLCGLNLFWICKTCFRCLKRLKMSWFLPTVLDTGQGFKLVKS

SEQ ID NO: 9587 - protein, 313 aa, Homo sapiens
MFLIVLPLESMAHGLFHELGNCLGGTSVGYAIVIPTNFCSPDGQPTLLPPEHVQELNLRSTGMLNAIQRFFAYHMIETYGCDYSTSGLSFDTLHSKLKAFLELRTVDGPRHDTYILYYSGHTHGTGEWALAGGDTLRLDTLIEWWREKNGSFCSRLIIVLDSENSTPWVKEVRKINDQYIAVQGAELIKTVDIEEADPPQLGDFTKDWVEYNCNSSNNICWTEKGRTVKAVYGVSKRWSDYTLHLPTGSDVAKHWMLHFPRITYPLVHLANWLCGLNLFWICKTCFRCLKRLKMSWFLPTVLDTGQGFKLVKS

SEQ ID NO: 9588 - protein, 140 aa, Homo sapiens
METVIMITYWDLISHSEMFSDSYMSQEIADGLRLEVEGKIVSRTEGNIFDSLIGGNASAEGPEGKGTESTVITGVDSVMNHHLQETSFTKEAYNKCIKDYMKSIKGKLEEQRPKRVKPFMTGAAEQIKHILANFKNYQKT

SEQ ID NO: 9589 - protein, 522 aa, Homo sapiens [sequence omitted]

SEQ ID NO: 9590 - protein, 482 aa, Homo sapiens
MNESPQTNEFKGTTEEAPAKESPHTSEFKGAALVSPISKSMLERLSKFEVEDAENVASYDSKIKKIVHSIVSSFAFGIFGVFLVLLDVTLLLADLIFTDSKLYIPLEYRSISLAIGLFFLMDVLLRVFVEGWTHLVRLLRLIILIRIFHLLHQKRQLEKLMRRLVSENKRRYTRDGFDLDLTYVTERIIAMSFPSSGRQSFYRNPIEEVVRFLDKKHRNHYRVYNLCSERAYDPKHFHNRVSRIMIDDHNVPTLHEMVVFTKEVNEWMAQDLENIVAIHCKGGKGRTGTMVCALLIASEIFLTAEESLYYFGERRTNKTHSNKFQGVETPSQNRYVGYFAQVKHLYNWNLPPRRILFIKRFIIYSIRGDVCDLKVQVVMEKKVVFSSTSLGNCSILHDIETDKILINVYDGPPLYDDVKVQFFSSNLPKYYDNCPFFFWFNTSFIQNNRLCLPRNELDNPHKQKAWKIYPPEFAVEILFGEK

SEQ ID NO: 9591 - protein, 445 aa, Homo sapiens
MNESPQTNEFKGTTEEAPAKESPHTSEFKGAALVSPISKRIFGVFLVLLDVTLLLADLIFTDSKLYIPLEYRSISLAIGLFFLMDVLLRVFVEGWTHLVRLLRLIILIRIFHLLHQKRQLEKLMRRLVSENKRRYTRDGFDLDLTYVTERIIAMSFPSSGRQSFYRNPIEEVVRFLDKKHRNHYRVYNLCSERAYDPKHFHNRVSRIMIDDHNVPTLHEMVVFTKEVNEWMAQDLENIVAIHCKGGKGRTGTMVCALLIASEIFLTAEESLYYFGERRTNKTHSNKFQGVETPSQNRYVGYFAQVKHLYNWNLPPRRILFIKRFIIYSIRGDVCDLKVQVVMEKKVVFSSTSLGNCSILHDIETDKILINVYDGPPLYDDVKVQFFSSNLPKYYDNCPFFFWFNTSFIQNNRLCLPRNELDNPHKQKAWKIYPPEFAVEILFGEK

SEQ ID NO: 9592 - protein, 326 aa, Homo sapiens
MNESPQTNEFKGTTEEAPAKESPHTSEFKGAALVSPISKRWTHLVRLLRLIILIRIFHLLHQKRQLEKLMRRLVSENKRRYTRDGFDLDLTYVTERIIAMSFPSSGRQSFYRNPIEEVVRFLDKKHRNHYRVYNLCSERAYDPKHFHNRVSRIMIDDHNVPTLHEMVVFTKEVNEWMAQDLENIVAIHCKGGKGRTGTMVCALLIASEIFLTAEESLYYFGERRTNKTHSNKFQGVETPSQNRYVGYFAQVKHLYNWNLPPRRILFIKRFIIYSIRGDVCDLKVQVVMEKKVVFSSTSLGNCSREEGSTLRRANWKGEPSRRPVLD

SEQ ID NO: 9593 - protein, 411 aa, Homo sapiens
MNESPQTNEFKGTTEEAPAKESPHTSEFKGAALVSPISKSMLERLSKFEVEDAENVASYEWTHLVRLLRLIILIRIFHLLHQKRQLEKLMRRLVSENKRRYTRDGFDLDLTYVTERIIAMSFPSSGRQSFYRNPIEEVVRFLDKKHRNHYRVYNLCSERAYDPKHFHNRVSRIMIDDHNVPTLHEMVVFTKEVNEWMAQDLENIVAIHCKGGKGRTGTMVCALLIASEIFLTAEESLYYFGERRTNKTHSNKFQGVETPSQNRYVGYFAQVKHLYNWNLPPRRILFIKRFIIYSIRGDVCDLKVQVVMEKKVVFSSTSLGNCSILHDIETDKILINVYDGPPLYDDVKVQFFSSNLPKYYDNCPFFFWFNTSFIQNNRLCLPRNELDNPHKQKAWKIYPPEFAVEILFGEK

SEQ ID NO: 9594 - protein, 193 aa, Homo sapiens
MVCALLIASEIFLTAEESLYYFGERRTNKTHSNKFQGVETPSQNRYVGYFAQVKHLYNWNLPPRRILFIKRFIIYSIRGDVCDLKVQVVMEKKVVFSSTSLGNCSILHDIETDKILINVYDGPPLYDDVKVQFFSSNLPKYYDNCPFFFWFNTSFIQNNRLCLPRNELDNPHKQKAWKIYPPEFAVEILFGEK

SEQ ID NO: 9595 - protein, 488 aa, Homo sapiens
MNESPQTNEFKGTTEEAPAKESPHTSEFKGAALVSPISKSMLERLSKFEVEDAENVASYDSKIKKIVHSIVSSFAFGIFGVFLVLLDVTLLLADLIFTDSKLYIPLEYRSISLAIGLFFLMDVLLRVFVEGRQQYFSDLFNILDTAIIVIPLLVDVIYIFFDIKLLRNIPRWTHLVRLLRLIILIRIFHLLHQKRQLEKLMRRLVSENKRRYTRDGFDLDLTYVTERIIAMSFPSSGRQSFYRNPIEEVVRFLDKKHRNHYRVYNLCSERAYDPKHFHNRVSRIMIDDHNVPTLHEMVVFTKEVNEWMAQDLENIVAIHCKGGKGRTGTMVCALLIASEIFLTAEESLYYFGERRTNKTHSNKFQGVETPSQNRYVGYFAQVKHLYNWNLPPRRILFIKRFIIYSIRGDVCDLKVQVVMEKKVVFSSTSLGNCSILHDIETDKILINVYDGPPLYDDVKVQFFSSREEGSTLRRANWKGEPSRRPVLD

SEQ ID NO: 9596 - protein, 147 aa, Homo sapiens
MASHRLLLLCLAGLVFVSEAGPTGTGESKCPLMVKVLDAVRGSPAINVAVHVFRKAADDTWEPFASGKTSESGELHGLTTEEEFVEGIYKVEIDTKSYWKALGISPFHEHAEVVFTANDSGPRRYTIAALLSPYSYSTTAVVTNPKE

SEQ ID NO: 9597 - protein, 1281 aa, Homo sapiens
MPIVMARDLEETASSSEDEEVISQEDHPCIMWTGGCRRIPVLVFHADAILTKDNNIRVIGERYHLSYKIVRTDSRLVRSILTAHGFHEVHPSSTDYNLMWTGSHLKPFLLRTLSEAQKVNHFPRSYELTRKDRLYKNIIRMQHTHGFKAFHILPQTFLLPAEYAEFCNSYSKDRGPWIVKPVASSRGRGVYLINNPNQISLEENILVSRYINNPLLIDDFKFDVRLYVLVTSYDPLVIYLYEEGLARFATVRYDQGAKNIRNQFMHLTNYSVNKKSGDYVSCDDPEVEDYGNKWSMSAMLRYLKQEGRDTTALMAHVEDLIIKTIISAELAIATACKTFVPHRSSCFELYGFDVLIDSTLKPWLLEVNLSPSLACDAPLDLKIKASMISDMFTVVGFVCQDPAQRASTRPIYPTFESSRRNPFQKPQRCRPLSASDAEMKNLVGSAREKGPGKLGGSVLGLSMEEIKVLRRVKEENDRRGGFIRIFPTSETWEIYGSYLEHKTSMNYMLATRLFQDRMTADGAPELKIESLNSKAKLHAALYERKLLSLEVRKRRRRSSRLRAMRPKYPVITQPAEMNVKTETESEEEEEVALDNEDEEQEASQEESAGFLRENQAKYTPSLTALVENTPKENSMKVREWNNKGGHCCKLETQELEPKFNLMQILQDNGNLSKMQARIAFSAYLQHVQIRLMKDSGGQTFSASWAAKEDEQMELVVRFLKRASNNLQHSLRMVLPSRRLALLERRRILAHQLGDFIIVYNKETEQMAEKKSKKKVEEEEEDGVNMENFQEFIRQASEAELEEVLTFYTQKNKSASVFLGTHSKISKNNNNYSDSGAKGDHPETIMEEVKIKPPKQQQTTEIHSDKLSRFTTSAEKEAKLVYSNSSSGPTATLQKIPNTHLSSVTTSDLSPGPCHHSSLSQIPSAIPSMPHQPTILLNTVSASASPCLHPGAQNIPSPTGLPRCRSGSHTIGPFSSFQSAAHIYSQKLSRPSSAKAGSCYLNKHHSGIAKTQKEGEDASLYSKRYNQSMVTAELQRLAEKQAARQYSPSSHINLLTQQVTNLNLATGIINRSSASAPPTLRPIISPSGPTWSTQSDPQAPENHSSSPGSRSLQTGGFAWEGEVENNVYSQATGVVPQHKYHPTAGSYQLQFALQQLEQQKLQSRQLLDQSRARHQAIFGSQTLPNSNLWTMNNGAGCRISSATASGQKPTTLPQKVVPPPSSCASLVPKPPPNHEQVLRRATSQKASKGSSAEGQLNGLQSSLNPAAFVPITSSTDPAHTKI

SEQ ID NO: 9598 - protein, 817 aa, Homo sapiens
MEEIKVLRRVKEENDRRGGFIRIFPTSETWEIYGSYLEHKTSMNYMLATRLFQDRGNPRRSLLTGRTRMTADGAPELKIESLNSKAKLHAALYERKLLSLEVRKRRRRSSRLRAMRPKYPVITQPAEMNVKTETESEEEEEVALDNEDEEQEASQEESAGFLRENQAKYTPSLTALVENTPKENSMKVREWNNKGGHCCKLETQELEPKFNLMQILQDNGNLSKMQARIAFSAYLQHVQIRLMKDSGGQTFSASWAAKEDEQMELVVRFLKRASNNLQHSLRMVLPSRRLALLERRRILAHQLGDFIIVYNKETEQMAEKKSKKKVEEEEEDGVNMENFQEFIRQASEAELEEVLTFYTQKNKSASVFLGTHSKISKNNNNYSDSGAKGDHPETIMEEVKIKPPKQQQTTEIHSDKLSRFTTSAEKEAKLVYSNSSSGPTATLQKIPNTHLSSVTTSDLSPGPCHHSSLSQIPSAIPSMPHQPTILLNTVSASASPCLHPGAQNIPSPTGLPRCRSGSHTIGPFSSFQSAAHIYSQKLSRPSSAKAGSCYLNKHHSGIAKTQKEGEDASLYSKRYNQSMVTAELQRLAEKQAARQYSPSSHINLLTQQVTNLNLATGIINRSSASAPPTLRPIISPSGPTWSTQSDPQAPENHSSSPGSRSLQTGGFAWEGEVENNVYSQATGVVPQHKYHPTAGSYQLQFALQQLEQQKLQSRQLLDQSRARHQAIFGSQTLPNSNLWTMNNGAGCRISSATASGQKPTTLPQKVVPPPSSCASLVPKPPPNHEQVLRRATSQKASNTRFRSSFQNYLWYFFQAVS

SEQ ID NO: 9599 - protein, 269 aa, Homo sapiens
MPIVMARDLEETASSSEDEEVISQEDHPCIMWTGGCRRIPVLVFHADAILTKDNNIRVIGERYHLSYKIVRTDSRLVRSILTAHGFHEVHPSSTDYNLMWTGSHLKPFLLRTLSEAQKVNHFPRSYELTRKDRLYKNIIRMQHTHGFKAFHILPQTFLLPAEYAEFCNSYSKDRGPWIVKPVASSRGRGVYLINNPNQISLEENILVSRYINNPLLIDDFKFDVRLYVLVTSYDPLVIYLYEEGLARKCNWKMGNTMDKRRLPIYVQVL

SEQ ID NO: 9600 - protein, 931 aa, Homo sapiens
MSQSPAFGPRRGSSPRGAAGAAARRNESQDYLLMDSELGEDGCPQAPLPCYGYYPCFRGSDNRLAHRRQTVLREKGRRLANRGPAYMFSDRSTSLSIEEERFLDAAEYGNIPVVRKMLEECHSLNVNCVDYMGQNALQLAVANEHLEITELLLKKENLSRVGDALLLAISKGYVRIVEAILSHPAFAEGKRLATSPSQSELQQDDFYAYDEDGTRFSHDVTPIILAAHCQEYEIVHTLLRKGARIERPHDYFCKCNDCNQKQKHDSFSHSRSRINAYKGLASPAYLSLSSEDPVMTALELSNELAVLANIEKEFKNDYKKLSMQCKDFVVGLLDLCRNTEEVEAILNGDVETLQSGDHGRPNLSRLKLAIKYEVKKFVAHPNCQQQLLSIWYENLSGLRQQTMAVKFLVVLAVAIGLPFLALIYWFAPCSKMGKIMRGPFMKFVAHAASFTIFLGLLVMNAADRFEGTKLLPNETSTDNAKQLFRMKTSCFSWMEMLIISWVIGMIWAECKEIWTQGPKEYLFELWNMLDFGMLAIFAASFIARFMAFWHASKAQSIIDANDTLKDLTKVTLGDNVKYYNLARIKWDPSDPQIISEGLYAIAVVLSFSRIAYILPANESFGPLQISLGRTVKDIFKFMVIFIMVFVAFMIGMFNLYSYYIGAKQNEAFTTVEESFKTLFWAIFGLSEVKSVVINYNHKFIENIGYVLYGVYNVTMVIVLLNMLIAMINSSFQEIEDDADVEWKFARAKLWFSYFEEGRTLPVPFNLVPSPKSLFYLLLKLKKWISELFQGHKKGFQEDAEMNKINEEKKLGILGSHEDLSKLSLDKKQVGHNKQPSIRSSEDFHLNSFNNPPRQYQKIMKRLIKRYVLQAQIDKESDEVNEGELKEIKQDISSLRYELLEEKSQNTEDLAELIRELGEKLSMEPNQEETNR

SEQ ID NO: 9601 - protein, 815 aa, Homo sapiens
MSQSPAFGPRRGSSPRGAAGAAARRNESQDYLLMDSELGEDGCPQAPLPCYGYYPCFRGSDNRLAHRRQTVLREKGRRLANRGPAYMFSDRSTSLSIEEERFLDAAEYGNIPVVRKMLEECHSLNVNCVDYMGQNALQLAVANEHLEITELLLKKENLSRVGDALLLAISKGYVRIVEAILSHPAFAEGKRLATSPSQSELQQDDFYAYDEDGTRFSHDVTPIILAAHCQEYEIVHTLLRKGARIERPHDYFCKCNDCNQKQKHDSFSHSRSRINAYKGLASPAYLSLSSEDPVMTALELSNELAVLANIEKEFKMGKIMRGPFMKFVAHAASFTIFLGLLVMNAADRFEGTKLLPNETSTDNAKQLFRMKTSCFSWMEMLIISWVIGMIWAECKEIWTQGPKEYLFELWNMLDFGMLAIFAASFIARFMAFWHASKAQSIIDANDTLKDLTKVTLGDNVKYYNLARIKWDPSDPQIISEGLYAIAVVLSFSRIAYILPANESFGPLQISLGRTVKDIFKFMVIFIMVFVAFMIGMFNLYSYYIGAKQNEAFTTVEESFKTLFWAIFGLSEVKSVVINYNHKFIENIGYVLYGVYNVTMVIVLLNMLIAMINSSFQEIEDDADVEWKFARAKLWFSYFEEGRTLPVPFNLVPSPKSLFYLLLKLKKWISELFQGHKKGFQEDAEMNKINEEKKLGILGSHEDLSKLSLDKKQVGHNKQPSIRSSEDFHLNSFNNPPRQYQKIMKRLIKRYVLQAQIDKESDEVNEGELKEIKQDISSLRYELLEEKSQNTEDLAELIRELGEKLSMEPNQEETNR

SEQ ID NO: 9602 - protein, 876 aa, Homo sapiens
MSQSPAFGPRRGSSPRGAAGAAARRNESQDYLLMDSELGEDGCPQAPLPCYGYYPCFRGSDNRLAHRRQTVLREKGRRLANRGPAYMFSDRSTSLSIEEERFLDAAEYGNIPVVRKMLEECHSLNVNCVDYMGQNALQLAVANEHLEITELLLKKENLSRVGDALLLAISKGYVRIVEAILSHPAFAEGKRLATSPSQSELQQDDFYAYDEDGTRFSHDVTPIILAAHCQEYEIVHTLLRKGARIERPHDYFCKCNDCNQKQKHDSFSHSRSRINAYKGLASPAYLSLSSEDPVMTALELSNELAVLANIEKEFKNDYKKLSMQCKDFVVGLLDLCRNTEEVEAILNGDVETLQSGDHGRPNLSRLKLAIKYEVKKMGKIMRGPFMKFVAHAASFTIFLGLLVMNAADRFEGTKLLPNETSTDNAKQLFRMKTSCFSWMEMLIISWVIGMIWAECKEIWTQGPKEYLFELWNMLDFGMLAIFAASFIARFMAFWHASKAQSIIDANDTLKDLTKVTLGDNVKYYNLARIKWDPSDPQIISEGLYAIAVVLSFSRIAYILPANESFGPLQISLGRTVKDIFKFMVIFIMVFVAFMIGMFNLYSYYIGAKQNEAFTTVEESFKTLFWAIFGLSEVKSVVINYNHKFIENIGYVLYGVYNVTMVIVLLNMLIAMINSSFQEIEDDADVEWKFARAKLWFSYFEEGRTLPVPFNLVPSPKSLFYLLLKLKKWISELFQGHKKGFQEDAEMNKINEEKKLGILGSHEDLSKLSLDKKQVGHNKQPSIRSSEDFHLNSFNNPPRQYQKIMKRLIKRYVLQAQIDKESDEVNEGELKEIKQDISSLRYELLEEKSQNTEDLAELIRELGEKLSMEPNQEETNR

SEQ ID NO: 9603 - protein, 342 aa, Homo sapiens
MSEESDSLRTSPSVASLSENELPPPPEPPGYVCSLTEDLVTKAREELQEKPEWRLRDVQALRDMVRKEYPNLSTSLDDAFLLRFLRARKFDYDRALQLLVNYHSCRRSWPEVFNNLKPSALKDVLASGFLTVLPHTDPRGCHVVCIRPDRWIPSNYPITENIRAIYLTLEKLIQSEETQVNGIVILADYKGVSLSKASHFGPFIAKKVIGILQDGFPIRIKAVHVVNEPRIFKGIFAIIKPFLKEKIANRFFLHGSDLNSLHTNLPRSILPKEYGGTAGELDTATWNAVLLASEDDFVKEFCQPVPACDSILGQTLLPEGLTSDAQCDDSLRAVKSQLYSCY

SEQ ID NO: 9604 - protein, 843 aa, Homo sapiens
MATKKAGSRLETEIERCRSECQWERIPELVKQLSAKLIANDDMAELLLGESKLEQYLKEHPLRQGASPRGPKPQLTEVRKHLTAALDRGNLKSEFLQESNLIMAKLNYVEGDYKEALNIYARVGLDDLPLTAVPPYRLRVIAEAYATKGLCLEKLPISSSTSNLHVDREQDVITCYEKAGDIALLYLQEIERVILSNIQNRSPKPGPAPHDQELGFFLETGLQRAHVLYFKNGNLTRGVGRFRELLRAVETRTTQNLRMTIARQLAEILLRGMCEQSYWNPLEDPPCQSPLDDPLRKGANTKTYTLTRRARVYSGENIFCPQENTEEALLLLLISESMANRDAVLSRIPEHKSDRLISLQSASVVYDLLTIALGRRGQYEMLSECLERAMKFAFEEFHLWYQFALSLMAAGKSARAVKVLKECIRLKPDDATIPLLAAKLCMGSLHWLEEAEKFAKTVVDVGEKTSEFKAKGYLALGLTYSLQATDASLRGMQEVLQRKALLAFQRAHSLSPTDHQAAFYLALQLAISRQIPEALGYVRQALQLQGDDANSLHLLALLLSAQKHYHDALNIIDMALSEYPENFILLFSKVKLQSLCRGPDEALLTCKHMLQIWKSCYNLTNPSDSGRGSSLLDRTIADRRQLNTITLPDFSDPETGSVHATSVAASRVEQALSEVASSLQSSAPKQGPLHPWMTLAQIWLHAAEVYIGIGKPAEATACTQEAANLFPMSHNVLYMRGQIAELRGSMDEARRWYEEALAISPTHVKSMQRLALILHQLGRYSLAEKILRDAVQVNSTAHEVWNGLGEVLQAQGNDAAATECFLTALELEASSPAVPFTIIPRVL

SEQ ID NO: 9605 - protein, 860 aa, Homo sapiens
MATKKAGSRLETEIERCRSECQWERIPELVKQLSAKLIANDDMAELLLGESKLEQYLKEHPLRQGASPRGPKPQLTEVRKHLTAALDRGNLKSEFLQESNLIMAKLNYVEGDYKEALNIYARVGLDDLPLTAVPPYRLRVIAEAYATKGLCLEKLPISSSTSNLHVDREQDVITCYEKAGDIALLYLQEIERVILSNIQNRSPKPGPAPHDQELGFFLETGLQRAHVLYFKNGNLTRGVGRFRELLRAVETRTTQNLRMTIARQLAEILLRGMCEQSYWNPLEDPPCQSPLDDPLRKGANTKTYTLTRRARVYSGENIFCPQENTEEALLLLLISESMANRDAVLSRIPEHKSDRLISLQSASVVYDLLTIALGRRGQYEMLSECLERAMKFAFEEFHLWYQFALSLMAAGKSARAVKVLKECIRLKPDDATIPLLAAKLCMGSLHWLEEAEKFAKTVVDVGEKTSEFKAKGYLALGLTYSLQATDASLRGMQEVLQRKALLAFQRAHSLSPTDHQAAFYLALQLAISRQIPEALGYVRQALQLQGDDANSLHLLALLLSAQKHYHDALNIIDMALSEYPENFILLFSKVKLQSLCRGPDEALLTCKHMLQIWKSCYNLTNPSDSGRGSSLLDRTIADRRQLNTITLPDFSDPETGNSPEAYFHGFPSLFSVSSVHATSVAASRVEQALSEVASSLQSSAPKQGPLHPWMTLAQIWLHAAEVYIGIGKPAEATACTQEAANLFPMSHNVLYMRGQIAELRGSMDEARRWYEEALAISPTHVKSMQRLALILHQLGRYSLAEKILRDAVQVNSTAHEVWNGLGEVLQAQGNDAAATECFLTALELEASSPAVPFTIIPRVL

SEQ ID NO: 9606 - protein, 191 aa, Homo sapiens
MAGAAEDARALFRAGVCAALEAWPALQIAVENGFGGVHSQEKAKWLGGAVEDYFMRNADLELDEVEDFLGELLTNEFDTVVEDGSLPQVSQQLQTMFHHFQRGDGAALREMASCITQRKCKVTATALKTARETDEDEDDVDSVEEMEVTATNDGAATDGVCPQPEPSDPDAQTIKEEDIVEDGWTIVRRKK

SEQ ID NO: 9607 - protein, 1807 aa, Homo sapiens
MAKPTSKDSGLKEKFKILLGLGTPRPNPRSAEGKQTEFIITAEILRELSMECGLNNRIRMIGQICEVAKTKKFEEHAVEALWKAVADLLQPERPLEARHAVLALLKAIVQGQGERLGVLRALFFKVIKDYPSNEDLHERLEVFKALTDNGRHITYLEEELADFVLQWMDVGLSSEFLLVLVNLVKFNSCYLDEYIARMVQMICLLCVRTASSVDIEVSLQVLDAVVCYNCLPAESLPLFIVTLCRTINVKELCEPCWKLMRNLLGTHLGHSAIYNMCHLMEDRAYMEDAPLLRGAVFFVGMALWGAHRLYSLRNSPTSVLPSFYQAMACPNEVVSYEIVLSITRLIKKYRKELQVVAWDILLNIIERLLQQLQTLDSPELRTIVHDLLTTVEELCDQNEFHGSQERYFELVERCADQRPESSLLNLISYRAQSIHPAKDGWIQNLQALMERFFRSESRGAVRIKVLDVLSFVLLINRQFYEEELINSVVISQLSHIPEDKDHQVRKLATQLLVDLAEGCHTHHFNSLLDIIEKVMARSLSPPPELEERDVAAYSASLEDVKTAVLGLLVILQTKLYTLPASHATRVYEMLVSHIQLHYKHSYTLPIASSIRLQAFDFLLLLRADSLHRLGLPNKDGVVRFSPYCVCDYMEPERGSEKKTSGPLSPPTGPPGPAPAGPAVRLGSVPYSLLFRVLLQCLKQESDWKVLKLVLGRLPESLRYKVLIFTSPCSVDQLCSALCSMLSGPKTLERLRGAPEGFSRTDLHLAVVPVLTALISYHNYLDKTKQREMVYCLEQGLIHRCASQCVVALSICSVEMPDIIIKALPVLVVKLTHISATASMAVPLLEFLSTLARLPHLYRNFAAEQYASVFAISLPYTNPSKFNQYIVCLAHHVIAMWFIRCRLPFRKDFVPFITKGLRSNVLLSFDDTPEKDSFRARSTSLNERPKSLRIARPPKQGLNNSPPVKEFKESSAAEAFRCRSISVSEHVVRSRIQTSLTSASLGSADENSVAQADDSLKNLHLELTETCLDMMARYVFSNFTAVPKRSPVGEFLLAGGRTKTWLVGNKLVTVTTSVGTGTRSLLGLDSGELQSGPESSSSPGVHVRQTKEAPAKLESQAGQQVSRGARDRVRSMSGGHGLRVGALDVPASQFLGSATSPGPRTAPAAKPEKASAGTRVPVQEKTNLAAYVPLLTQGWAEILVRRPTGNTSWLMSLENPLSPFSSDINNMPLQELSNALMAAERFKEHRDTALYKSLSVPAASTAKPPPLPRSNTVASFSSLYQSSCQGQLHRSVSWADSAVVMEEGSPGEVPVLVEPPGLEDVEAALGMDRRTDAYSRSSSVSSQEEKSLHAEELVGRGIPIERVVSSEGGRPSVDLSFQPSQPLSKSSSSPELQTLQDILGDPGDKADVGRLSPEVKARSQSGTLDGESAAWSASGEDSRGQPEGPLPSSSPRSPSGLRPRGYTISDSAPSRRGKRVERDALKSRATASNAEKVPGINPSFVFLQLYHSPFFGDESNKPILLPNESQSFERSVQLLDQIPSYDTHKIAVLYVGEGQSNSELAILSNEHGSYRYTEFLTGLGRLIELKDCQPDKVYLGGLDVCGEDGQFTYCWHDDIMQAVFHIATLMPTKDVDKHRCDKKRHLGNDFVSIVYNDSGEDFKLGTIKGQFNFVHVIVTPLDYECNLVSLQCRKDMEGLVDTSVAKIVSDRNLPFVARQMALHANMASQVHHSRSNPTDIYPSKWIARLRHIKRLRQRICEEAAYSNPSLPLVHPPSHSKAPAQTPAEPTPGYEVGQRKRLISSVEDFTEFV

SEQ ID NO: 9608 - protein, 1764 aa, Homo sapiens
MAKPTSKDSGLKEKFKILLGLGTPRPNPRSAEGKQTEFIITAEILRELSMECGLNNRIRMIGQICEVAKTKKFEEHAVEALWKAVADLLQPERPLEARHAVLALLKAIVQGQGERLGVLRALFFKVIKDYPSNEDLHERLEVFKALTDNGRHITYLEEELADFVLQWMDVGLSSEFLLVLVNLVKFNSCYLDEYIARMVQMICLLCVRTASSVDIEVSLQVLDAVVCYNCLPAESLPLFIVTLCRTINVKELCEPCWKLMRNLLGTHLGHSAIYNMCHLMEDRAYMEDAPLLRGAVFFVGMALWGAHRLYSLRNSPTSVLPSFYQAMACPNEVVSYEIVLSITRLIKKYRKELQVVAWDILLNIIERLLQQLQTLDSPELRTIVHDLLTTVEELCDQNEFHGSQERYFELVERCADQRPESSLLNLISYRAQSIHPAKDGWIQNLQALMERFFRSESRGAVRIKVLDVLSFVLLINRQFYEEELINSVVISQLSHIPEDKDHQVRKLATQLLVDLAEGCHTHHFNSLLDIIEKVMARSLSPPPELEERDVAAYSASLEDVKTAVLGLLVILQTKLYTLPASHATRVYEMLVSHIQLHYKHSYTLPIASSIRLQAFDFLLLLRADSLHRLGLPNKDGVVRFSPYCVCDYMEPERGSEKKTSGPLSPPTGPPGPAPAGPAVRLGSVPYSLLFRVLLQCLKQESDWKVLKLVLGRLPESLRYKVLIFTSPCSVDQLCSALCSMLSGPKTLERLRGAPEGFSRTDLHLAVVPVLTALISYHNYLDKTKQREMVYCLEQGLIHRCASQCVVALSICSVEMPDIIIKALPVLVVKLTHISATASMAVPLLEFLSTLARLPHLYRNFAAEQYASVFAISLPYTNPSKFNQYIVCLAHHVIAMWFIRCRLPFRKDFVPFITKGLRSNVLLSFDDTPEKDSFRARSTSLNERPKSRIQTSLTSASLGSADENSVAQADDSLKNLHLELTETCLDMMARYVFSNFTAVPKRSPVGEFLLAGGRTKTWLVGNKLVTVTTSVGTGTRSLLGLDSGELQSGPESSSSPGVHVRQTKEAPAKLESQAGQQVSRGARDRVRSMSGGHGLRVGALDVPASQFLGSATSPGPRTAPAAKPEKASAGTRVPVQEKTNLAAYVPLLTQGWAEILVRRPTGNTSWLMSLENPLSPFSSDINNMPLQELSNALMAAERFKEHRDTALYKSLSVPAASTAKPPPLPRSNTVASFSSLYQSSCQGQLHRSVSWADSAVVMEEGSPGEVPVLVEPPGLEDVEAALGMDRRTDAYSRSSSVSSQEEKSLHAEELVGRGIPIERVVSSEGGRPSVDLSFQPSQPLSKSSSSPELQTLQDILGDPGDKADVGRLSPEVKARSQSGTLDGESAAWSASGEDSRGQPEGPLPSSSPRSPSGLRPRGYTISDSAPSRRGKRVERDALKSRATASNAEKVPGINPSFVFLQLYHSPFFGDESNKPILLPNESQSFERSVQLLDQIPSYDTHKIAVLYVGEGQSNSELAILSNEHGSYRYTEFLTGLGRLIELKDCQPDKVYLGGLDVCGEDGQFTYCWHDDIMQAVFHIATLMPTKDVDKHRCDKKRHLGNDFVSIVYNDSGEDFKLGTIKGQFNFVHVIVTPLDYECNLVSLQCRKDMEGLVDTSVAKIVSDRNLPFVARQMALHANMASQVHHSRSNPTDIYPSKWIARLRHIKRLRQRICEEAAYSNPSLPLVHPPSHSKAPAQTPAEPTPGYEVGQRKRLISSVEDFTEFV

SEQ ID NO: 9609 - protein, 1763 aa, Homo sapiens
MAKPTSKDSGLKEKFKILLGLGTPRPNPRSAEGKQTEFIITAEILRELSMECGLNNRIRMIGQICEVAKTKKFEEHAVEALWKAVADLLQPERPLEARHAVLALLKAIVQGQGERLGVLRALFFKVIKDYPSNEDLHERLEVFKALTDNGRHITYLEEELADFVLQWMDVGLSSEFLLVLVNLVKFNSCYLDEYIARMVQMICLLCVRTASSVDIEVSLQVLDAVVCYNCLPAESLPLFIVTLCRTINVKELCEPCWKLMRNLLGTHLGHSAIYNMCHLMEDRAYMEDAPLLRGAVFFVGMALWGAHRLYSLRNSPTSVLPSFYQAMACPNEVVSYEIVLSITRLIKKYRKELQVVAWDILLNIIERLLQQLQTLDSPELRTIVHDLLTTVEELCDQNEFHGSQERYFELVERCADQRPESSLLNLISYRAQSIHPAKDGWIQNLQALMERFFRSESRGAVRIKVLDVLSFVLLINRQFYEEELINSVVISQLSHIPEDKDHQVRKLATQLLVDLAEGCHTHHFNSLLDIIEKVMARSLSPPPELEERDVAAYSASLEDVKTAVLGLLVILQTKLYTLPASHATRVYEMLVSHIQLHYKHSYTLPIASSIRLQAFDFLLLLRADSLHRLGLPNKDGVVRFSPYCVCDYMEPERGSEKKTSGPLSPPTGPPGPAPAGPAVRLGSVPYSLLFRVLLQCLKQESDWKVLKLVLGRLPESLRYKVLIFTSPCSVDQLCSALCSMLSGPKTLERLRGAPEGFSRTDLHLAVVPVLTALISYHNYLDKTKQREMVYCLEQGLIHRCASQCVVALSICSVEMPDIIIKALPVLVVKLTHISATASMAVPLLEFLSTLARLPHLYRNFAAEQYASVFAISLPYTNPSKFNQYIVCLAHHVIAMWFIRCRLPFRKDFVPFITKGLRSNVLLSFDDTPEKDSFRARSTSLNERPKRIQTSLTSASLGSADENSVAQADDSLKNLHLELTETCLDMMARYVFSNFTAVPKRSPVGEFLLAGGRTKTWLVGNKLVTVTTSVGTGTRSLLGLDSGELQSGPESSSSPGVHVRQTKEAPAKLESQAGQQVSRGARDRVRSMSGGHGLRVGALDVPASQFLGSATSPGPRTAPAAKPEKASAGTRVPVQEKTNLAAYVPLLTQGWAEILVRRPTGNTSWLMSLENPLSPFSSDINNMPLQELSNALMAAERFKEHRDTALYKSLSVPAASTAKPPPLPRSNTVASFSSLYQSSCQGQLHRSVSWADSAVVMEEGSPGEVPVLVEPPGLEDVEAALGMDRRTDAYSRSSSVSSQEEKSLHAEELVGRGIPIERVVSSEGGRPSVDLSFQPSQPLSKSSSSPELQTLQDILGDPGDKADVGRLSPEVKARSQSGTLDGESAAWSASGEDSRGQPEGPLPSSSPRSPSGLRPRGYTISDSAPSRRGKRVERDALKSRATASNAEKVPGINPSFVFLQLYHSPFFGDESNKPILLPNESQSFERSVQLLDQIPSYDTHKIAVLYVGEGQSNSELAILSNEHGSYRYTEFLTGLGRLIELKDCQPDKVYLGGLDVCGEDGQFTYCWHDDIMQAVFHIATLMPTKDVDKHRCDKKRHLGNDFVSIVYNDSGEDFKLGTIKGQFNFVHVIVTPLDYECNLVSLQCRKDMEGLVDTSVAKIVSDRNLPFVARQMALHANMASQVHHSRSNPTDIYPSKWIARLRHIKRLRQRICEEAAYSNPSLPLVHPPSHSKAPAQTPAEPTPGYEVGQRKRLISSVEDFTEFV

SEQ ID NO: 9610 - protein, 1784 aa, Homo sapiens
MAKPTSKDSGLKEKFKILLGLGTPRPNPRSAEGKQTEFIITAEILRELSMECGLNNRIRMIGQICEVAKTKKFEEHAVEALWKAVADLLQPERPLEARHAVLALLKAIVQGQGERLGVLRALFFKVIKDYPSNEDLHERLEVFKALTDNGRHITYLEEELADFVLQWMDVGLSSEFLLVLVNLVKFNSCYLDEYIARMVQMICLLCVRTASSVDIEVSLQVLDAVVCYNCLPAESLPLFIVTLCRTINVKELCEPCWKLMRNLLGTHLGHSAIYNMCHLMEDRAYMEDAPLLRGAVFFVGMALWGAHRLYSLRNSPTSVLPSFYQAMACPNEVVSYEIVLSITRLIKKYRKELQVVAWDILLNIIERLLQQLQTLDSPELRTIVHDLLTTVEELCDQNEFHGSQERYFELVERCADQRPESSLLNLISYRAQSIHPAKDGWIQNLQALMERFFRSESRGAVRIKVLDVLSFVLLINRQFYEEELINSVVISQLSHIPEDKDHQVRKLATQLLVDLAEGCHTHHFNSLLDIIEKVMARSLSPPPELEERDVAAYSASLEDVKTAVLGLLVILQTKLYTLPASHATRVYEMLVSHIQLHYKHSYTLPIASSIRLQAFDFLLLLRADSLHRLGLPNKDGVVRFSPYCVCDYMEPERGSEKKTSGPLSPPTGPPGPAPAGPAVRLGSVPYSLLFRVLLQCLKQESDWKVLKLVLGRLPESLRYKVLIFTSPCSVDQLCSALCSMLSGPKTLERLRGAPEGFSRTDLHLAVVPVLTALISYHNYLDKTKQREMVYCLEQGLIHRCASQCVVALSICSVEMPDIIIKALPVLVVKLTHISATASMAVPLLEFLSTLARLPHLYRNFAAEQYASVFAISLPYTNPSKFNQYIVCLAHHVIAMWFIRCRLPFRKDFVPFITKGLRSNVLLSFDDTPEKDSFRARSTSLNERPKSLRIARPPKQGLNNSPPVKEFKESSAAEAFRCRSISVSEHVVRSRIQTSLTSASLGSADENSVAQADDSLKNLHLELTETCLDMMARYVFSNFTAVPKRSPVGEFLLAGGRTKTWLVGNKLVTVTTSVGTGTRSLLGLDSGELQSGPESSSSPGVHVRQTKEAPAKLESQAGQQVSRGARDRVRSMSGGHGLRVGALDVPASQFLGSATSPGPRTAPAAKPEKASAGTRVPVQEKTNLAAYVPLLTQGWAEILVRRPTGNTSWLMSLENPLSPFSSDINNMPLQELSNALMAAERFKEHRDTALYKSLSVPAASTAKPPPLPRSNTDSAVVMEEGSPGEVPVLVEPPGLEDVEAALGMDRRTDAYSRSSSVSSQEEKSLHAEELVGRGIPIERVVSSEGGRPSVDLSFQPSQPLSKSSSSPELQTLQDILGDPGDKADVGRLSPEVKARSQSGTLDGESAAWSASGEDSRGQPEGPLPSSSPRSPSGLRPRGYTISDSAPSRRGKRVERDALKSRATASNAEKVPGINPSFVFLQLYHSPFFGDESNKPILLPNESQSFERSVQLLDQIPSYDTHKIAVLYVGEGQSNSELAILSNEHGSYRYTEFLTGLGRLIELKDCQPDKVYLGGLDVCGEDGQFTYCWHDDIMQAVFHIATLMPTKDVDKHRCDKKRHLGNDFVSIVYNDSGEDFKLGTIKGQFNFVHVIVTPLDYECNLVSLQCRKDMEGLVDTSVAKIVSDRNLPFVARQMALHANMASQVHHSRSNPTDIYPSKWIARLRHIKRLRQRICEEAAYSNPSLPLVHPPSHSKAPAQTPAEPTPGYEVGQRKRLISSVEDFTEFV
